United States Patent Application Publication US 2018/0126003 A1 - sequence listing, part 124

SEQ ID NO: 217346 - DNA, 3978 bp, Artificial Sequence
  derived and/or modified sequence
tcggacccgcccctcccggcctcccgccgcaatcttggcgggaaggcgccggccgctaagaagccgaaagatgtccaggtcgggcgcggcggctgagaaggcggactccagacagcgaccccagatgaaggtaaatgaatataaagaaaatcaaaacatcgcttatgtgtctctgagaccagcacagactacagttttaataaaaacagctaaggtctatcttgcccccttttcactcagtaattaccagctagaccagcttatgtgccccaaatccctatcagaaaagaattctaacaatgaagtggcgtgtaagaagactaaaataaagaaaacttgcagaaggattatacctccaaagatgaaaaacacatcttccaaggcagaatccacgctgcaaaattcatcctcagctgttcatactgaaagtaacaagctacaacccaagagaacggcagatgcgatgaatctcagtgttgatgtggaaagtagtcaggatggagacagtgatgaagataccacaccatccctggatttttcgggattgtcaccctacgaaaggaagagactgaagaacatatcagaaaacgcagacttttttgcttctcttcagttgtctgagtctgctgcaagactccgtgaaatgatagagaagagacagcctcctaaatccaaaagaaagaagcctaagagagaaaatgggattggatgtagaaggtcaatgcgattactaaaagttgatccttcgggagtttcattaccagcagctccaacaccgccgacattagtagcagatgaaactcctttgttacctcctgggcctttagaaatgacttctgaaaatcaagaagacaacaatgaacgatttaaaggatttctgcacacatgggcaggaatgagcaagccaagtagtaagaacactgagaagggattatctagcattaaaagctacaaagccaatttaaatggcatggtcattagtgaagataccgtttacaaagttaccacaggcccaatattctctatggctctccatccatcagaaactagaactttggtagcagttggggccaaatttgggcaagttggactttgtgatttgacccagcaacctaaagaagatggagtttatgtttttcatccccatagtcagccagttagctgtctttacttctcacccgccaatccggcccacatactgtcactgagctatgatggcacgttacgctgtggggatttttccagggctatttttgaagaggtgtatagaaatgaaagaagtagcttttcctccttcgacttcttggcagaagatgcctccactttaatagtaggacactgggatggaaatatgtcactggtggatagacggacacctggaacttcttatgagaaacttaccagttcttctatgggaaaaataagaactgttcatgtccacccagtgcatagacagtattttatcactgccggattgagggatactcatatttatgatgcaaggcgattgaattccaggagaagtcagcctttgatttctttgactgaacatacaaagagcattgcttccgcctatttttcacctcttactggtaacagagtggtgaccacatgtgctgattgtaatctgagaatttttgacagcagctgtatatcttctaagattccgctcctcaccaccatcaggcacaacactttcactgggcgatggctgaccaggttccaagccatgtgggatcctaaacaagaagactgtgtcatagttggcagcatggcccatccacgacgggtagaaatcttccatgagacaggaaagagggtgcattcgtttggtggagaataccttgtctctgtgtgttccatcaatgccatgcacccaactcggtatattttggctggaggtaattccagcgggaagatacatgtttttatgaatgaaaaaagctgctgagtttttggtttaggaacatcaatttgttcaaattgaccactgtctaaggagcctagtaatcggcgtgccttagtgtgtttatgtggtaatgtgttacatttagcaattataacattgttttattaataagactataagaagagtgtacttttagtaagggagaagtcttggagggttgcttctgcaggacggggagggaatttgaggggaggctgaggtgccgtcaggactttttttttttttttttttttgagatggagttttgctcttgttgcccaggctggagtgcaatagcgcgatcttggctcaccgcaacctccgcctcccaggttcaagcgattctcctgcctcagactcctaagtagctgggattacaggcacctgccaccacgcctggctatttttttgtatttttagtagagatggggtttcatcatgttggccaggctggtctcgagctcctgacctcaggtgatctgcccgcctcggcctccaaaagtgctggaattacaggcgtgagccaccatgcctggccatcagaacttgtaatcaagacagtatgttgagaaattctaacattataaattacaaagctttgactattaaagtttttgtgatctaatgatacagttttgattctatagtaatttgtggcttattttatagtttataatgaatacttatttctagactcatacactggaaggggacccggaaaggtaatgtaactcagtgattttaaaacttgatttttttaactgagaactttttttgccccctgcctgtaggttaagtcttacgtgaaatgccaagataattgctgagcagctttggttacccagggcggggtctgggtctgtctgtactttgcctttactctagatggctcctgagacacaggcaggactcccaagcaccgggttgggatctgccctggtcccggcattccagtataagattgcctcagacctgtgtttttcagactgggtttttgctcttcacatgaaatcaagttagatgacaatgactggtgttgaaaaaaatgaaaaggaaagaatttgtaaagaacagaaaatatatttgagtaagtattgtttggtaaaacttagttacatatgcatatatatttgttaggtatatatgtttatgtgtattctgatgtaaaatatatatatatatatattttattactatagtaccatgggtaatggataaagaagttaaagctactgcttagaatgaagaaggccccaggcttacctgtcccgatctttaaactgtccgaaggaaattcaatagcctgttaagtgaataccttcattcttacttgtatttgggggaatattatgaaatactcaccacttttggtattttatgaaaatgttttcttttcagaagttatggtaatttcaatgtgtttgttgttgggaggggagctgccaaatcagttactaatattactgtgtgacatctatccaacttttttcattattcttcattgccaaatactgaaagacttgtaaatggctttggcaatatgtttgaattctaagaggaaatattttcccataattgtatatcagagaaatatagtgatatacaatttccttgaaaaccaatttctaaataattttcttctctgtaatctaagtgtaaaaaggtttagttttttaataggtttaggtgtttataagcaatagttctctattttctagttgatataagtagaagaattgacaagtgagatggaaatgttaatttataaagggaaagaaaagctaggtgaggttgagttataattaaactgttcaggaaacatcgtaaaggctttaggctccctttttcatttctataccaattaatctcatgggttctagagtggttagttctacgggaattgtttttgtttttgtttttaaagatgctgaaaactactctcaatcaaattagtaccatcatttaagctttgaatacttggcagtaattgcctgggctcgtcaataaatgttagcaaattcttgatgttc

SEQ ID NO: 217347 - DNA, 2586 bp, Artificial Sequence
  derived and/or modified sequence
ggcctcccgccgcaatcttggcgggaaggcgccggccgctaagaagccgaaagatgtccaggtcgggcgcggcggctgagaaggcggactccagacagcgaccccagatgaaggtgagaaacggactggtgcttccaaggtaaatgaatataaagaaaatcaaaacatcgcttatgtgtctctgagaccagcacagactacagttttaataaaaacagctaaggtctatcttgcccccttttcactcagtaattaccagctagaccagcttatgtgccccaaatccctatcagaaaagaattctaacaatgaagtggcgtgtaagaagactaaaataaagaaaacttgcagaaggattatacctccaaagatgaaaaacacatcttccaaggcagaatccacgctgcaaaattcatcctcagctgttcatactgaaagtaacaagctacaacccaagagaacggcagatgcgatgaatctcagtgttgatgtggaaagtagtcaggatggagacagtgatgaagataccacaccatccctggatttttcgggattgtcaccctacgaaaggaagagactgaagaacatatcagaaaacgcagacttttttgcttctcttcagttgtctgagtctgctgcaagactccgtgaaatgatagagaagagacagcctcctaaatccaaaagaaagaagcctaagagagaaaatgggattggatgtagaaggtcaatgcgattactaaaagttgatccttcgggagtttcattaccagcagctccaacaccgccgacattagtagcagatgaaactcctttgttacctcctgggcctttagaaatgacttctgaaaatcaagaagacaacaatgaacgatttaaaggatttctgcacacatgggcaggaatgagcaagccaagtagtaagaacactgagaagggattatctagcattaaaagctacaaagccaatttaaatggcatggtcattagtgaagataccgtttacaaagttaccacaggcccaatattctctatggctctccatccatcagaaactagaactttggtagcagttggggccaaatttgggcaagttggactttgtgatttgacccagcaacctaaagaagatggagtttatgtttttcatccccatagtcagccagttagctgtctttacttctcacccgccaatccggcccacatactgtcactgagctatgatggcacgttacgctgtggggatttttccagggctatttttgaagaggtgtatagaaatgaaagaagtagcttttcctccttcgacttcttggcagaagatgcctccactttaatagtaggacactgggatggaaatatgtcactggtggatagacggacacctggaacttcttatgagaaacttaccagttcttctatgggaaaaataagaactgttcatgtccacccagtgcatagacagtattttatcactgccggattgagggatactcatatttatgatgcaaggcgattgaattccaggagaagtcagcctttgatttctttgactgaacatacaaagagcattgcttccgcctatttttcacctcttactggtaacagagtggtgaccacatgtgctgattgtaatctgagaatttttgacagcagctgtatatcttctaagattccgctcctcaccaccatcaggcacaacactttcactgggcgatggctgaccaggttccaagccatgtgggatcctaaacaagaagactgtgtcatagttggcagcatggcccatccacgacgggtagaaatcttccatgagacaggaaagagggtgcattcgtttggtggagaataccttgtctctgtgtgttccatcaatgccatgcacccaactcggtatattttggctggaggtaattccagcgggaagatacatgtttttatgaatgaaaaaagctgctgagtttttggtttaggaacatcaatttgttcaaattgaccactgtctaaggagcctagtaatcggcgtgccttagtgtgtttatgtggtaatgtgttacatttagcaattataacattgttttattaataagactataagaagagtgtacttttagtaagggagaagtcttggagggttgcttctgcaggacggggagggaatttgaggggaggctgaggtgccgtcaggactttttttttttttttttttttgagatggagttttgctcttgttgcccaggctggagtgcaatagcgcgatcttggctcaccgcaacctccgcctcccaggttcaagcgattctcctgcctcagactcctaagtagctgggattacaggcacctgccaccacgcctggctatttttttgtatttttagtagagatggggtttcatcatgttggccaggctggtctcgagctcctgacctcaggtgatctgcccgcctcggcctccaaaagtgctggaattacaggcgtgagccaccatgcctggccatcagaacttgtaatcaagacagtatgttgagaaattctaacattataaattacaaagctttgactattaaagtttttgtgatctaatgat

SEQ ID NO: 217348 - protein, 333 aa, Artificial Sequence
  derived and/or modified sequence
MEFPFDVDALFPERITVLDQHLRPPARRPGTTTPARVDLQQQIMTIIDELGKASAKAQNLSAPITSASRMQSNRHVVYILKDSSARPAGKGAIIGFIKVGYKKLFVLDDREAHNEVEPLCILDFYIHESVQRHGHGRELFQYMLQKERVEPHQLAIDRPSQKLLKFLNKHYNLETTVPQVNNFVIFEGFFAHQHRPPAPSLRATRHSRAAAVDPTPAAPARKLPPKRAEGDIKPYSSSDREFLKVAVEPPWPLNRAPRRATPPAHPPPRSSSLGNSPERGPLRPFVPEQELLRSLRLCPPHPTARLLLAADPGGSPAQRRRTSSLPRSEESRY

SEQ ID NO: 217349 - DNA, 1002 bp, Artificial Sequence
  derived and/or modified sequence
atggagttccccttcgacgtggacgccctgttccccgagagaatcaccgtgctggaccagcacctgagaccccccgccagaagacccggcaccaccacccccgccagagtggacctgcagcagcagatcatgaccatcatcgacgagctgggcaaggccagcgccaaggcccagaacctgagcgcccccatcaccagcgccagcagaatgcagagcaacagacacgtggtgtacatcctgaaggacagcagcgccagacccgccggcaagggcgccatcatcggcttcatcaaggtgggctacaagaagctgttcgtgctggacgacagagaggcccacaacgaggtggagcccctgtgcatcctggacttctacatccacgagagcgtgcagagacacggccacggcagagagctgttccagtacatgctgcagaaggagagagtggagccccaccagctggccatcgacagacccagccagaagctgctgaagttcctgaacaagcactacaacctggagaccaccgtgccccaggtgaacaacttcgtgatcttcgagggcttcttcgcccaccagcacagaccccccgcccccagcctgagagccaccagacacagcagagccgccgccgtggaccccacccccgccgcccccgccagaaagctgccccccaagagagccgagggcgacatcaagccctacagcagcagcgacagagagttcctgaaggtggccgtggagcccccctggcccctgaacagagcccccagaagagccaccccccccgcccaccccccccccagaagcagcagcctgggcaacagccccgagagaggccccctgagacccttcgtgcccgagcaggagctgctgagaagcctgagactgtgccccccccaccccaccgccagactgctgctggccgccgaccccggcggcagccccgcccagagaagaagaaccagcagcctgcccagaagcgaggagagcagatactag

SEQ ID NO: 217350 - DNA, 972 bp, Artificial Sequence
  derived and/or modified sequence
atggagttccccttcgacgtggacgccctgttccccgagagaatcaccgtgctggaccagcacctgagaccccccgccagaagacccggcaccaccacccccgccagagtggacctgcagcagcagatcatgaccatcatcgacgagctgggcaaggccagcgccaaggcccagaacctgagcgcccccatcaccagcgccagcagaatgcagagcaacagacacgtggtgtacatcctgaaggacagcagcgccagacccgccggcaagggcgccatcatcggcttcatcaaggtgggctacaagaagctgttcgtgctggacgacagagaggcccacaacgaggtggagcccctgtgcatcctggacttctacatccacgagagcgtgcagagacacggccacggcagagagctgttccagtacatgctgcagaaggagagagtggagccccaccagctggccatcgacagacccagccagaagctgctgaagttcctgaacaagcactacaacctggagaccaccgtgccccaggtgaacaacttcgtgatcttcgagggcttcttcgcccaccagcacagaccccccgcccccagcctgagagccaccagacacagcagagccgccgccgtggaccccacccccgccgcccccgccagaaagctgccccccaagagagccgagggcgacatcaagccctacagcagcagcgacagagagttcctgaaggtggccgtggagcccccctggcccctgaacagagcccccagaagagccaccccccccgcccaccccccccccagaagcagcagcctgggcaacagccccgagagaggccccctgagacccttcgtgcccgagcaggagctgctgagaagcctgagactgtgccccccccaccccaccgccagactgctgctggccgccgaccccggcggcagccccgcccagagaagaagaaccagatag

SEQ ID NO: 217351 - DNA, 2119 bp, Artificial Sequence
  derived and/or modified sequence
atggagttcccgttcgatgtggacgcgctgttcccggagcggatcacggtgctggaccagcacctgaggcccccagcccgccgacccggaaccacaacgccggcccgtgttgatctacagcagcaaattatgaccattatagatgaactgggcaaggcttctgccaaggcccagaatctttccgctcctatcactagtgcatcaaggatgcagagtaaccgccatgttgtttatattctcaaagacagttcagcccgaccggctggaaaaggagccattattggtttcatcaaagttggatacaagaagctctttgtactggatgatcgtgaggctcataatgaggtagaaccactttgcatcctggacttttacatccatgagtctgtgcaacgccatggccatgggcgagaactcttccagtatatgttgcagaaggagcgagtggaaccgcaccaactggcaattgaccgaccctcacagaagctgctgaaattcctgaataagcactacaatctggagaccacagtcccacaggtgaacaactttgtgatctttgaaggcttctttgcccatcaacatcggccccctgctccctctctgagggcaactcgacactctcgtgctgctgcagtcgatcccacgcccgctgctccagcaaggaagctgccacccaagagagcagagggagacatcaagccatactcctctagtgaccgagaatttctgaaggtagctgtggagcctccttggcccctaaacagggcccctcgccgcgccacacctccagcccacccacccccccgctccagcagcctgggaaactcaccagaacgaggtcccctccgcccctttgtgccagagcaggagctgctgcgttccttgcgcctctgccccccacaccctaccgcccgccttctgttggctgctgaccctgggggcagcccagctcaacgtcgtcgcaccagctcccttccccgctctgaggagagtcgatactaacagctaccctctccctgccctgggagacctggggtgggcagggaacccctccctgagaacctcagacccactcttccattgcatcctgtaggacccagtggaacctgacagagcccataggattccctcttctactttcttagacagcagggatgtcagggtctcaaactgcctaacactttgtagcttttcttaacacaaaagcaccccttctctcctaacttgggctctgaatactttcccaacaggaagtctgatctgttgccagacttcttggttagatggctcatacatttatctagagaagcacactcttgcttgctgtcaaactttagaccaccatggaaggtctaagggcatcctgtgccagggaaactttttaaggaattttatctatgggataaaccccatattccctctagtgtctactggtggctctaatactgctttgtgctgcctgccacacttgccctttgagcctgcgaatggccgctagtgagcaagctctgcttcagagcagtctagttaggtagaacagggacttaccagcttcccaaagggatctactcaccattgccaaactcttcatttccacattttgtgtaggtgtcagggaaccccaaactggtgttgctttggggtctctaaaggagattggctgacaccaccatttcccccagatccagattctctgagggaggttgtttcttgagagtagatccagagtgtcaaggatctgttagatcctggaatcccttcttgcatccatccctccctggtagctaggtcccgatatactcctgtcttgtgagattgtcgagatgagatgggggaccactcttcctctgtccttcctctctcctttcctccatagcaaggacgaccttccctgctccatgcccagagtatagctagatcccttcccctccctaccctctgaatgtgtgctagatcaggtgccccactgtgtttcctgaaatccttgggagccggatctccccatctcccctactcactcttcccttttcttctctcagtgttgtctgaataaagtgtgaaatcttttgtgttttctaaattgacattttcaatgaaaaaaagaatcacaaaaaaaaaa

SEQ ID NO: 217352 - DNA, 2646 bp, Artificial Sequence
  derived and/or modified sequence
acaatgggccatggagttcccgttcgatgtggacgcgctgttcccggagcggatcacggtgctggaccagcacctgaggcccccagcccgccgacccggaaccacaacgccggcccgtgttgatctacagcagcaaattatgaccattatagatgaactgggcaaggcttctgccaaggcccagaatctttccgctcctatcactagtgcatcaaggatgcagagtaaccgccatgttgtttatattctcaaagacagttcagcccgaccggctggaaaaggagccattattggtttcatcaaagttggatacaagaagctctttgtactggatgatcgtgaggctcataatgaggtagaaccactttgcatcctggacttttacatccatgagtctgtgcaacgccatggccatgggcgagaactcttccagtatatgttgcagaaggagcgagtggaaccgcaccaactggcaattgaccgaccctcacagaagctgctgaaattcctgaataagcactacaatctggagaccacagtcccacaggtgaacaactttgtgatctttgaaggcttctttgcccatcaacatcggccccctgctccctctctgagggcaactcgacactctcgtgctgctgcagtcgatcccacgcccgctgctccagcaaggaagctgccacccaagagagcagagggagacatcaagccatactcctctagtgaccgagaatttctgaaggtagctgtggagcctccttggcccctaaacagggcccctcgccgcgccacacctccagcccacccacccccccgctccagcagcctgggaaactcaccagaacgaggtcccctccgcccctttgtgccagagcaggagctgctgcgttccttgcgcctctgccccccacaccctaccgcccgccttctgttggctgctgaccctgggggcagcccagctcaacgtcgtcgcaccaggtaataggagttgaagggctaaggagcctcacagctataaaagaggatgttagaaatggcaaagggcaatttgaatccatcagagagatggatcaataagatgggtggcttggggggggtcctgaaacctttcaagaaaaatatttgtgcaagtgatctgggaaaaaaatgcagtgaaggagcagaataggaccttatatggagcctagggaccctggctttaatgtgagagttatgtggaatggtaggaagaacaccgagatccatcgagttgggggaacagagccttctaagattgggaaaatcttcgcttaatacttgctggggaaggggcagtgtctgacagagagtgggaagccactggcttgtgtgccaagagtccatcgcagcaggcagggagtgggcatttcctttatttctctccctttctcttcacctctgacttctctgtttttctctcccccgccccccgccatttcccatctcccttcctcccatccataacatccttccacagctcccttccccgctctgaggagagtcgatactaacagctaccctctccctgccctgggagacctggggtgggcagggaacccctccctgagaacctcagacccactcttccattgcatcctgtaggacccagtggaacctgacagagcccataggattccctcttctactttcttagacagcagggatgtcagggtctcaaactgcctaacactttgtagcttttcttaacacaaaagcaccccttctctcctaacttgggctctgaatactttcccaacaggaagtctgatctgttgccagacttcttggttagatggctcatacatttatctagagaagcacactcttgcttgctgtcaaactttagaccaccatggaaggtctaagggcatcctgtgccagggaaactttttaaggaattttatctatgggataaaccccatattccctctagtgtctactggtggctctaatactgctttgtgctgcctgccacacttgccctttgagcctgcgaatggccgctagtgagcaagctctgcttcagagcagtctagttaggtagaacagggacttaccagcttcccaaagggatctactcaccattgccaaactcttcatttccacattttgtgtaggtgtcagggaaccccaaactggtgttgctttggggtctctaaaggagattggctgacaccaccatttcccccagatccagattctctgagggaggttgtttcttgagagtagatccagagtgtcaaggatctgttagatcctggaatcccttcttgcatccatccctccctggtagctaggtcccgatatactcctgtcttgtgagattgtcgagatgagatgggggaccactcttcctctgtccttcctctctcctttcctccatagcaaggacgaccttccctgctccatgcccagagtatagctagatcccttcccctccctaccctctgaatgtgtgctagatcaggtgccccactgtgtttcctgaaatccttgggagccggatctccccatctcccctactcactcttcccttttcttctctcagtgttgtctgaataaagtgtgaaatcttttgtgttttctaaattgacattttcaatgaaaaaaagaatcacaaaaaaaaaa

SEQ ID NO: 217353 - DNA, 2119 bp, Artificial Sequence
  derived and/or modified sequence
atggagttcccgttcgatgtggacgcgctgttcccggagcggatcacggtgctggaccagcacctgaggcccccagcccgccgacccggaaccacaacgccggcccgtgttgatctacagcagcaaattatgaccattatagatgaactgggcaaggcttctgccaaggcccagaatctttccgctcctatcactagtgcatcaaggatgcagagtaaccgccatgttgtttatattctcaaagacagttcagcccgaccggctggaaaaggagccattattggtttcatcaaagttggatacaagaagctctttgtactggatgatcgtgaggctcataatgaggtagaaccactttgcatcctggacttttacatccatgagtctgtgcaacgccatggccatgggcgagaactcttccagtatatgttgcagaaggagcgagtggaaccgcaccaactggcaattgaccgaccctcacagaagctgctgaaattcctgaataagcactacaatctggagaccacagtcccacaggtgaacaactttgtgatctttgaaggcttctttgcccatcaacatcggccccctgctccctctctgagggcaactcgacactctcgtgctgctgcagtcgatcccacgcccgctgctccagcaaggaagctgccacccaagagagcagagggagacatcaagccatactcctctagtgaccgagaatttctgaaggtagctgtggagcctccttggcccctaaacagggcccctcgccgcgccacacctccagcccacccacccccccgctccagcagcctgggaaactcaccagaacgaggtcccctccgcccctttgtgccagagcaggagctgctgcgttccttgcgcctctgccccccacaccctaccgcccgccttctgttggctgctgaccctgggggcagcccagctcaacgtcgtcgcaccagctcccttccccgctctgaggagagtcgatactaacagctaccctctccctgccctgggagacctggggtgggcagggaacccctccctgagaacctcagacccactcttccattgcatcctgtaggacccagtggaacctgacagagcccataggattccctcttctactttcttagacagcagggatgtcagggtctcaaactgcctaacactttgtagcttttcttaacacaaaagcaccccttctctcctaacttgggctctgaatactttcccaacaggaagtctgatctgttgccagacttcttggttagatggctcatacatttatctagagaagcacactcttgcttgctgtcaaactttagaacaccatggaaggtctaagggcatcctgtgccagggaaactttttaaggaattttatctatgggataaaccccatattccctctagtgtctactggtggctctaatactgctttgtgctgcctgccacacttgccctttgagcctgcgaatggccgctagtgagcaagctctgcttcagagcagtctagttaggtagaacagggacttaccagcttcccaaagggatctactcaccattgccaaactcttcatttccacattttgtgtaggtgtcagggaaccccaaactggtgttgctttggggtctctaaaggagattggctgacaccaccatttcccccagatccagattctctgagggaggttgtttcttgagagtagatccagagtgtcaaggatctgttagatcctggaatcccttcttgcatccatccctccctggtagctaggtcccgatatactcctgtcttgtgagattgtcgagatgagatgggggaccactcttcctctgtccttcctctctcctttcctccatagcaaggacgaccttccctgctccatgcccagagtatagctagatcccttcccctccctaccctctgaatgtgtgctagatcaggtgccccactgtgtttcctgaaatccttgggagccggatctccccatctcccctactcactcttcccttttcttctctcagtgttgtctgaataaagtgtgaaatcttttgtgttttctaaattgacattttcaatgaaaaaaagaatcacaaaaaaaaaa

SEQ ID NO: 217354 - DNA, 2646 bp, Artificial Sequence
  derived and/or modified sequence
acaatgggccatggagttcccgttcgatgtggacgcgctgttcccggagcggatcacggtgctggaccagcacctgaggcccccagcccgccgacccggaaccacaacgccggcccgtgttgatctacagcagcaaattatgaccattatagatgaactgggcaaggcttctgccaaggcccagaatctttccgctcctatcactagtgcatcaaggatgcagagtaaccgccatgttgtttatattctcaaagacagttcagcccgaccggctggaaaaggagccattattggtttcatcaaagttggatacaagaagctctttgtactggatgatcgtgaggctcataatgaggtagaaccactttgcatcctggacttttacatccatgagtctgtgcaacgccatggccatgggcgagaactcttccagtatatgttgcagaaggagcgagtggaaccgcaccaactggcaattgaccgaccctcacagaagctgctgaaattcctgaataagcactacaatctggagaccacagtcccacaggtgaacaactttgtgatctttgaaggcttctttgcccatcaacatcggccccctgctccctctctgagggcaactcgacactctcgtgctgctgcagtcgatcccacgcccgctgctccagcaaggaagctgccacccaagagagcagagggagacatcaagccatactcctctagtgaccgagaatttctgaaggtagctgtggagcctccttggcccctaaacagggcccctcgccgcgccacacctccagcccacccacccccccgctccagcagcctgggaaactcaccagaacgaggtcccctccgcccctttgtgccagagcaggagctgctgcgttccttgcgcctctgccccccacaccctaccgcccgccttctgttggctgctgaccctgggggcagcccagctcaacgtcgtcgcaccaggtaataggagttgaagggctaaggagcctcacagctataaaagaggatgttagaaatggcaaagggcaatttgaatccatcagagagatggatcaataagatgggtggcttggggggggtcctgaaacctttcaagaaaaatatttgtgcaagtgatctgggaaaaaaatgcagtgaaggagcagaataggaccttatatggagcctagggaccctggctttaatgtgagagttatgtggaatggtaggaagaacaccgagatccatcgagttgggggaacagagccttctaagattgggaaaatcttcgcttaatacttgctggggaaggggcagtgtctgacagagagtgggaagccactggcttgtgtgccaagagtccatcgcagcaggcagggagtgggcatttcctttatttctctccctttctcttcacctctgacttctctgtttttctctcccccgccccccgccatttcccatctcccttcctcccatccataacatccttccacagctcccttccccgctctgaggagagtcgatactaacagctaccctctccctgccctgggagacctggggtgggcagggaacccctccctgagaacctcagacccactcttccattgcatcctgtaggacccagtggaacctgacagagcccataggattccctcttctactttcttagacagcagggatgtcagggtctcaaactgcctaacactttgtagcttttcttaacacaaaagcaccccttctctcctaacttgggctctgaatactttcccaacaggaagtctgatctgttgccagacttcttggttagatggctcatacatttatctagagaagcacactcttgcttgctgtcaaactttagaacaccatggaaggtctaagggcatcctgtgccagggaaactttttaaggaattttatctatgggataaaccccatattccctctagtgtctactggtggctctaatactgctttgtgctgcctgccacacttgccctttgagcctgcgaatggccgctagtgagcaagctctgcttcagagcagtctagttaggtagaacagggacttaccagcttcccaaagggatctactcaccattgccaaactcttcatttccacattttgtgtaggtgtcagggaaccccaaactggtgttgctttggggtctctaaaggagattggctgacaccaccatttcccccagatccagattctctgagggaggttgtttcttgagagtagatccagagtgtcaaggatctgttagatcctggaatcccttcttgcatccatccctccctggtagctaggtcccgatatactcctgtcttgtgagattgtcgagatgagatgggggaccactcttcctctgtccttcctctctcctttcctccatagcaaggacgaccttccctgctccatgcccagagtatagctagatcccttcccctccctaccctctgaatgtgtgctagatcaggtgccccactgtgtttcctgaaatccttgggagccggatctccccatctcccctactcactcttcccttttcttctctcagtgttgtctgaataaagtgtgaaatcttttgtgttttctaaattgacattttcaatgaaaaaaagaatcacaaaaaaaaaa

SEQ ID NO: 217355 - DNA, 1002 bp, Artificial Sequence
  derived and/or modified sequence
atggaattcccctttgatgttgacgcactattcccagagaggattaccgtcctggatcagcacctgcggcctccggcccggagaccaggaactacaaccccggctagagtagacctacagcaacaaataatgactatcatcgacgaactgggaaaggcgagcgcaaaggcacagaacctcagtgccccaataactagcgcgtcccgcatgcagagtaatcggcacgtggtgtatatccttaaagattccagtgctcggcctgccgggaaaggagctattatcggattcataaaagtgggctacaagaaactcttcgtactggacgaccgagaagcgcataatgaggtggaacccttatgcatcctggacttttatatccatgagagtgtgcagcgacacgggcatggacgcgagctcttccagtacatgttgcagaaagagcgcgttgagcctcaccagttagccatcgataggccgagtcaaaaactcctgaaattcctgaataagcactacaatttggagaccacagtccctcaggtgaacaactttgtgattttcgagggcttcttcgcccatcagcacaggcccccagcccctagcttacgggccacaaggcattcacgcgctgcagctgttgaccctacccccgccgcccccgcccggaagctgccacccaaacgcgctgagggcgacattaagccctacagtagttctgatcgcgagtttctgaaagttgctgtcgagcctccctggccgttgaatagagcaccacgacgagctaccccccccgcgcacccacccccacgatctagctcactggggaactctccagaaaggggccccctgaggccctttgtgcctgaacaggaactgttgcggtctctgcggctctgccctcctcatccaaccgccaggctgttgctcgccgccgacccaggtggctcgcctgcacagcgcagaagaacctcctctctgccgcgcagcgaagagtctcggtattag

SEQ ID NO: 217356 - DNA, 972 bp, Artificial Sequence
  derived and/or modified sequence
atggagttcccttttgatgtggatgctttattccccgaacgtattaccgtgctagatcagcatttacgtccgcccgcccggaggcccgggactacaacacctgcaagagtggatttacagcagcaaattatgactataatcgatgagcttggaaaagcctcagcaaaggcccagaatctatcagctccaattacttccgcgagccgaatgcagtccaaccgacacgtggtgtacattctcaaagatagctctgctcggcccgcggggaagggggctataattggattcataaaggtgggatataaaaaactgtttgtgctcgatgaccgcgaagcccataacgaagtcgagcccctatgcatactggacttttacattcacgagtctgttcagcggcatggccatggccgagaactgtttcagtacatgctgcaaaaggagcgggtggagccacatcaactggcaatcgaccggcccagccaaaagctactaaaatttctgaacaagcactataatcttgagaccaccgttccacaggtgaacaattttgtgatcttcgaaggatttttcgcacaccagcatagaccccccgcccctagcttgcgtgcaacgcgccacagtcgcgccgctgccgtggatcctacacctgctgcgccggcacgtaagctgcctcctaagcgagccgagggcgacataaagccctattcctcttctgatcgcgagttcctgaaagtggctgttgaaccaccctggcccctgaacagagctcctaggcgagcgacaccacctgcgcacccacctccccggagctcatctctggggaattcccccgagcggggacccctgagaccttttgtaccagaacaggaactacttcgctcgttacgtctgtgtccgccccatcctactgcaaggttgctactggcagccgacccgggcggctcaccggcgcagcgacgtcggaccaggtag

SEQ ID NO: 217357 - DNA, 1002 bp, Artificial Sequence
  derived and/or modified sequence
atggaatttccatttgatgtggatgctctgtttcccgaacgcatcactgtgttggatcagcatctccggcctccagcacgaagacctggaacaactacacccgcccgggtcgatctacagcaacagatcatgacaataatcgatgagttaggcaaggcatcagccaaggcacagaacctgtctgctccaatcaccagcgcctccaggatgcagtccaatcgccatgtggtttacatcctcaaggatagctctgccaggcccgccggcaaaggcgcaatcattggcttcattaaagtcggatacaagaagctgttcgtactggacgaccgcgaggcacataatgaggtagagcccctctgtatcctcgacttctacatacacgagtccgtccaaagacatggccacggacgggaactgttccagtacatgctgcagaaggaacgggtggagcctcaccaattggcgatagatagaccctcccagaaactactgaaattcctgaataagcactataacctggagactacagtacctcaggtgaataactttgtcatctttgagggtttttttgcacaccaacataggccacccgcccctagtttaagagcaactcggcacagtagagcagcagctgtcgacccaacccccgcggcccctgccagaaaattaccacctaaaagggctgaaggagacatcaaaccctatagtagtagcgacagggagttcctgaaggtagccgtggagcccccctggcccctcaatcgagctccacgtagggctacaccacctgctcatccaccaccccgttccagcagcctgggcaactccccagaaaggggacctctcagaccctttgtaccggaacaggagttgctcagaagcctgaggctttgtcccccccatcctactgctcggctactgctggctgccgatcctggcgggagtcccgcacaacgcagaaggacaagcagcctgcccaggtcggaagagagtagatattag

SEQ ID NO: 217358 - DNA, 972 bp, Artificial Sequence
  derived and/or modified sequence
atggaatttcctttcgacgtcgatgcactctttcccgaacggataaccgtcctcgatcagcatctgcgcccaccggccaggaggcccgggacgaccacacccgcacgagtcgatctgcaacagcagattatgacgataatcgacgagctggggaaagcatcggccaaggcgcagaatctgtcggctcccatcactagcgctagcagaatgcagtcaaatagacacgtcgtctacattctgaaggattcctcagcacggccagccggaaagggtgctatcatcggctttataaaagtgggctacaagaaactgtttgttcttgatgacagagaagctcacaatgaggtagagcccctgtgcatcctggatttctatatccatgagagcgtacaacggcacgggcatggccgggagcttttccagtacatgctgcagaaagaacgggtcgaaccacaccagttggcaattgatagacctagccagaagctgctcaagtttttgaacaagcactacaatctcgaaacaaccgtcccacaggtcaacaatttcgtaatcttcgaaggctttttcgcacatcaacatcgtcctcctgccccctctcttagggccacccggcactctcgggccgcagcagtcgacccgacccccgccgcacccgctagaaaactaccaccaaaaagggccgaaggtgacattaaaccttactcaagcagtgatagagaatttctcaaagtagcagttgaacctccctggcccctcaaccgggcccctagacgcgctacccccccagcccacccacctcctcggtcaagctcactcgggaactctcccgagagaggcccgctcagaccttttgtgcccgaacaggagctgctcagatccctgagactgtgccctccacatcctaccgccaggctcttactcgctgcggatcctgggggatctcccgcccagcggagaagaacaagatag

SEQ ID NO: 217359 - DNA, 972 bp, Artificial Sequence
  derived and/or modified sequence
atggagtttccatttgacgtagatgctctattcccagaacgaatcacagtccttgaccagcacttgcggcctcccgcgcggcgtcctgggaccactacacccgctcgggtggatttgcaacaacagatcatgaccataatagatgaactggggaaagcttctgctaaagctcagaatttgagtgctcctattaccagcgcaagcagaatgcaaagcaaccgacacgtcgtgtacattctaaaggactccagtgctcgacccgccggcaaaggggccattattggattcattaaagtgggctataagaagttatttgtcctcgacgatagggaggcacataatgaagtggagcccttatgcatccttgacttctacattcatgaatctgtgcagcgacacggacacgggcgcgaactatttcagtacatgctacaaaaggaaagggttgaaccccaccagcttgccattgatcggccatcccagaagctgctgaaattcctgaataaacattataaccttgagaccactgtgcctcaagtgaataacttcgtcatatttgagggattttttgcgcaccagcacaggccaccagcgcccagccttagggctacgcgccacagtagggctgcggccgtggatcctactcctgcagcgccagctaggaagctgccacccaaacgcgcagagggggatattaaaccgtacagctcttctgatagagagtttttgaaggtggctgtggaacccccctggccgttgaacagagctcctagaagggcaacccctcctgcccaccccccgccaaggtccagctcactagggaacagcccggaaagagggcccctgagacctttcgttccggagcaggaactcttacggtctttgcgattatgtccacctcaccccaccgcacgcttgcttttagccgccgaccccggaggcagtccagcacagagaagacgaaccagatag

SEQ ID NO: 217360 - DNA, 972 bp, Artificial Sequence
  derived and/or modified sequence
atggaattcccctttgatgttgatgctttgtttcctgaaagaattacggtgctagaccagcacctgcgaccaccagctaggcgccctggcactacaactccagctagagtggacctgcagcagcagattatgacgattattgacgaacttgggaaagccagtgccaaggcccagaacttatccgctccgattacgtccgccagtcgcatgcagagcaatcgtcatgtggtatatattctgaaggacagcagtgctagacccgcagggaagggcgctatcatcggatttatcaaggtcggatataagaagctgttcgtcctggacgatagggaggcccataatgaggtggagcctctctgcattcttgacttctatattcatgagtccgtacagcggcatggacacggtcgtgagttgtttcaatacatgttgcagaaggagcgcgtcgaacctcaccaactggccatcgaccggccttcccagaaactcctgaagttcctgaacaaacactataacttggaaactacggtgccacaagtcaataactttgttatcttcgaaggattcttcgcgcatcagcaccgccccccagctccctccttgcgggctactagacactcaagagctgctgctgtggaccctactcccgctgccccagcccggaaactgcctcctaagcgcgcagagggcgacataaagccatactcgagctccgatcgcgagttcttgaaggttgccgtggaacctccttggcctttgaatagagcgccaaggagggcgacacctcccgcgcaccccccacccaggtctagttccttaggcaatagccccgagagagggccgttgaggccgttcgtccccgagcaagagctgctcaggtcactgcggctatgcccccctcaccccaccgccagactgctgctggcagccgacccaggtgggagcccagctcagagacggcggacaagatag

SEQ ID NO: 217361 - DNA, 972 bp, Artificial Sequence
  derived and/or modified sequence
atggaatttccgtttgacgtggacgcactgttcccagagcgcattaccgtactagatcaacacctgaggccgccggcgcgccgcccaggcaccacaacacccgcgcgcgttgaccttcaacagcagatcatgactatcatcgatgagctgggcaaggcttccgccaaagcccagaacctgagcgcgccaataacctccgcttcgaggatgcaatcaaatcggcacgtggtttacatcctcaaagactcttccgcccggccagctggtaagggcgccatcatcggctttattaaggtgggctataagaagctgttcgtgctggacgatagagaggctcacaatgaagtcgagccattatgcattctagacttttatatccacgaatccgtgcaacgtcacggccacggacgcgagttgtttcagtatatgttacaaaaggagcgggttgagccacatcagctggctatagacaggccatcacaaaaacttctaaagtttctgaataagcattataaccttgagactacagtcccgcaggtcaacaactttgtcatattcgaaggcttcttcgcccatcagcataggcccccagccccttccctgagagccacgcgtcactcaagagctgccgcagtcgaccccactcctgctgctcctgcacgaaagctgcccccgaaaagggctgagggagatatcaagccttattcttcgagcgacagggaatttttaaaagtagccgtggagcctccatggccactgaatcgggcccccaggcgagccacccccccggctcaccctccaccccgcagcagctctctgggcaatagccccgagcggggtccactgaggcctttcgtcccagaacaagaattactgagatcattgagactgtgccctcctcaccccacggcacgtctacttctggcggctgaccctggcggcagcccagctcaaaggaggcggacaagatag

SEQ ID NO: 217362 - DNA, 1002 bp, Artificial Sequence
  derived and/or modified sequence
atggaatttccttttgatgttgacgcactgttccccgagcgaatcaccgttttggatcagcatttgcgcccaccagccagaaggcctgggacaaccacacctgcgcgcgtagatctacagcagcaaatcatgaccattatagacgagttagggaaggcctccgcgaaggctcagaatctgtcagcaccaattacttcagcttccagaatgcaaagcaatcgacatgttgtctatatcctgaaggacagttctgctcggcccgccggcaagggggccattatcgggttcataaaagtgggttataaaaaactcttcgtcctcgacgatagggaagcacacaacgaagttgagccactttgtatcctcgacttctatattcatgaaagtgtgcagagacacggccatggcagggaattgttccagtacatgctgcagaaggaacgcgtggaaccacatcagctggcgattgataggcctagccagaaactcctgaaattcttgaacaagcactataatctcgaaacaactgtaccacaggtcaacaattttgttatatttgaaggcttcttcgcgcatcagcatcggcctcccgcgcccagtttacgtgctaccagacactccagggctgctgcggtcgaccctacacccgcagccccggcaaggaagcttccaccaaagcgcgcagaaggcgatattaaaccatacagttcatctgaccgcgagtttctgaaggtcgccgtggagcccccatggccccttaatagagcccctcggcgggcaacacctcccgcccatcctccccctaggagcagtagtcttggaaattcgcctgagcgcggaccactgcgtcccttcgtgcccgagcaagagctgctccggtccctcaggttatgccccccacatccgacagctaggctcctcttggccgctgatccaggcggtagcccagcacagagaaggaggacctccagcctgccaaggtccgaagaatctcggtactag

SEQ ID NO: 217363 - DNA, 972 bp, Artificial Sequence
  derived and/or modified sequence
atggagtttccgttcgacgtcgatgccctattccccgagcgaatcacagtcttggaccaacatctcagacctccggcaaggagacccgggacaacaaccccagcgcgcgtggacctgcagcagcagatcatgactattattgacgagctcgggaaggcgtcagccaaggcccagaatttgtctgccccgattacttcagcgtcgcgaatgcagtcaaaccggcacgtcgtctatatactgaaagacagcagtgcgaggcccgccggaaaaggcgccatcatcgggttcattaaagttggctataagaagctgttcgtgttggatgatcgggaggcccacaacgaagtagagccgctgtgtattctcgacttctatattcacgagtcagtacaacggcatggtcatgggcgagagcttttccagtacatgctccagaaagaacgagtagagccccaccagctggctatcgataggccctcacaaaaactgcttaagtttctgaacaaacattataatttagagacaaccgttccacaagtcaataacttcgtgatcttcgagggcttctttgcccatcagcaccggccacccgccccttcccttagggctacgagacactccagagccgcagccgtggatcctacgccagcggcaccagctcggaagctgcctcccaaaagggccgagggagacatcaagccctactctagttccgatcgagagtttctgaaggtagccgtcgagcctccttggcctctcaacagagctccccgtcgagcaacacctcctgcccatcctccaccacggtcttccagtctgggcaacagccccgagcggggtcccctgaggccatttgtgccggagcaggagctgctacgctcactccgactttgcccgccgcaccctacagcaaggctcctcttggccgcagacccgggtgggtcccctgcccagaggcgtcggacccggtag

SEQ ID NO: 217364 - DNA, 1002 bp, Artificial Sequence
  derived and/or modified sequence
atggaatttccattcgacgtagatgcactttttccggagcgtatcaccgtgctggaccagcacttgagaccacccgcgagaagaccaggcacaacgacgcccgccagggtggacttgcaacagcagatcatgaccattatcgacgaactgggcaaggcttcagccaaagcccagaatcttagtgcccccatcacgagtgcttctcgtatgcagtccaataggcacgttgtatatatactcaaggatagttctgcccgcccagccgggaaaggtgccatcattgggtttattaaggtgggatataagaagctcttcgtgctcgacgatagagaagcccataacgaggtcgagcccctctgtatccttgacttttacatccacgaatccgttcaaaggcacgggcatggccgcgagctgttccaatatatgttacagaaggagcgggtggagccccaccagctagcaatcgaccggccaagtcagaagttgcttaaattcttgaacaaacattataacctagaaaccaccgttcctcaggtaaacaacttcgtcatatttgaaggatttttcgcccaccagcatcgcccaccagcccccagcctccgcgccaccagacattcgcgggcagccgctgtggaccctacccctgctgcccccgcacggaaattgccgcctaagcgggcagagggtgacattaaaccctactcatcgtccgatcgcgagtttctgaaagtggcagtggagccgccttggccccttaaccgagcaccaagacgggcaacgcctcctgcccatcctcctccacgaagctcaagcctcggaaattctcctgagaggggacctctgcggccgtttgtacctgaacaggaactgttgcggagtctgagactatgccctccccaccccactgcaaggctgctacttgccgctgatccggggggatcgcctgctcagaggcgcaggacgagcagcttgcctcgctcggaagaaagcagatactag

SEQ ID NO: 217365 - DNA, 1002 bp, Artificial Sequence
  derived and/or modified sequence
atggagttcccatttgacgtggacgccctctttcccgagagaattaccgtcctggaccagcacttacgtcctcccgccagacggccagggacaacaacacccgcacgtgtcgatctccagcagcagattatgaccattatagatgagctgggaaaagctagtgccaaagcccaaaatctcagcgcccccattaccagtgccagccgcatgcagtccaacaggcatgtggtttacattctcaaggatagctctgcgcgaccagccggcaagggcgcaatcattgggtttattaaggtcgggtataaaaaactttttgtcttggacgacagggaggcccacaatgaggtagaacctctgtgtattctggacttctatattcatgaatcagtccaacgtcatggccatggccgggaactgttccagtatatgctgcagaaagagcgcgttgagccgcaccaactagccatcgaccggccgagccagaagctccttaaatttcttaataagcactataaccttgagacaactgtgcctcaagtgaacaatttcgtgatcttcgagggtttctttgcacaccagcaccggcctccggccccatcattacgtgcaacaaggcatagtcgggccgccgcagtcgacccgacaccagcagcccccgctcgcaaactccctcccaagcgggccgagggagatataaaaccctactcatcaagcgacagggaattcctgaaagtggctgtggaaccaccatggcctcttaaccgggcaccaagacgggctactcccccggctcatccccccccaaggtcttcctccctgggcaactcacctgagcgggggccgttgcgcccctttgtgccggagcaggagttgcttcggtcattacgcctgtgtcctcctcatcctacagcaagactgctcctcgccgcggaccccggaggaagccccgcacagaggcgccgtacctccagcctcccccgctccgaagagagtcgatactag

SEQ ID NO: 217366 - DNA, 1002 bp, Artificial Sequence
  derived and/or modified sequence
atggaattcccattcgatgtggacgcattgttcccagagcggattacagtgctcgaccaacatcttcgtccacccgcaagacgtccagggacgactaccccagcccgcgtggacttgcagcaacagatcatgactatcattgacgagctgggtaaagcaagcgccaaggctcagaacttgtctgctcctatcaccagcgcttctcggatgcagagcaaccgacacgtggtctatattctgaaagatagtagcgctcggcccgccgggaaaggcgccataatcggattcattaaggtgggatacaagaaactattcgtgctggatgacagggaagcccataatgaagtggagccactatgtatcctggacttctacatccatgagtccgttcagcggcacgggcacggtagagagctgtttcagtatatgctgcagaaggagcgtgtcgagcctcaccaactggccatagacagaccttcccagaagctgttaaagtttctgaacaagcattataatctcgagaccacagtgccccaagtgaacaactttgtgatcttcgagggatttttcgcacaccaacaccggccacccgctccttccttacgggccacgcgccacagtagggctgccgccgtggaccccaccccagctgctcctgccagaaagctcccaccaaaaagggcagagggggacatcaaaccatactcttcctccgatcgtgagtttcttaaagttgctgtggagcccccttggcccctgaacagagcaccacggagggctacaccccccgctcacccacccccccgaagcagctccctgggcaatagcccggagcggggacccctgcgcccttttgtgccagaacaggaactgttacgcagcttacggctgtgtccgccccatccgaccgctaggctcctattggctgctgatcccgggggatctccagcccagcggagacggacaagcagtctgccaaggtcagaagagtctcggtactag

SEQ ID NO: 217367 - DNA, 1002 bp, Artificial Sequence
  derived and/or modified sequence
atggagttccctttcgacgtcgacgctctttttcctgaacgaattacagtactcgatcaacacttgcgacccccggccagaaggcccggcaccactacccctgcccgagtcgatttgcagcaacaaatcatgaccatcatagatgagcttggcaaagccagcgcaaaagctcagaacttatctgcacctattacctctgcgtctcgcatgcagagcaaccgccatgtggtctatattctgaaagatagcagcgcgaggcccgcagggaaaggcgccatcatcggatttatcaaggtgggctataagaagttatttgtactggacgatcgagaggcccacaatgaggtcgaaccgctctgtattctggacttctacatacacgaatctgtacaaagacacgggcatggtcgcgagctgttccagtacatgctccagaaggagcgcgtagagcctcaccagttagccatcgacaggccctcccaaaagctgctgaaattcctaaataaacactataatcttgaaaccactgtccctcaggttaataactttgttatcttcgaggggttcttcgcccatcaacacagaccacccgccccttcgctaagagcgacacgccattctcgagccgctgcggtcgatcccactccggcagcgccagcgagaaaactgccgccaaaaagagccgaaggagatatcaagccttattctagctcggatagagagtttcttaaagtcgccgtcgagccgccgtggcccctcaatcgcgcaccccgccgcgcgaccccaccagcacatcccccaccgcgcagctcatcactgggcaattctccagaacgcggccccctccggccattcgttcccgagcaggaactgttgaggtctcttcggctgtgtcccccccaccctactgctagactcttactggccgctgatcctggcggtagtcctgcccagagacgtagaacctcatctctgccaagaagcgaggagtcacgatactag

SEQ ID NO: 217368 - DNA, 972 bp, Artificial Sequence
  derived and/or modified sequence
atggaatttcccttcgatgttgacgcactgttccctgagcgtattacagtactcgatcagcatctccggccacctgctaggagacccggcaccaccactcccgcccgggtcgatttacagcaacagattatgactatcattgatgaactgggcaaagcaagcgccaaagcccaaaatctttctgctcccatcaccagcgcctctaggatgcagtccaaccggcacgtggtgtatatcctgaaagacagttcagccaggccggccgggaagggcgccatcattggatttattaaggtgggctacaagaagctgttcgtacttgacgatagggaggctcataatgaggttgagccactgtgcattctggatttttacattcacgaaagtgttcagcgacatggacacgggcgcgagctgtttcagtatatgcttcagaaggagcgggtggaaccccaccagctggctattgaccggccaagccagaagctcctcaagttcctgaacaaacactacaacctggagaccactgtgcctcaggtcaataacttcgtcatctttgaaggttttttcgcacaccagcatcggccccccgcaccctcattgagggccacccgacacagcagggccgccgcagtcgacccaacccccgctgccccggcacgtaaactgcctcccaagcgggcagagggggatattaagccttattctagcagcgaccgggaatttctcaaagtagctgtggaacccccttggccgctgaatcgagcaccgcgccgtgcaactccacccgcccaccctcctccgcgcagttccagtctgggaaacagtcccgaaaggggcccactcaggcccttcgtcccggagcaagagttattgagaagtctcaggctctgcccccctcacccaaccgcgagacttttattagctgcagaccccggagggtcacctgcccagcgtcggcggacccgatag

SEQ ID NO: 217369 - DNA, 2119 bp, Artificial Sequence
  derived and/or modified sequence
atggagttcccgttcgatgtggacgcgctgttcccggagcggatcacggtgctggaccagcacctgaggcccccagcccgccgacccggaaccacaacgccggcccgtgttgatctacagcagcaaattatgaccattatagatgaactgggcaaggcttctgccaaggcccagaatctttccgctcctatcactagtgcatcaaggatgcagagtaaccgccatgttgtttatattctcaaagacagttcagcccgaccggctggaaaaggagccattattggtttcatcaaagttggatacaagaagctctttgtactggatgatcgtgaggctcataatgaggtagaaccactttgcatcctggacttttacatccatgagtctgtgcaacgccatggccatgggcgagaactcttccagtatatgttgcagaaggagcgagtggaaccgcaccaactggcaattgaccgaccctcacagaagctgctgaaattcctgaataagcactacaatctggagaccacagtcccacaggtgaacaactttgtgatctttgaaggcttctttgcccatcaacatcggccccctgctccctctctgagggcaactcgacactctcgtgctgctgcagtcgatcccacgcccgctgctccagcaaggaagctgccacccaagagagcagagggagacatcaagccatactcctctagtgaccgagaatttctgaaggtagctgtggagcctccttggcccctaaacagggcccctcgccgcgccacacctccagcccacccacccccccgctccagcagcctgggaaactcaccagaacgaggtcccctccgcccctttgtgccagagcaggagctgctgcgttccttgcgcctctgccccccacaccctaccgcccgccttctgttggctgctgaccctgggggcagcccagctcaacgtcgtcgcaccagctcccttccccgctctgaggagagtcgatactaacagctaccctatccctgccctgggagacctggggtgggcagggaacccctccctgagaacctcagacccactcttccattgcatcctgtaggacccagtggaacctgacagagcccataggattccctcttctactttcttagacagcagggatgtcagggtctcaaactgcctaacactttgtagcttttcttaacacaaaagcaccccttctctcctaacttgggctctgaatactttcccaacaggaagtctgatctgttgccagacttcttggttagatggctcatacatttatctagagaagcacactcttgcttgctgtcaaactttagaacaccatggaaggtctaagggcatcctgtgccagggaaactttttaaggaattttatctatgggataaaccccatattccctctagtgtctactggtggctctaatactgctttgtgctgcctgccacacttgccctttgagcctgcgaatggccgctagtgagcaagctctgcttcagagcagtctagttaggtagaacagggacttaccagcttcccaaagggatctactcaccattgccaaactcttcatttccacattttgtgtaggtgtcagggaaccccaaactggtgttgctttggggtctctaaaggagattggctgacaccaccatttcccccagatccagattctctgagggaggttgtttcttgagagtagatccagagtgtcaaggatctgttagatcctggaatcccttcttgcatccatccctccctggtagctaggtcccgatatactcctgtcttgtgagattgtcgagatgagatgggggaccactcttcctctgtccttcctctctcctttcctccatagcaaggacgaccttccctgctccatgcccagagtatagctagatcccttcccctccctaccctctgaatgtgtgctagatcaggtgccccactgtgtttcctgaaatccttgggagccggatctccccatctcccctactcactcttcccttttcttctctcagtgttgtctgaataaagtgtgaaatcttttgtgttttctaaattgacattttcaatgaaaaaaagaatcacaaaaaaaaaa

SEQ ID NO: 217370 - DNA, 2646 bp, Artificial Sequence
  derived and/or modified sequence
acaatgggccatggagttcccgttcgatgtggacgcgctgttcccggagcggatcacggtgctggaccagcacctgaggcccccagcccgccgacccggaaccacaacgccggcccgtgttgatctacagcagcaaattatgaccattatagatgaactgggcaaggcttctgccaaggcccagaatctttccgctcctatcactagtgcatcaaggatgcagagtaaccgccatgttgtttatattctcaaagacagttcagcccgaccggctggaaaaggagccattattggtttcatcaaagttggatacaagaagctctttgtactggatgatcgtgaggctcataatgaggtagaaccactttgcatcctggacttttacatccatgagtctgtgcaacgccatggccatgggcgagaactcttccagtatatgttgcagaaggagcgagtggaaccgcaccaactggcaattgaccgaccctcacagaagctgctgaaattcctgaataagcactacaatctggagaccacagtcccacaggtgaacaactttgtgatctttgaaggcttctttgcccatcaacatcggccccctgctccctctctgagggcaactcgacactctcgtgctgctgcagtcgatcccacgcccgctgctccagcaaggaagctgccacccaagagagcagagggagacatcaagccatactcctctagtgaccgagaatttctgaaggtagctgtggagcctccttggcccctaaacagggcccctcgccgcgccacacctccagcccacccacccccccgctccagcagcctgggaaactcaccagaacgaggtcccctccgcccctttgtgccagagcaggagctgctgcgttccttgcgcctctgccccccacaccctaccgcccgccttctgttggctgctgaccctgggggcagcccagctcaacgtcgtcgcaccaggtaataggagttgaagggctaaggagcctcacagctataaaagaggatgttagaaatggcaaagggcaatttgaatccatcagagagatggatcaataagatgggtggcttggggggggtcctgaaacctttcaagaaaaatatttgtgcaagtgatctgggaaaaaaatgcagtgaaggagcagaataggaccttatatggagcctagggaccctggctttaatgtgagagttatgtggaatggtaggaagaacaccgagatccatcgagttgggggaacagagccttctaagattgggaaaatcttcgcttaatacttgctggggaaggggcagtgtctgacagagagtgggaagccactggcttgtgtgccaagagtccatcgcagcaggcagggagtgggcatttcctttatttctctccctttctcttcacctctgacttctctgtttttctctcccccgccccccgccatttcccatctcccttcctcccatccataacatccttccacagctcccttccccgctctgaggagagtcgatactaacagctaccctatccctgccctgggagacctggggtgggcagggaacccctccctgagaacctcagacccactcttccattgcatcctgtaggacccagtggaacctgacagagcccataggattccctcttctactttcttagacagcagggatgtcagggtctcaaactgcctaacactttgtagcttttcttaacacaaaagcaccccttctctcctaacttgggctctgaatactttcccaacaggaagtctgatctgttgccagacttcttggttagatggctcatacatttatctagagaagcacactcttgcttgctgtcaaactttagaacaccatggaaggtctaagggcatcctgtgccagggaaactttttaaggaattttatctatgggataaaccccatattccctctagtgtctactggtggctctaatactgctttgtgctgcctgccacacttgccctttgagcctgcgaatggccgctagtgagcaagctctgcttcagagcagtctagttaggtagaacagggacttaccagcttcccaaagggatctactcaccattgccaaactcttcatttccacattttgtgtaggtgtcagggaaccccaaactggtgttgctttggggtctctaaaggagattggctgacaccaccatttcccccagatccagattctctgagggaggttgtttcttgagagtagatccagagtgtcaaggatctgttagatcctggaatcccttcttgcatccatccctccctggtagctaggtcccgatatactcctgtcttgtgagattgtcgagatgagatgggggaccactcttcctctgtccttcctctctcctttcctccatagcaaggacgaccttccctgctccatgcccagagtatagctagatcccttcccctccctaccctctgaatgtgtgctagatcaggtgccccactgtgtttcctgaaatccttgggagccggatctccccatctcccctactcactcttcccttttcttctctcagtgttgtctgaataaagtgtgaaatcttttgtgttttctaaattgacattttcaatgaaaaaaagaatcacaaaaaaaaaa

SEQ ID NO: 217371 - DNA, 1002 bp, Artificial Sequence
  derived and/or modified sequence
atggagttcccctttgatgtggatgccctcttccctgagcgcatcaccgtgctggaccagcacctgcggcccccagcccggcggcccggcaccaccaccccagcccgggtggacctgcagcagcagatcatgaccatcattgatgagctgggcaaggccagcgccaaggcccagaacctgagcgcccccatcaccagcgccagcaggatgcagagcaacagacatgtggtgtacatcctgaaggacagcagcgcccggcctgctgggaagggggccatcatcggcttcatcaaggtgggctacaagaagctgtttgtgctggatgaccgggaggcccacaatgaggtggagcccctgtgcatcctggacttctacatccatgaatctgtgcagagacatggccacggccgggagctgttccagtacatgctgcagaaggagcgggtggagccccaccagctggccatcgaccggcccagccagaagctgctgaagttcctgaacaagcactacaacctggagaccaccgtgccccaggtgaacaactttgtgatctttgagggcttctttgcccaccagcaccggcccccagcccccagcctgcgggccaccaggcacagcagagctgctgctgtggaccccaccccagctgccccagccaggaagctgccccccaagagagctgagggggacatcaagccctacagcagcagtgaccgggagttcctgaaggtggccgtggagcccccctggcccctgaacagagccccccggcgggccaccccaccagcccaccccccacccaggagcagcagcctgggcaacagccctgagcggggccccctgcggccctttgtgcctgagcaggagctgctgcggagcctgcggctgtgccccccccaccccacagcccggctgctgctggccgctgaccccggcggcagccctgcccagaggaggaggaccagcagcctgcccaggtctgaggagagccgctactag

SEQ ID NO: 217372 - DNA, 972 bp, Artificial Sequence
  derived and/or modified sequence
atggagttcccctttgatgtggatgccctcttccctgagcgcatcaccgtgctggaccagcacctgcggcccccagcccggcggcccggcaccaccaccccagcccgggtggacctgcagcagcagatcatgaccatcattgatgagctgggcaaggccagcgccaaggcccagaacctgagcgcccccatcaccagcgccagcaggatgcagagcaacagacatgtggtgtacatcctgaaggacagcagcgcccggcctgctgggaagggggccatcatcggcttcatcaaggtgggctacaagaagctgtttgtgctggatgaccgggaggcccacaatgaggtggagcccctgtgcatcctggacttctacatccatgaatctgtgcagagacatggccacggccgggagctgttccagtacatgctgcagaaggagcgggtggagccccaccagctggccatcgaccggcccagccagaagctgctgaagttcctgaacaagcactacaacctggagaccaccgtgccccaggtgaacaactttgtgatctttgagggcttctttgcccaccagcaccggcccccagcccccagcctgcgggccaccaggcacagcagagctgctgctgtggaccccaccccagctgccccagccaggaagctgccccccaagagagctgagggggacatcaagccctacagcagcagtgaccgggagttcctgaaggtggccgtggagcccccctggcccctgaacagagccccccggcgggccaccccaccagcccaccccccacccaggagcagcagcctgggcaacagccctgagcggggccccctgcggccctttgtgcctgagcaggagctgctgcggagcctgcggctgtgccccccccaccccacagcccggctgctgctggccgctgaccccggcggcagccctgcccagaggaggaggaccaggtag

SEQ ID NO: 217373 - DNA, 1002 bp, Artificial Sequence
  derived and/or modified sequence
atggagttccccttcgacgtggacgccctgttccccgagcggatcaccgtactcgaccagcacctaaggcctccagctaggagacctgggacgaccacaccagctagagtggatcttcagcagcagatcatgacaatcatcgacgagcttggtaaagcttcagccaaggcccagaacctgtctgcacccattacttccgcctctcggatgcaaagcaaccggcacgtagtctatatcctgaaggattcatccgcgcgtcccgctggcaaaggggccattattggatttatcaaggttgggtataagaaattattcgtgctagatgaccgggaagcccacaacgaagtcgaacccctgtgtatcctggacttctacatccatgagtcagtacagaggcacgggcacggcagggagctgttccaatacatgctgcagaaggaacgcgtggaacctcaccagctggccattgatagaccttcccagaaattactaaaatttttgaataaacattacaatctcgagactactgttcctcaagtgaacaactttgttatctttgaggggttctttgcccatcagcacaggccaccggccccctctctccgggcgactcggcactcacgggccgcagccgtggaccccacacccgccgcacccgcacgaaaacttccccctaaaagggccgagggagacataaaaccgtacagtagctccgatcgggaatttctcaaggtcgcggtcgagcctccatggcctctgaatcgcgcccctaggcgtgccactccgcctgcccatcccccccctcgatcgtcgagcctggggaatagccccgagcgtgggcccctgaggcccttcgtgcctgagcaggaattgctgaggagtctgcgactgtgccccccccaccccacagcccggctcctcttagcagctgatcctggtggcagccccgcccagcgtcggaggacctcaagcctgcctagatctgaggagagtagatactag

SEQ ID NO: 217374 - DNA, 972 bp, Artificial Sequence
  derived and/or modified sequence
atggagttccccttcgacgtggacgccctgttccccgagcggatcacggtactagaccagcacctcagaccacccgccaggagacctggcacgacgacacccgcgagagtggatctccaacagcagatcatgacaattatcgacgagctgggaaaagccagcgccaaggcacagaacttgtctgcgccaattacttctgcgagccgcatgcaaagcaatcgtcacgtggtttacattctgaaggactcttcagcccgacccgccggtaagggcgctattatcggttttattaaagtggggtacaagaaacttttcgtactggatgatcgggaagcacacaatgaggttgagccgctttgcatactggatttttatattcacgaatctgtgcaacgacacggccatggccgtgagctatttcaatacatgcttcagaaagagcgtgtggagccccatcagttggcaattgaccgcccatctcagaagttattgaagttcctcaataaacactataatctggagactaccgtaccccaggttaacaattttgttatttttgagggcttttttgcacatcagcaccgaccccctgcaccgtctcttcgcgctactcggcatagtagagctgctgccgtggaccccactcctgctgccccagccaggaagctcccacctaagcgcgcagaaggagatatcaagccgtatagtagcagcgaccgagagtttctgaaagtggcagtcgagccaccctggccactcaaccgggcccctcggcgcgcaacccccccagctcacccccccccacgttccagttctctcgggaatagcccagagagggggccgctgcgaccattcgttccagaacaggagcttttgcgatcactgcggttgtgccctcctcaccccaccgcacgtcttttgctggccgccgaccccgggggttcccccgctcagcggagaaggacaaggtag

SEQ ID NO: 217375 - DNA, 1002 bp, Artificial Sequence
  derived and/or modified sequence
atggagttccccttcgacgtggacgccctgttccccgagcggatcacagtccttgaccagcatttgaggccacccgctagaagaccaggtactaccacacctgccagggtcgacctgcagcaacagattatgacgatcatcgacgagctcggcaaagcctccgcaaaagcgcaaaacctgtcggcccccattactagcgcatctaggatgcagtcgaataggcacgtggtttacattctgaaagattcctccgcacgtcctgcaggaaagggagccatcattggattcataaaagttggctataagaagctgttcgtgttggatgatcgcgaagcccacaacgaagtggagcccctgtgtattcttgacttttacatccatgaatcagtgcaaagacacggccatgggcgggagctcttccagtatatgctgcagaaggaaagagtggaaccccaccaattagccatcgacagaccttctcaaaagcttctgaagtttttgaataagcactacaatcttgagacaaccgtaccacaggttaacaattttgttattttcgaaggcttctttgcccatcagcatcgcccaccagccccttcacttagggcaactaggcactctagggccgccgcggttgatccaaccccggcagcccccgcaagaaagctgcccccaaagagagccgagggtgatatcaaaccttactcatcttctgacagggaattcctgaaggtagcagtggaaccgccttggccgttgaatagggctccacggcgggctacgcctccagctcatccccccccacggtcatcgagcctggggaatagccccgaacggggcccattaagaccttttgttcccgaacaggaactgctgcggtctctgcgcctttgtcccccgcaccccacggcaagactgcttcttgccgcagatccaggaggaagtccagcccagcgccgcagaacaagtagcctgcctcgatctgaggaatctaggtattag

SEQ ID NO: 217376 - DNA, 972 bp, Artificial Sequence
  derived and/or modified sequence
atggagttccccttcgacgtggacgccctgttccccgagcggatcacagttttggaccagcacttacggccgcctgctcgacgccctggtacaactaccccagcgcgcgtggacttacaacaacagataatgacgattatcgatgaacttgggaaggcgagcgccaaggcccagaatttgagcgcccctataactagcgcttcacgtatgcagtccaaccgacacgtggtctatattctgaaagattcatcagcccggcctgccggcaaaggtgcgataataggatttattaaagtcgggtacaagaaactgttcgtcctggacgatagagaagcacacaatgaggtagaacccctgtgtatactggatttctatatccacgaatctgtgcaaagacacggacacggacgagaactgtttcagtacatgctccaaaaagagcgcgtggaacctcaccagcttgcaatcgaccgaccttcacagaaacttctgaaatttcttaacaagcactacaacctcgaaactactgtgccccaggtgaacaacttcgtgatttttgaaggttttttcgctcatcaacatcggccacctgcaccaagcttgagagctactcggcattctagggccgcagcggtagatcctacccccgcagctcccgccagaaaacttcctcctaagcgagctgagggtgacatcaaaccatacagtagttcagacagagagttccttaaagtcgcagtagagccgccctggcctctgaaccgcgcgccccgccgggccactcccccagcacacccgcccccacgaagtagcagtcttggcaacagccctgagcgcggcccactgagaccatttgtgccagagcaggaactgttacggtcccttaggctgtgccccccccatcccacagctcggcttcttctagcagctgacccgggaggctctccagctcagagaaggcgtacgaggtag

SEQ ID NO: 217377 - DNA, 972 bp, Artificial Sequence
  derived and/or modified sequence
atggagttccccttcgacgtggacgccctgttccccgagcggatcacagttctggaccagcacctgcgccccccagcgcgcaggccaggaaccacgacacccgcgagagtggaccttcagcagcaaattatgaccatcattgacgagttaggcaaggcttctgctaaagcccaaaacttgtctgcgcccataacctcggcttccaggatgcagagcaaccgccacgtggtttatatccttaaggatagcagcgcaagacccgccggaaagggtgcgatcattggttttataaaggtcggatacaagaagctattcgttttagatgatagggaggctcataacgaggtcgagcctctgtgtatactcgacttctacatccacgaatctgttcagcggcacggtcacggccgggaattatttcagtacatgctgcaaaaagagcgggtggagccccatcagctggctatcgaccgtccatcgcagaaattactaaagttcctcaataagcactataatctggagaccaccgttccacaggtgaacaattttgtgattttcgaggggtttttcgcccatcagcatagacctcctgctccctctctgcgggcaacaaggcattcaagagccgccgctgtggaccccacaccggccgcacctgcccgcaagttgccgcccaaaagggccgagggcgatattaaaccatattcatcgtctgacagggaatttctaaaggtagctgtagagccaccgtggcccctgaaccgggccccaagaagagccacccctcccgcccaccccccgcctaggtcttcgtcactgggaaactctcccgagagaggccctctgaggcccttcgtaccggaacaggagctgttgagaagccttagattgtgcccacctcaccccaccgctcgcttattgctggccgctgaccctggaggtagccctgctcagcgccgacgcaccaggtag

SEQ ID NO: 217378 - DNA, 972 bp, Artificial Sequence
  derived and/or modified sequence
atggagttccccttcgacgtggacgccctgttccccgagcggatcacagtgctggaccaacacctgcggcccccagcccgacgaccagggacgacaacccccgccagagtggatctgcagcagcaaataatgactataatagacgagctcggtaaagcctctgctaaagcacaaaacctaagcgctccaatcaccagcgcttcccgcatgcagtcaaaccggcatgtggtctacattctcaaagatagttcagctcggcccgctgggaaaggtgctataatcggtttcattaaagtgggctataaaaagctattcgtcctggatgatcgggaggcgcacaacgaagtggaacctctgtgtattctggacttttacattcacgaatcagtgcaacgccatggccatgggcgagagttgttccagtatatgttgcaaaaggagcgcgtggagccccatcaactggctatcgatcgccccagccagaagctgcttaagttcctgaacaagcactataacttggagacaactgtgccgcaggtcaacaattttgtcattttcgaagggtttttcgcccatcagcacagaccaccagccccttcactccgggccaccagacattcacgtgcagccgctgtggaccccacccccgcagcgccagctagaaagcttccccctaagagagccgagggagacatcaaaccttactcctcttctgaccgggagtttttgaaagtagccgtggaacctccttggcccctcaacagggctccccggcgggccaccccacccgcccacccacccccccggtcttcatcactaggcaacagccccgaacggggaccactacgtccatttgtacccgaacaggaactcctgcggagcctgcgcctgtgccccccccacccaaccgccagactgcttctcgcagccgatcccggcgggagcccggctcagcgccgccggacacggtag

SEQ ID NO: 217379 - DNA, 972 bp, Artificial Sequence
  derived and/or modified sequence
atggagttccccttcgacgtggacgccctgttccccgagcggatcaccgtgctggaccagcacctgcgtccacctgcacgccgcccaggcaccacaacgcccgcaagagtcgacctccagcaacagataatgaccataatcgatgagctgggcaaggccagcgctaaggcccagaacttatctgctccgataactagcgccagccgcatgcaatcgaatagacatgtggtgtacatcttaaaagattcttcggctagacccgcaggcaagggcgctatcattggatttatcaaggttggatataaaaagcttttcgtgttggatgatagggaagctcataacgaggtcgagcctctgtgtatcctggatttctatatacacgagtcagtgcagcgtcatgggcacgggcgggaactatttcagtatatgctgcaaaaggaacgcgtagagccccatcagctagctattgaccggccaagccaaaagcttcttaaattcctgaataagcactataatttggagaccacggtaccacaggtgaataacttcgtgatcttcgaaggctttttcgcccatcagcacagaccaccagccccgagtctacgggcgacccggcactcccgggctgcggctgtggaccctacgccagcagctcctgctagaaagctaccccccaaaagggccgaaggcgacataaaaccttacagttcatccgatagggagttcctgaaagtcgccgtggaacctccatggcctttgaatcgcgcccctcggagggcgacacccccggcacaccctcccccaagatcctcctcccttggcaactcccctgaacgtgggcctttgcgccctttcgtaccggaacaggaattgttgcgttcactgcgcctgtgtcctcctcatccaaccgcccgcttgttactggcagctgaccccggaggatctcccgcacagcgccggcgaacaagatag

SEQ ID NO: 217380 - DNA, 1002 bp, Artificial Sequence
  derived and/or modified sequence
atggagttccccttcgacgtggacgccctgttccccgagcggatcactgtgctagaccagcatttgcggcccccagcaagaaggccaggcaccacgactccagccagagtcgacttacagcagcaaatcatgacaattatagatgagctgggaaaggcatctgcaaaagcacagaatctgtcagccccaataacttctgccagtagaatgcagagcaaccgccacgtggtttacatactgaaggactctagtgctaggcccgccggaaagggtgccattattggattcataaaagtaggatacaaaaaactcttcgtgctggatgatagggaagcacacaatgaggtggaaccactctgcatcctagacttctacatccatgaatctgtccaacgacacggccatggccgggagttgttccagtatatgcttcagaaagagcgggtcgagccacatcagctggcgattgataggcccagtcagaagcttctgaagttccttaataagcactataatctggagaccacagtacctcaggtcaataattttgtaatcttcgaagggttttttgcccaccaacacaggcccccagctccgtccctgcgcgccactcgacactccagggcagccgccgtcgaccctactccggcagctcccgccaggaagcttccacccaaaagagctgagggggacatcaaaccttattcttccagtgaccgagagtttctgaaggtggccgtggagccgccttggcctctgaacagagcacctaggagggctactccccccgcccacccgcctccccgctcttcatctctcggcaatagcccagaaaggggtcccttgcgtcctttcgtgcctgaacaggagctgctccggtcactgcgcctgtgcccaccacaccctactgcacggctcttgctcgctgccgatccaggcggctctcccgcacagcggcggcggacgagcagtttgcctaggtccgaagaatctcggtactag

SEQ ID NO: 217381 - DNA, 972 bp, Artificial Sequence
  derived and/or modified sequence
atggagttccccttcgacgtggacgccctgttccccgagcggatcaccgtactggaccagcacctgagacctccagcaagacggccgggtacaacaaccccagcccgggttgatctccagcagcagatcatgacaatcatcgacgaactggggaaggcctccgccaaagctcagaacttgtctgcgccaattacaagcgcatctcgtatgcagagcaataggcacgtggtctatatcctgaaggactcctcagcaaggcccgcgggcaagggggcaattattggctttatcaaagtcggctataaaaagctttttgtgctggacgacagggaggcacacaatgaggtagagcctctgtgtatcttagatttctatatccatgagtctgttcagcgacatggccatggccgcgagctttttcagtacatgctccagaaagaacgtgtggagccacatcagctcgccatcgaccgaccatctcagaaactgctgaagtttcttaacaaacactataaccttgagacaactgtgccacaagtaaacaattttgtgatatttgagggcttttttgcccaccagcaccgcccacccgctccctctcttcgggctaccagacactctagggctgcagcagtcgaccccacaccagcagcgcctgccaggaagcttccgccgaagagggctgagggggatatcaagccgtactcttcctcggatcgcgagtttttaaaagtggcagtcgagcccccctggcctctgaaccgtgctcctagacgtgccacaccccccgcccatccaccccctaggtcaagctccctcggcaatagcccggagcgaggcccattaagacccttcgtccccgaacaggaactgttgaggtcgctccgactttgcccacctcatcccactgccagattacttcttgccgcagatcctggaggttctcccgcccaaaggagacgcacgagatag

SEQ ID NO: 217382 - DNA, 1002 bp, Artificial Sequence
  derived and/or modified sequence
atggagttccccttcgacgtggacgccctgttccccgagcggatcacggttttggatcagcacctgaggccccccgcccgcaggccaggtacgaccacacccgcacgcgtggacctgcagcagcagataatgactatcatcgacgaattgggaaaggcttcagcaaaggctcagaatctgtcggcccccataacatccgcaagtcgcatgcagtccaatagacatgtcgtctacatccttaaggactcatcagctaggccggctggaaaaggcgccataataggattcataaaagtggggtataagaaattgttcgtactggatgaccgggaggcacataatgaggtcgaaccgctctgtatacttgatttctatatccacgagagcgtccagaggcacgggcacggcagagagctgtttcagtatatgctgcagaaagagagagtggaaccccaccagctggctatcgatagaccttcccagaagctcctgaagttcctcaataagcattacaatctcgagaccaccgtgccacaggtgaacaactttgttatctttgaggggttcttcgcccaccagcacaggccacctgccccatccctgcgcgccacacggcactctcgggcagccgcagtggatcctactcccgcagcccctgcacgcaaattgccccccaaacgtgctgaaggtgatatcaagccttacagttcaagcgatcgcgagttcctgaaggtggcagtggagccaccatggcccttaaatcgggccccacgccgtgccaccccaccagctcaccccccccctaggtctagttctctgggaaatagccctgaacgcggcccgttacggccatttgttccagaacaggagcttctaagatccctgaggctgtgtcctccccacccgaccgcaaggttgcttctcgctgctgacccaggtggtagtccagctcaaaggcggcgaaccagctcgctcccccggtctgaggaaagtagatactag

SEQ ID NO: 217383 - DNA, 1002 bp, Artificial Sequence
  derived and/or modified sequence
atggagttccccttcgacgtggacgccctgttccccgagcggatcaccgtgttggatcaacatctgcgccccccagcccgcaggcccggcactaccactcctgcccgggtggatcttcagcaacagataatgactatcatcgacgagcttgggaaggcttcagccaaagctcagaacctgtccgcccccatcacctcggcatcacgaatgcagtcaaacagacacgtggtatacattttgaaagactcctcagccagacccgcgggcaagggggcaatcataggcttcatcaaggttgggtacaaaaagttgttcgtcttggacgaccgtgaagcacacaacgaggttgagcctctttgtatcctcgatttctacattcatgagagcgtgcagcgccacggccacggacgagagctgtttcaatacatgctccaaaaggagagagtggaaccacatcagcttgccatagacaggccatcccagaagctgctcaagttcctgaataagcactacaacctggagacaacagtccctcaggtgaataattttgtcatattcgaaggattcttcgctcaccagcatagaccccctgccccaagtctgcgagctacgaggcatagcagagccgccgccgtggatccaacacccgcggccccagctcggaagttacctcctaagagggctgagggggatatcaagccttacagttcgagcgatcgggagtttctgaaagttgccgtggaacctccgtggccattgaatcgagccccccggagagcaacccctcctgcccaccccccccctcggtcctccagtctgggtaatagccccgaacggggtccactgcggccctttgtccccgaacaggagctgcttcggagtctgcggctctgtcccccccatccaactgcccggctcctactggctgccgaccctggaggcagcccagcccagcgccggaggacctcatccctgcctcgaagtgaggagagcaggtactag

SEQ ID NO: 217384 - DNA, 1002 bp, Artificial Sequence
  derived and/or modified sequence
atggagttccccttcgacgtggacgccctgttccccgagcggatcaccgtgctggatcagcatctgagacctcctgccaggagaccaggcacgaccaccccagcacgcgttgacctgcaacaacagatcatgaccatcattgacgagctaggcaaggcctcagccaaggcccaaaatctgtcagctcccatcacttctgccagtagaatgcagtcaaaccgccatgtcgtttacattttaaaggactcttcagcccgtcccgctggtaaaggagctataatcggatttatcaaggtcggctataagaagctgttcgttttggatgaccgggaggcccacaacgaagttgaacctctgtgcatcctcgatttctatatacatgagagcgtgcagcgacacggccacgggagagagttgttccagtatatgctgcagaaggagagggtagaaccccaccagttagcaatcgacaggccgagccaaaaactcctgaagtttctcaacaagcattacaacctcgagaccactgtgcctcaggttaacaacttcgtgattttcgaagggtttttcgcgcatcaacataggccgccagcccccagtctgagggcgacacgccactcacgcgccgccgccgtcgaccccacacccgctgcacccgcccgcaaactgcctcctaaacgggctgaaggcgatatcaaaccctactcttcgtctgacagagaattcctcaaggtagctgttgaacctccttggccactcaacagagcgccgagaagggccactcctcccgctcaccccccccccagaagcagctccctgggaaatagccctgagcggggtcccttaaggccatttgtccccgaacaggagttgctaagaagtctgcggctctgcccgcctcatcctaccgctcgactgcttttggctgccgaccctggagggtccccggcacagagaaggcggaccagctctctcccacggtctgaagagtctcgttactag

SEQ ID NO: 217385 - DNA, 1002 bp, Artificial Sequence
  derived and/or modified sequence
atggagttccccttcgacgtggacgccctgttccccgagcggatcaccgtgcttgaccagcacctgcgtccgcctgcaaggcgccccgggactactaccccagccagggttgacctccagcagcaaatcatgacgattattgacgaactcgggaaggctagtgcgaaggcccaaaacctgtccgcacccatcaccagcgcttcacggatgcagtccaataggcatgtggtgtacatcctgaaagactcctcggccaggcctgctggaaagggcgcgattattgggttcattaaagttggctataagaagcttttcgtcttagacgatcgggaagcccataatgaggtggaaccgctgtgcattctggatttctatattcacgagagcgtgcagagacacggacatggtagggagttattccaatacatgttgcagaaagagagggtggagccgcatcagctagctatagaccgcccaagtcagaaactgctcaaatttctgaataagcactacaatctggaaacaacagtcccacaggtaaataattttgtcatctttgaaggcttcttcgcacaccagcaccggcccccagccccctcactgcgggctacccgtcatagcagggcagccgccgtggaccccacccctgccgctccagcacgtaaactcccccctaaacgcgccgaaggagatataaagccctactccagttccgatagggagtttcttaaggtggcagttgagcccccttggcccttgaaccgggcaccccgacgagccactcccccagcacacccacccccaagatctagctccctcggcaattctcctgaacgtgggcccctacggccttttgtgccagagcaggagctcctgcggtcactgcgcctctgcccaccacaccccacggcacggctccttctggctgctgaccccgggggcagtccagctcagagacgacggaccagtagccttcctaggtctgaagagagtcggtactag

SEQ ID NO: 217386 - DNA, 972 bp, Artificial Sequence
  derived and/or modified sequence
atggagttccccttcgacgtggacgccctgttccccgagcggatcaccgtgttggatcagcatcttcggccgccagcccggcggcccgggacgacaacccccgcaagggttgacctgcaacagcagataatgacaatcattgatgaacttggaaaagcctctgcgaaagcccaaaatctctccgcccctattaccagtgctagtcggatgcagtccaatagacatgtcgtgtatattctgaaagactcatccgccaggccggcgggcaagggcgcaataatcggctttatcaaagttggctataagaaactgttcgtgctggacgaccgtgaggctcataacgaagtggagcctctctgcatcctcgatttctatattcacgagtccgtgcagagacatggtcatggccgagaattgttccaatacatgctgcagaaagagcgagtggagcctcaccaacttgcaattgatcggcccagtcagaaactgttgaagtttctgaataagcattacaacctcgagactaccgtccctcaagtgaataactttgtaatattcgagggcttttttgctcatcaacacagaccgcccgcacccagcctgcgcgctactagacatagtcgggccgcagctgtcgatcccactccagccgctcctgctcgcaagctgccacccaaacgagccgagggtgatatcaagccgtactccagcagcgatcgcgagttcctcaaggtggccgtagagccgccatggccactgaatagagctcccagacgtgccacaccacccgctcaccccccaccccgcagttcctctctgggcaactctcccgagagaggaccacttagacccttcgtaccggagcaggagctactgcgctctttgagactctgtccgccacaccccacagccagattgctgctggctgccgatcccggagggtcccccgcccaacgcagaagaaccagatag

SEQ ID NO: 217387 - DNA, 1002 bp, Artificial Sequence
  derived and/or modified sequence
atggagttccccttcgatgtggatgcattattcccagagcggatcaccgtactcgaccagcatctgaggccccctgccaggagacccggaaccacgacacctgcgagagtagaccttcaacagcagataatgacaatcattgatgagctgggaaaggccagcgcgaaagcccaaaatctttcagccccaattacatctgctagtcggatgcagtcaaatagacacgtggtctatatcctcaaggatagctccgctcgccctgcgggtaagggcgcaatcatcggtttcatcaaggtcggctacaagaagctgttcgtacttgacgatcgagaggctcacaacgaggttgaaccactgtgtatcctggacttttatattcacgagtctgtccaacgccatggccacggcagagaactgtttcagtatatgctgcagaaagaacgcgtggaaccccaccaattggcaattgacaggcccagccaaaagctgctgaagtttctgaataagcattacaacttggagaccacagtgccgcaggtcaataactttgttatctttgaaggcttcttcgctcaccagcacagaccgccagctcccagcctcagagccaccagacattctcgcgcagcagcggttgatcctacccctgccgctccagctcgtaagctccccccaaagcgggctgagggggacattaagccgtactcaagtagcgacagggagttcttgaaagtggccgtggagccaccctggcccttaaatcgcgctcctaggagggccacacctccggcacatcctccgccacgctccagtagtctgggaaatagtcctgagagagggcctcttagaccctttgtacctgagcaggagttacttcgctcgttgcgactctgcccacctcacccgaccgcaaggctacttctggcagcagatccaggtggctcgcccgcacagcggagacgcacctcttcgctacctaggagtgaggagagcaggtactag

SEQ ID NO: 217388 - DNA, 972 bp, Artificial Sequence
  derived and/or modified sequence
atggagtttccatttgacgtggacgctctctttcccgagaggattaccgttttagaccaacatctgcgtcctcccgcacgcaggcccggaactacaactcctgccagagtagatcttcaacagcaaatcatgaccattatagatgaacttgggaaggcatccgctaaagcacaaaatctatccgcgccaattacttctgcttcccgcatgcagagcaaccggcacgtagtgtatatcctgaaggactctagtgccaggcctgccggtaaaggcgctataattggattcataaaagttgggtacaagaagctgttcgtgctggacgaccgggaagcacataatgaagttgagccactctgtatcctcgatttttacatccacgagagcgtgcagcgacacggccacgggagagaactgttccagtacatgctgcaaaaagagcgggtcgagcctcaccaactggccattgacaggcctagccaaaaactgctcaagtttttgaataagcattacaatctcgagaccaccgttccacaagtgaacaatttcgtcatttttgaaggcttcttcgcccaccaacatcgcccaccagccccttccctccgggcaacaaggcacagtagggccgctgctgtggatcccactccagctgctccggcaaggaagctccctccaaaacgggctgaaggcgacataaaaccctattcatctagtgatcgtgagttcttaaaagtagccgttgaacctccttggcccctcaatagagccccaagaagagccactcctcctgcccatcctccccctagatccagttctctcggcaatagtcccgagcgtggacctctcaggccgtttgtaccggagcaagaactgctgcggagtttgaggctgtgtcccccacatcctactgcccgtctgctgttagctgcagacccaggcggaagccccgcacagcggaggagaacccgttag

SEQ ID NO: 217389 - DNA, 1002 bp, Artificial Sequence
  derived and/or modified sequence
atggagttcccattcgacgtagacgctctctttcccgagagaattactgtccttgatcagcacctcaggcctcctgctcgcaggccgggaacaaccaccccagctcgggtcgacctgcagcagcagattatgaccataattgacgagctcggcaaagcctccgcaaaggcccagaacctctctgcaccaataacatcggccagtcgaatgcagtctaataggcacgtcgtctacattttgaaggatagcagcgccaggcctgctggaaagggagctatcattgggttcatcaaagtcggatacaagaagctctttgtccttgacgacagggaggcccacaacgaggttgagccactatgtatcttagacttttacattcatgagtcagttcagagacacggtcatggcagagagctcttccagtatatgctgcaaaaggagcgggtagaaccacatcaacttgcaatagacaggccatcccagaaacttctgaaattcctaaataagcattacaacctggagaccactgttccacaagtcaacaactttgttatcttcgagggcttctttgcacatcaacatagaccccctgccccttccctcagggcaacgcgacatagtcgggcagcggcagtagatcctacacctgccgctcctgctcgcaaattgcctcccaagagggctgaaggtgatattaagccatattcctcatctgatcgcgagttcctcaaggtcgctgttgaacctccttggccgttgaaccgggctcccagaagagcaaccccaccagcacatcccccaccacgctcctcctcgctcggaaatagtccagagagggggccactgagaccctttgtgccagagcaagaactgctgaggtcattacggttgtgccctccccacccaactgccaggctcctactcgcagccgatcccggtggcagccccgctcagagacgtcgaaccagcagcctgccccgaagcgaagaatctagatactag

SEQ ID NO: 217390 - DNA, 972 bp, Artificial Sequence
  derived and/or modified sequence
atggagttcccttttgatgtggatgccctgttccccgagaggatcaccgtgcttgatcagcatctccgcccacctgcccgacggccaggaaccaccaccccggctagagtggacttacagcagcaaataatgactattatcgatgaactcggaaaggccagtgccaaggcacagaacctctccgcgcctatcacttccgcttcacgtatgcagtcaaaccgacacgttgtatacattctgaaagactcttcagcgaggcctgcaggcaagggcgctatcatcggattcattaaagtgggctataaaaaattgttcgtcttagacgaccgtgaagcccacaacgaggtcgagcctctgtgcatcctggatttctacattcacgaatccgtgcagcgtcacggacacgggcgagagcttttccagtacatgcttcagaaagagagagtggagccgcatcaattggccatcgacaggccttcgcagaaactcctgaaattcttgaacaaacactacaacctggagacgaccgtgccacaggtgaacaactttgtaatcttcgaggggttcttcgcgcatcagcatcgccctcccgctccctctttgcgcgctacccgacattctcgtgccgcagcagttgatcccacacccgcagcccctgcgagaaagctgccccctaagcgagcggagggtgatatcaaaccgtatagctcttctgaccgggaatttctgaaagtggctgttgagccaccatggcctttgaaccgtgctcccagaagggcaacccctcccgctcaccccccacccagaagctcttcactgggcaactcacctgagcggggtccgctgaggcccttcgtgcctgagcaggagttgctaaggagcctgagactgtgcccaccacatccgactgcccgtctcctgctggcagcagatcccggaggcagccccgctcagagacgaagaactcgctag

SEQ ID NO: 217391 - DNA, 972 bp, Artificial Sequence
  derived and/or modified sequence
atggaatttccattcgacgtggacgccctgttccccgagaggattactgtcttagaccaacaccttagaccgccagccagacggccagggactacaactccagcgagagtggacctgcaacagcaaatcatgaccataatcgatgaacttggtaaagcctccgctaaggctcagaatttaagcgcaccaatcacatctgcaagcaggatgcaatctaaccggcatgtggtctatatcctcaaagacagcagtgctcggccagctggaaaaggagcgatcatcggcttcatcaaggtgggttacaagaagttattcgtcctggacgacagagaggcccacaatgaagtggagcctctttgtattctcgacttctatatacacgaaagtgttcaacggcacggtcacgggagggaacttttccagtacatgctccagaaagaacgagtggagccccaccagctggcaattgatcgccctagccagaagctcctgaagttcctgaacaagcactataaccttgagaccaccgtgcctcaggttaacaattttgtcatttttgaggggttctttgcacaccagcaccgcccacccgctccttcactgagagcaactcgacatagcagagccgctgcagtcgaccccaccccagctgcacctgctagaaagttgccacctaagcgggcagaaggggacattaagccctactcatcttctgatcgggagtttctcaaagtggctgtggaacctccatggcccctgaaccgggctccgcgacgtgctacacccccagcacatccaccccctaggagtagttctttgggtaacagcccagagagagggcctttaagaccgttcgtgcctgaacaggaactcctccggtctctccgattgtgtcccccacatccaaccgcccgactgctcttggcagctgatccaggcggttcccctgctcagcggcgacggacaagatag

SEQ ID NO: 217392 - DNA, 972 bp, Artificial Sequence
  derived and/or modified sequence
atggagtttccattcgatgtggatgccctgttccctgaaagaatcactgttctggatcagcatctgaggcctcctgcccgaaggccgggtactaccacgcctgctcgcgtggatcttcagcaacagataatgaccattatcgacgagttaggaaaggccagcgccaaggctcagaatctgagcgccccaatcacgtctgctagccgtatgcagagtaatcgacatgttgtttacatactgaaggactcatctgcgaggcctgctggcaagggcgcaattatcggatttatcaaggtgggctacaagaaactcttcgtcctggatgatcgcgaagcacacaatgaagtcgagccgctgtgcatcctggacttctatatccatgagtctgtccagcgacatggccacgggagagaactcttccagtacatgctgcaaaaagaacgggtggagcctcaccagctggctatagaccgcccaagccagaagctgctgaagtttttgaataagcattataatctggagactaccgtcccacaggtcaataacttcgtcatcttcgaggggttcttcgcccatcagcaccgcccacctgcgccttctctaagggccacacggcactcacgtgctgcagccgtggacccaacaccagcagcgcctgctaggaagttgcctcccaagagagcagaaggagacatcaagccctatagttccagtgatcgtgagttccttaaggtggccgtggaaccaccctggcccctcaacagggctccacgtagggctacaccgcctgcacacccacccccaagaagcagctctttgggtaactcaccagagagaggtccacttagacccttcgttccggagcaggagctgctgaggagtttgaggctgtgtccccctcatccaacagctcgattgctcctggcggctgatccgggtggcagccccgctcaaaggcgacggactagatag

SEQ ID NO: 217393 - DNA, 972 bp, Artificial Sequence
  derived and/or modified sequence
atggagtttccattcgatgtggacgcccttttcccggaacggattacagtgctcgatcaacatttgagaccgcctgcacggagaccgggaacaacgactcctgctcgagtcgatctgcagcagcagataatgactattattgatgagcttggaaaggccagtgctaaagcacagaatttgtcagcgcctattacatcagccagcaggatgcagtcaaatcgacatgtggtctacatcctcaaagatagctcagctaggcctgctgggaaaggtgcaattattggctttattaaggttgggtacaaaaagctgtttgtgcttgatgatcgggaggcccacaatgaagtggagccactgtgtatcctggacttctacattcatgaaagtgtacagcggcacgggcatgggagggaattattccagtacatgctgcagaaggaacgcgtggagcctcaccagctcgctatcgatcgtccttcacagaaactcttaaagtttttaaacaagcattacaacctagaaactactgtcccacaagttaataacttcgtcattttcgaagggttttttgcccaccagcaccggcctcccgctcccagtctgcgcgctaccaggcattcccgcgcagctgccgtggatcccacgccagcagccccagcgaggaaactcccgcctaaaagagctgaaggcgatattaagccctattcttcaagcgatcgcgagttcctgaaggtcgcagtggaacctccttggccgctcaacagagcacccaggcgagccactcccccagcacacccgcctcccaggtcttctagtcttggcaactcccccgaacggggaccactcaggccatttgtgcctgaacaggaacttctgaggagcctgagactttgccccccacaccctactgctcggctgctattagctgcagatcccggaggctcccccgctcagagaaggcgtacccgctag

SEQ ID NO: 217394 - DNA, 1002 bp, Artificial Sequence
  derived and/or modified sequence
atggaattcccatttgacgttgatgctctgtttcctgagcgaatcactgttctagatcaacacctgcggcctcctgcacggagaccaggtactaccacacctgcaagggttgacctgcagcaacagatcatgactataattgacgaattgggaaaagcctctgcgaaggctcagaacctgtccgcgccaatcacatcagcctcaagaatgcagtctaaccgccacgtcgtgtatatcctgaaggatagctctgctcgccctgccggtaaaggcgctattatcggttttattaaagtcggttataagaagctcttcgtactggacgacagggaagcccataacgaggtagaaccgttgtgtatcctagatttttacatacacgaaagtgtgcagaggcacggccacggccgtgagctgtttcaatacatgttgcagaaggaaagggtggaaccccatcaattggctatcgaccggccaagccagaagctgttgaagttcttgaacaagcattacaatctggaaactactgttcctcaggttaacaacttcgtgatcttcgaggggtttttcgctcaccagcatcgacctcccgctccatcattgagagcaacgcggcattcgagagcagctgcagtcgatcccacccctgctgcccctgccaggaagcttcccccaaagcgcgctgaaggagacatcaagccctattcgtctagcgaccgcgaatttttgaaggtcgctgtcgagccaccctggcctctcaaccgggctccaagaagagccactccgccagctcatcccccaccccgatcttcatcgctgggtaacagtcctgagcggggacccctgagacccttcgtaccagagcaggaactgttacggagcctgcgcctgtgcccgcctcacccaacagcccgacttttgcttgccgctgacccaggcggttctcccgcacagaggagaaggacttccagcctgcccagatccgaggaaagtcgctactag

SEQ ID NO: 217395 - DNA, 972 bp, Artificial Sequence
  derived and/or modified sequence
atggagttccctttcgatgtggatgccctgttccccgaaagaatcaccgtcctggaccaacatctcagacctccagcccgtcgcccaggtactaccactcccgctcgagtcgacctacagcagcagattatgaccattatcgacgaattggggaaagctagtgccaaagcacagaaccttagcgcgccaatcaccagcgcgagtagaatgcagagtaatagacacgttgtgtacatcctcaaagactcctccgctaggcccgcaggtaaaggtgctatcattggcttcattaaggtaggttataagaagctgttcgtgttggatgaccgggaggctcacaatgaggttgaacccctgtgtattctggatttctatatccacgagtctgttcagagacacggtcacgggcgtgaactgtttcaatatatgcttcagaaagagcgggttgagcctcatcagttggcaatcgatcgaccttcacagaaacttctcaaattccttaacaagcactacaatttagaaaccacagtgccccaagtcaataatttcgtcatctttgagggtttcttcgcacaccaacacaggcctccagcaccatcactacgtgctacgagacactcgcgggctgcagctgtggatcctaccccggcagcccctgccagaaaactgccgcctaagagagcagaaggggatatcaagccatattcctcttctgaccgggagtttctgaaggtcgcagtggaacctccttggccactgaatagggcacctcgcagagctacccctcccgctcacccccctccgagaagttcttctttgggcaactcaccagaaaggggccctcttcgacccttcgttcccgagcaggagcttttaaggtctctccgcctctgccccccacaccccactgcccgattgctactcgccgcagaccctggcggttctcccgcacagcggaggaggactcgctag

SEQ ID NO: 217396 - DNA, 1002 bp, Artificial Sequence
  derived and/or modified sequence
atggagttccccttcgatgtggacgccctgttccctgagcgaattaccgttctcgaccagcatctccgtccgccagccagaaggccgggaaccaccacaccggcaagggtagatctacagcaacaaatcatgaccataattgacgagctgggcaaagcctctgccaaagcccagaacctaagcgcccctatcacctccgcctcccggatgcaaagtaacaggcatgtagtgtacatcttaaaggactcgtctgcacgcccagctggcaaaggcgctatcattgggtttataaaggttggttacaaaaaactatttgtgctagatgaccgtgaggcgcataacgaggtggagcccctgtgtatcctggacttttatatccacgagtcagtacagcgacacggacacgggagggaactctttcagtacatgctgcagaaggaacgcgtggagccccatcagctcgccatcgatcggccttcacagaagcttctgaagttcttaaataaacactataacttggaaaccaccgtgccccaggtgaataactttgtcattttcgagggcttctttgctcatcagcaccgcccaccggctcccagtttacgcgctacacgccactcacgggctgccgcagttgatcctacgcctgctgcccctgccagaaagctgccaccgaagagggccgagggggatattaagccctattccagctccgatagagagtttcttaaagttgccgtcgagccaccctggcccctgaaccgagcccctcgtagggcgacgccacctgctcacccgcctccaagatccagttccttaggtaactcgccggaaaggggacctttacggccattcgtgccagagcaggaactcctgcgtagccttagactttgcccaccacatccaactgcaagactcctgcttgccgcagatcccggtggttcccctgcccaacgtcgaaggacatcaagtttaccacgttctgaagagtctagatactag

SEQ ID NO: 217397 - DNA, 1002 bp, Artificial Sequence
  derived and/or modified sequence
atggagttccccttcgatgtggacgccctatttcctgagagaatcactgttcttgatcagcacctgaggccgccagcgaggaggccgggtacaactacaccagctcgcgttgatcttcagcaacagataatgaccatcatcgacgagctagggaaggcgtctgctaaggctcagaacctgagtgcccctattacttccgcttccagaatgcagtctaatcgacacgttgtctatatactgaaagactccagtgccagaccagccggtaagggcgcaatcatcggctttataaaagtgggctacaagaaactgtttgtgttggacgaccgagaagcccacaatgaagtagaaccgctttgcatccttgacttctacatccatgagtccgttcagaggcatggtcatggtagagagttgtttcagtatatgctgcaaaaagaacgcgtggagcctcatcagctggccatcgaccggcctagccaaaagcttctcaaattcctcaataaacactacaatctggagacgacggtcccccaagtgaacaattttgttatcttcgaagggttctttgctcaccaacaccgaccacccgctccgtccctgagggcaactcgacatagtcgagccgcagctgtagatccaacacccgcagctcctgcccgaaagctgcctcctaagagggcggaaggcgatatcaagccatactcgtcctccgatagggagtttctgaaagttgccgtcgagcccccatggccgttgaacagagcccctcggagagctacgcctccggcacatccccctcctcggtcatcctcactgggaaatagcccagagagagggcctctccgaccgtttgtgccggaacaggagctgctccgttctttgcgcctatgtccacctcaccctactgcccgtcttctcctagccgctgatcctggcggaagtccagcccaacgtcgcaggacctcctcattacctaggagtgaggagtcacgatactag

SEQ ID NO: 217398 - DNA, 1002 bp, Artificial Sequence
  derived and/or modified sequence
atggaatttcccttcgacgtagacgcactgttccccgagaggatcaccgttctggatcagcacctcaggccacctgctagaaggccgggaacaaccactccagcccgagtggatctccagcagcagataatgacgatcattgacgaactgggcaaagcatcggctaaggcccagaacctgagcgcaccgatcacctccgcctcccggatgcagagtaatcggcacgtcgtgtacatattgaaagattccagcgctcggcctgctgggaaaggcgctatcatcggctttatcaaagtcggatacaaaaagctgttcgtcctggacgatcgggaagcacacaacgaggtggaaccactgtgtattcttgacttctatattcacgaatctgtgcaaaggcatggtcacggacgagagctgttccagtacatgctgcagaaggagcgggtcgagcctcaccaactggcaattgaccggcctagccagaagctcctcaagttcctcaataaacactataacctcgaaacaacagtgccacaagtgaacaattttgtaatctttgagggattctttgctcatcaacaccgccctccagctcctagcctgcgagcgacccggcacagcagggcggcagctgtagatccaaccccggctgccccagcacggaaactcccaccgaaacgagcagaaggggacattaaaccttattcctcttctgacagagagtttctaaaagtggctgtggagcctccctggcctttgaacagagctccacggagagctacccctccagctcatccacctcctcgcagctcttcactcgggaacagccccgagcgtggccctctcagacccttcgtccccgaacaggaactgctgcgttctttgaggttgtgccctcctcaccctacagcccgactgctcctcgccgcagacccgggaggatctcctgctcagcggaggaggacgagctctctgccgaggagcgaggagtcccggtattag

SEQ ID NO: 217399 - DNA, 1002 bp, Artificial Sequence
  derived and/or modified sequence
atggaatttccgtttgatgtagatgccctatttcccgaacggattactgtgctggatcagcatctccggccacccgctagacgaccaggcactacaacccctgccagggtggatctgcagcagcagattatgacaatcattgatgagctgggcaaagctagcgcaaaggcccagaatctttctgctccgatcacatctgctagcagaatgcagtccaatagacacgtagtgtatatccttaaagatagcagcgctcggccagccggtaagggggctatcatagggtttatcaaggtcggctacaaaaagctgtttgtgctcgatgacagggaagcacacaacgaagttgaaccactctgtattttggatttttatatccacgagtcagtgcaacgacatggccatggacgggaacttttccagtatatgctgcagaaggaacgagtagaacctcatcaactggccatagatcggccaagccagaagctgttaaagtttctgaacaagcattacaatctggagaccacagtgccccaggtgaacaatttcgtgattttcgaaggtttctttgcacatcaacaccgcccacctgccccttctctgagggctacaaggcattctcgcgcagcggctgttgaccccacgcccgctgcccctgctcgtaagctgccaccaaaacgggctgagggagacattaagccctactcaagcagcgatagggagtttctgaaagtcgcggtcgaacccccatggccactgaatcgcgcaccaaggcgtgccactcctccagctcaccctccacctagaagcagctcacttggaaacagtcccgagcgcggacctttgaggcctttcgtgcctgagcaggaactcctccggtccttgcgtctgtgtccacctcatccgaccgctcggctcctgcttgcggcagatccaggaggctcaccagcgcagagacgacgtacttctagtttgcctcggtctgaagaaagccgctattag

SEQ ID NO: 217400 - DNA, 972 bp, Artificial Sequence
  derived and/or modified sequence
atggaatttccattcgacgtagatgcgctcttccccgagcgtatcacagtgctggatcagcatttacgacctcccgctcgtaggcccggaacgacgacaccagcccgagtagatctgcagcagcaaatcatgacgatcattgatgagttgggcaaagcgtctgccaaggctcaaaacctgtctgcaccaataacatctgcaagcagaatgcagtcaaatcggcacgtggtctacatattgaaggattcttctgctcgtccagccggtaaaggcgctatcataggattcatcaaggtgggatacaagaagcttttcgtcttggatgatagagaggctcacaatgaagtggaacccttgtgtatactggatttttacatccacgagagcgtccaaagacacggtcatggccgtgagttatttcagtatatgctgcagaaggagcgcgtcgagccccatcaactcgcaattgatcgtccctcacagaagttgcttaaattccttaataagcattataacctggagacaaccgtgccccaagtgaataatttcgtcatatttgaaggcttctttgctcaccaacacagacctcccgcaccatctttgcgagctacgagacattcccgcgctgcagcggttgacccaactccggctgcgccagcacgcaagctacctccaaagagggcagagggagatatcaagccctacagtagtagcgatagggaatttctcaaagtggccgtggagcctccttggccactgaaccgggctcctcgtagagccacccctcccgctcatcctccgcctaggtcgagttcactcgggaactctcctgaacggggaccattaaggccctttgttcctgaacaggagctcctccgttctttgcgtctgtgtccgccacatccgacagcgcgtctgctgttggctgccgatccaggcggttcccctgcccaacgtcgcagaactagatag

SEQ ID NO: 217401 - protein, 1026 aa, Artificial Sequence
  derived and/or modified sequence
MVCRPVFPCRRRFCPRPFLVGLVVAICLFYQTLTLRGSRKLTAAAPGAVPHTSTETQASRCKKGFSQDKQCFLLSGNAQETRKVKESMETHFGSHGRRAILYRPPFYSKTELQLHQHILTQHGYTVVIAEERLNAGLGPGLLEQGDLGSWDLLICLSSKKAEGTPCISKEVMCQLGLHQKANRLPEIQQPLCRKEGLCQIVRRFPELQLPVSPSVCLDQGMQLKPSTSSHLLKTVKPRVWKPGDWSREQLNETTVLAPHETIFRAEDLSVILKAYVLVTSLTPLRAFIHSTGTVWNPPKKKRFTVKLQTFFETFLRASSPQQAFDIMKEAIGKLLLAAEVFSETSTLGPKTFHRCRFCFQLLTFDIGYGSFMYPVVLQVHEHLNFQDYDNMDFEDQNTEEFLLNDTFNFLFPNESSLSIFSEIFQRLYRSDVFKGENYQKELNQCLSLEEINSIMTFIKELGSLGQFQLLFPSTTPGIQSLMHEFYDVANPVGNPGSVLTQYWSLLNVFEQFQFMNKKTQPHPLEWNSFTEDKNIEKPQVPFDAIENKKAAVPQIKNENKEIHCSDDENTPCHIKQIFTHPHLELNPDFHPKIKDYYCEVPFDVVTVTIGVETPKCLCKVHLYEQAGPSFASYPLGLGMNKISIFVVDESPAHGETLITYKLTIYREDRPSLPLFEAFTACGFVQDCGLLIHPEETCGLQPISSDYIEAILQSELKRCPSGDMKGQWIVPCLSCSDNRTCDWREITWQPHNCQYGVLTKPQLQQCLGGRKILFIGDSTNRGIMYYLIERLNETLQEWQKVHGTKFYHNVNGGKTLISYSYYPQFWISPSLRPTFENALEHLLQRSRPLENTGQTVLVVGGVQWLNSNHLQIIHKVLKRENLLNILVIIKTLGIGFHLPVDGVHFLTQSEVQNLWKENLIILDTAKKHGYEVVDTFTITMGRYKEFLQGKCGCHFHEVVKSKLSKEYNFIKMKRSRNHIMGRYFSNQSKLQQGTVTNFRSPYHVRGPINQVCSEILLSRMCANKRTM

SEQ ID NO: 217402 - protein, 202 aa, Artificial Sequence
  derived and/or modified sequence
MVCRPVFPCRRRFCPRPFLVGLVVAICLFYQTLTLRGSRKLTAAAPGAVPHTSTETQASRCKKGFSQDKQCFLLSGNAQETRKVKESMETHFGSHGRRAILYRPPFYSKTELQLHQHILTQHGYTVVIAEERLNAGLGPGLLEQGDLGSWDLLICLSSKKAEGTPCISKEVMCQLGLHQKQLRRREERQRPGSPASRRLSVR

SEQ ID NO: 217403 - protein, 549 aa, Artificial Sequence
  derived and/or modified sequence
MVCRPVFPCRRRFCPRPFLVGLVVAICLFYQTLTLRGSRKLTAAAPGAVPHTSTETQASRCKKGFSQDKQCFLLSGNAQETRKVKESMETHFGSHGRRAILYRPPFYSKTELQLHQHILTQHGYTVVIAEERLNAGLGPGLLEQGDLGSWDLLICLSSKKAEGTPCISKEVMCQLGLHQKANRLPEIQQPLCRKEGLCQIVRRFPELQLPVSPSVCLDQGMQLKPSTSSHLLKTVKPRVWKPGDWSREQLNETTVLAPHETIFRAEDLSVILKAYVLVTSLTPLRAFIHSTGTVWNPPKKKRFTVKLQTFFETFLRASSPQQAFDIMKEAIGKLLLAAEVFSETSTLGPKTFHRCRFCFQLLTFDIGYGSFMYPVVLQVHEHLNFQDYDNMDFEDQNTEEFLLNDTFNFLFPNESSLSIFSEIFQRLYRSDVFKGENYQKELNQCLSLEEINSIMTFIKELGSLGQFQLLFPSTTPGIQSLMHEFYDVANPVGNPGSVLTQYWSLLNVFEQFQFMNKKTQPHPLEWNSFTEDKNIEKPQVPFDAIENKK

SEQ ID NO: 217404 - DNA, 5340 bp, Artificial Sequence
  derived and/or modified sequence
ctgcccggccccgggtggctgcgatgccgaggtcctctgctcccgccgggcgtgcagcgggcgcgcgcgcgtgtgtttatgtgtctgtgtgcgtgtgtgtgtgtgtctctctctgtgtgtgtgtgagatgaattggagtcatacgactgggtgtttccttccgagtggttttcatcagcaatccattaggaaatcatggaaactttttttttcctggctaaaaggatgaaaactgagtcatccacttttgactgtcatccatggaagagctcttattaaaagcctcagactttcgggacctatgattctttggcacaaccttttggaaaattcttaagcagggatgaagcaaacttgattggagttggggaaaaagaagacagattagtatttttcatgctgacaaaaaatagctgctatgacttttcccgcaacgtggacaggggccaagtgaagctgaactggtcatggtctgtcgcccagtgttcccttgtcgtcggcgattttgcccccgacccttcttggtgggcttagtggtggcaatctgtctcttctaccagactctgaccctccgagggtcgaggaagctcacagccgctgcccctggggctgtcccacacacatccactgaaacccaggcaagcagatgcaagaaaggattctctcaggacaaacagtgcttccttctctctggtaatgcccaggaaaccagaaaggtcaaagaatcaatggagacacactttggcagccatggccgaagggccatactctacaggcctcctttctacagcaaaacagagcttcagctacaccagcacattctgactcaacatggctatacggttgtcatcgctgaagaaaggctcaatgctggcctagggccggggctactagaacaaggtgatctgggctcttgggatctgctcatttgcctgtcttctaagaaagcagaaggaacaccctgtatatccaaggaagtcatgtgccagttaggtttacatcaaaaggcaaacagattaccagaaatacagcagccactttgcagaaaggaaggattatgtcaaatagttagaagattcccagaactgcaacttccagtgagtccctctgtgtgtctggatcagggaatgcaattaaagccgagtacttcgagtcaccttttaaaaacagtgaagccacgtgtgtggaaaccaggggactggagtcgtgaacagctgaatgaaacgacagtccttgctccacatgaaacaatctttcgagccgaagatctatctgtgattcttaaagcgtatgtgttggtgacgtccttaacccctttgcgtgcattcattcattcgacgggcacagtttggaatccaccaaagaaaaaacgcttcactgtcaagctgcaaacattttttgagacattcctgagagccagttcacctcaacaggcttttgacattatgaaggaagcaattggcaaactactgctagcggctgaagtattcagtgaaacatctactctgggaccaaagaccttccatagatgcagattctgctttcaacttctaacttttgatattggttatggcagtttcatgtaccctgtagtgctccaggtacacgagcatttaaattttcaagattatgataatatggattttgaggaccaaaatacagaagaattccttttaaatgacactttcaattttctcttccctaatgaatcatcactttccatattttctgagatatttcagagactttatagatcagatgttttcaagggtgaaaactatcaaaaggaactaaatcagtgtctgtccttagaagaaattaactcaattatgactttcataaaggaacttggaagtctgggacaattccaactgctcttcccatctactactcctgggattcagtcactgatgcatgaattttatgatgtggcaaatcctgtgggaaatcctggctcagtcctgacccaatactggtctcttttaaatgtatttgaacaatttcagttcatgaataaaaagacacagccacatccactggaatggaattctttcacagaagataagaacattgaaaaaccacaagtgccatttgatgcaatagaaaataaaaaagctgcagttccacaaattaaaaatgaaaataaagaaatacattgcagtgatgatgaaaacacaccatgtcatatcaagcagatcttcacacatccacatttggaactaaatcctgactttcatccaaagatcaaagattattactgtgaagtcccatttgatgtggtaacagtgacaattggagtggaaactcctaagtgtctgtgcaaggtgcacctgtacgagcaggcagggccaagctttgccagctaccctctgggcttaggaatgaacaaaatctcaatatttgttgtggatgaatctccagcacacggtgagactctgatcacgtacaaactcaccatctatagagaagaccgcccaagtctgcccttgtttgaggccttcacagcatgtggttttgtgcaggattgtggtttgctgattcatccagaggaaacctgtgggttacagcctatttcttctgactacattgaagccattttacagtctgaactaaaaagatgtccatctggggacatgaaaggccagtggattgtgccttgccttagttgttcggacaacaggacgtgtgactggagagaaataacctggcagccccacaactgccaatatggtgtcctaactaagcctcaactccagcagtgcctgggaggaaggaagattctgttcattggagattcaaccaacagagggatcatgtactatcttattgaaaggctgaatgaaacgttgcaggaatggcagaaagtacatggcactaaattctatcacaacgtcaatggtgggaagactttgatcagttattcctactatccccagttctggataagcccttcattgagaccaacatttgaaaatgcacttgaacacctcttgcaaagatcacgtcccctagagaatactggccagactgtattggttgttggtggtgttcagtggcttaattccaatcacctgcaaattattcacaaagttttgaagagggaaaatttactcaatatcctagtgatcatcaaaactttgggaattggatttcatctgccagtggatggagtacatttcttaacacagagtgaagtacagaacttatggaaagaaaatttgattattctggatactgcaaaaaaacatggctatgaagtagttgacacattcactataacaatggggcgttacaaagagtttctacaggggaagtgtggatgtcatttccatgaggtagtgaaatcaaagttatccaaagaatataactttattaaaatgaaaagatcaagaaatcatatcatgggaagatatttcagcaatcaaagcaaactacaacaaggcactgtaacaaattttcgatcgccatatcatgtcagaggtccaataaatcaggtttgttctgaaatccttctcagcaggatgtgtgcaaataaaaggactatgtaggctccctgcaggagagctgaatctggagctggagacgagctagtcacccggacaatggtctaggagccaagcgctgcacatcgcacacatttgggatcgaccacacacacttgtgcacaccagcacatgcatgcacaccagtacacacacagttaaataatgataacacttcttacagctttatgaattcaagatgtgaccttgaacaccagtccatttcacagtgaaagatatacctagagaaacgttacttgaagcataattattaaccagaaccactgtgggccaggtatggcattgtgataataaagagaaatatagacacttaaaattatgtgaaaaaaaggataatgctctttcatgttgtcttaccatatctataggtacatcaatattgaaaaggagaaaaaccaatgacattccactggcaagtagaagttgtcctttcattctttaccaggagaaaatgtgatgtttatgatggcttaggctttgtgaatctaatgcttatgaaaaacatttcttcctatactttttaaattttattactgaaaggaaaagaacaggaatgttccacaagggaatttgaagagattctgtgagagagatatgaaatattttatagttaaaacaccaatatattcaactttacacttcttgtgtttttcataaacattccctcttgtcttatctgtgtacttcgatgggtaactgcagtctgaattaatgaaatatgtaattttaaagtaagtaacaaaatgtagttcctcatgtattactgtactatgtttcattgatgatattacttaaatcttgtgtttgccattacagccctatgtaacttaaaattacaattatattttatgtaaatattttgcaaaggactatgcattctgaaatgcataggtgctttttcccaccaagcatttgcatatgtccacaaatagtattatgttactagtatctatattttgattttcctgagcaactgtatcaaatccaaatttagattagacaaaaaattattattttaattaaactgtggcatacatataatacatacctaattatagtagtgagaactatttcttttatctctttaggttcaaaatggtgaatttctttattatatgaatgctttgttgtgagataacatcacactgttacaatggattttagaggtttgtcttttttgggtggggtgggaagctgagagggttaattcaatacatggctgaaattaccaaatgtataaatacctcattttcactaccatacaagaaaaaaacacctattttgattgatcagttcttttgtatgaatatccacctcctttaaatactctatttttatatatatttttatatgaagataaacatgaatttatatttaactgtcttaaattatatttacataaatgcaaatatcacttgatataaacaatacaaatctgcatcttacagatgataatttttttagaagaatgatacagaattaactttaaaaataaaacttttctaatatacacttaaatgcaaacatcatttttaaattttcagtgatttttttaatgacataaaacgttaccaatgtgtgcagcctctccatcatgttttaacatactgtatactctatagcagtattacagtcagtatttcatataattttctttagacctaactgttaccatctgactgaggttactctggtatttatctcttcgctgctgaaataataatggattttagaaacaattgtaataatatcattaataaatgtcttactagtaata

SEQ ID NO: 217405 - DNA, 2219 bp, Artificial Sequence
  derived and/or modified sequence
aaaactaaatgaagggaagcatacaaaaggctgaaagcaagactgctttaaaaccggaggaaaattgaggaactgctaaggcaacctggcctgagttcagctgtgcaacaggcactttgggttttaatcttttgcgttcttcaatgctgttttcagactccagatatactttggtattgttttctctcttcctgcaaagctgaggcagagtcggactcctttactgtgagttgaaagatgtgagaataaggcattgctggaagcaacagtttggcagcctggggtacactcaggttattcgttacaactattattatttgatgtctttttttaaactcaggtcatccacttttgactgtcatccatggaagagctcttattaaaagcctcagactttcgggacctatgattctttggcacaaccttttggaaaattcttaagcagggatgaagcaaacttgattggagttggggaaaaagaagacagattagtatttttcatgctgacaaaaaatagctgctatgacttttcccgcaacgtggacaggggccaagtgaagctgaactggtcatggtctgtcgcccagtgttcccttgtcgtcggcgattttgcccccgacccttcttggtgggcttagtggtggcaatctgtctcttctaccagactctgaccctccgagggtcgaggaagctcacagccgctgcccctggggctgtcccacacacatccactgaaacccaggcaagcagatgcaagaaaggattctctcaggacaaacagtgcttccttctctctggtaatgcccaggaaaccagaaaggtcaaagaatcaatggagacacactttggcagccatggccgaagggccatactctacaggcctcctttctacagcaaaacagagcttcagctacaccagcacattctgactcaacatggctatacggttgtcatcgctgaagaaaggctcaatgctggcctagggccggggctactagaacaaggtgatctgggctcttgggatctgctcatttgcctgtcttctaagaaagcagaaggaacaccctgtatatccaaggaagtcatgtgccagttaggtttacatcaaaaggcaaacagattaccagaaatacagcagccactttgcagaaaggaaggattatgtcaaatagttagaagattcccagaactgcaacttccagtgagtccctctgtgtgtctggatcagggaatgcaattaaagccgagtacttcgagtcaccttttaaaaacagtgaagccacgtgtgtggaaaccaggggactggagtcgtgaacagctgaatgaaacgacagtccttgctccacatgaaacaatctttcgagccgaagatctatctgtgattcttaaagcgtatgtgttggtgacgtccttaacccctttgcgtgcattcattcattcgacgggcacagtttggaatccaccaaagaaaaaacgcttcactgtcaagctgcaaacattttttgagacattcctgagagccagttcacctcaacaggcttttgacattatgaaggaagcaattggcaaactactgctagcggctgaagtattcagtgaaacatctactctgggaccaaagaccttccatagatgcagattctgctttcaacttctaacttttgatattggttatggcagtttcatgtaccctgtagtgctccaggtacacgagcatttaaattttcaagattatgataatatggattttgaggaccaaaatacagaagaattccttttaaatgacactttcaattttctcttccctaatgaatcatcactttccatattttctgagatatttcagagactttatagatcagatgttttcaagggtgaaaactatcaaaaggaactaaatcagtgtctgtccttagaagaaattaactcaattatgactttcataaaggaacttggaagtctgggacaattccaactgctcttcccatctactactcctgggattcagtcactgatgcatgaattttatgatgtggcaaatcctgtgggaaatcctggctcagtcctgacccaatactggtctcttttaaatgtatttgaacaatttcagttcatgaataaaaagacacagccacatccactggaatggaattctttcacagaagataagaacattgaaaaaccacaagtgccatttgatgcaatagaaaataaaaaag

SEQ ID NO: 217406 - DNA, 3081 bp, Artificial Sequence
  derived and/or modified sequence
atggtgtgcagacccgtgttcccctgcagaagaagattctgccccagacccttcctggtgggcctggtggtggccatctgcctgttctaccagaccctgaccctgagaggcagcagaaagctgaccgccgccgcccccggcgccgtgccccacaccagcaccgagacccaggccagcagatgcaagaagggcttcagccaggacaagcagtgcttcctgctgagcggcaacgcccaggagaccagaaaggtgaaggagagcatggagacccacttcggcagccacggcagaagagccatcctgtacagaccccccttctacagcaagaccgagctgcagctgcaccagcacatcctgacccagcacggctacaccgtggtgatcgccgaggagagactgaacgccggcctgggccccggcctgctggagcagggcgacctgggcagctgggacctgctgatctgcctgagcagcaagaaggccgagggcaccccctgcatcagcaaggaggtgatgtgccagctgggcctgcaccagaaggccaacagactgcccgagatccagcagcccctgtgcagaaaggagggcctgtgccagatcgtgagaagattccccgagctgcagctgcccgtgagccccagcgtgtgcctggaccagggcatgcagctgaagcccagcaccagcagccacctgctgaagaccgtgaagcccagagtgtggaagcccggcgactggagcagagagcagctgaacgagaccaccgtgctggccccccacgagaccatcttcagagccgaggacctgagcgtgatcctgaaggcctacgtgctggtgaccagcctgacccccctgagagccttcatccacagcaccggcaccgtgtggaacccccccaagaagaagagattcaccgtgaagctgcagaccttcttcgagaccttcctgagagccagcagcccccagcaggccttcgacatcatgaaggaggccatcggcaagctgctgctggccgccgaggtgttcagcgagaccagcaccctgggccccaagaccttccacagatgcagattctgcttccagctgctgaccttcgacatcggctacggcagcttcatgtaccccgtggtgctgcaggtgcacgagcacctgaacttccaggactacgacaacatggacttcgaggaccagaacaccgaggagttcctgctgaacgacaccttcaacttcctgttccccaacgagagcagcctgagcatcttcagcgagatcttccagagactgtacagaagcgacgtgttcaagggcgagaactaccagaaggagctgaaccagtgcctgagcctggaggagatcaacagcatcatgaccttcatcaaggagctgggcagcctgggccagttccagctgctgttccccagcaccacccccggcatccagagcctgatgcacgagttctacgacgtggccaaccccgtgggcaaccccggcagcgtgctgacccagtactggagcctgctgaacgtgttcgagcagttccagttcatgaacaagaagacccagccccaccccctggagtggaacagcttcaccgaggacaagaacatcgagaagccccaggtgcccttcgacgccatcgagaacaagaaggccgccgtgccccagatcaagaacgagaacaaggagatccactgcagcgacgacgagaacaccccctgccacatcaagcagatcttcacccacccccacctggagctgaaccccgacttccaccccaagatcaaggactactactgcgaggtgcccttcgacgtggtgaccgtgaccatcggcgtggagacccccaagtgcctgtgcaaggtgcacctgtacgagcaggccggccccagcttcgccagctaccccctgggcctgggcatgaacaagatcagcatcttcgtggtggacgagagccccgcccacggcgagaccctgatcacctacaagctgaccatctacagagaggacagacccagcctgcccctgttcgaggccttcaccgcctgcggcttcgtgcaggactgcggcctgctgatccaccccgaggagacctgcggcctgcagcccatcagcagcgactacatcgaggccatcctgcagagcgagctgaagagatgccccagcggcgacatgaagggccagtggatcgtgccctgcctgagctgcagcgacaacagaacctgcgactggagagagatcacctggcagccccacaactgccagtacggcgtgctgaccaagccccagctgcagcagtgcctgggcggcagaaagatcctgttcatcggcgacagcaccaacagaggcatcatgtactacctgatcgagagactgaacgagaccctgcaggagtggcagaaggtgcacggcaccaagttctaccacaacgtgaacggcggcaagaccctgatcagctacagctactacccccagttctggatcagccccagcctgagacccaccttcgagaacgccctggagcacctgctgcagagaagcagacccctggagaacaccggccagaccgtgctggtggtgggcggcgtgcagtggctgaacagcaaccacctgcagatcatccacaaggtgctgaagagagagaacctgctgaacatcctggtgatcatcaagaccctgggcatcggcttccacctgcccgtggacggcgtgcacttcctgacccagagcgaggtgcagaacctgtggaaggagaacctgatcatcctggacaccgccaagaagcacggctacgaggtggtggacaccttcaccatcaccatgggcagatacaaggagttcctgcagggcaagtgcggctgccacttccacgaggtggtgaagagcaagctgagcaaggagtacaacttcatcaagatgaagagaagcagaaaccacatcatgggcagatacttcagcaaccagagcaagctgcagcagggcaccgtgaccaacttcagaagcccctaccacgtgagaggccccatcaaccaggtgtgcagcgagatcctgctgagcagaatgtgcgccaacaagagaaccatgtag

SEQ ID NO: 217407 - DNA, 1650 bp, Artificial Sequence
  derived and/or modified sequence
atggtgtgcagacccgtgttcccctgcagaagaagattctgccccagacccttcctggtgggcctggtggtggccatctgcctgttctaccagaccctgaccctgagaggcagcagaaagctgaccgccgccgcccccggcgccgtgccccacaccagcaccgagacccaggccagcagatgcaagaagggcttcagccaggacaagcagtgcttcctgctgagcggcaacgcccaggagaccagaaaggtgaaggagagcatggagacccacttcggcagccacggcagaagagccatcctgtacagaccccccttctacagcaagaccgagctgcagctgcaccagcacatcctgacccagcacggctacaccgtggtgatcgccgaggagagactgaacgccggcctgggccccggcctgctggagcagggcgacctgggcagctgggacctgctgatctgcctgagcagcaagaaggccgagggcaccccctgcatcagcaaggaggtgatgtgccagctgggcctgcaccagaaggccaacagactgcccgagatccagcagcccctgtgcagaaaggagggcctgtgccagatcgtgagaagattccccgagctgcagctgcccgtgagccccagcgtgtgcctggaccagggcatgcagctgaagcccagcaccagcagccacctgctgaagaccgtgaagcccagagtgtggaagcccggcgactggagcagagagcagctgaacgagaccaccgtgctggccccccacgagaccatcttcagagccgaggacctgagcgtgatcctgaaggcctacgtgctggtgaccagcctgacccccctgagagccttcatccacagcaccggcaccgtgtggaacccccccaagaagaagagattcaccgtgaagctgcagaccttcttcgagaccttcctgagagccagcagcccccagcaggccttcgacatcatgaaggaggccatcggcaagctgctgctggccgccgaggtgttcagcgagaccagcaccctgggccccaagaccttccacagatgcagattctgcttccagctgctgaccttcgacatcggctacggcagcttcatgtaccccgtggtgctgcaggtgcacgagcacctgaacttccaggactacgacaacatggacttcgaggaccagaacaccgaggagttcctgctgaacgacaccttcaacttcctgttccccaacgagagcagcctgagcatcttcagcgagatcttccagagactgtacagaagcgacgtgttcaagggcgagaactaccagaaggagctgaaccagtgcctgagcctggaggagatcaacagcatcatgaccttcatcaaggagctgggcagcctgggccagttccagctgctgttccccagcaccacccccggcatccagagcctgatgcacgagttctacgacgtggccaaccccgtgggcaaccccggcagcgtgctgacccagtactggagcctgctgaacgtgttcgagcagttccagttcatgaacaagaagacccagccccaccccctggagtggaacagcttcaccgaggacaagaacatcgagaagccccaggtgcccttcgacgccatcgagaacaagaagtag

SEQ ID NO: 217408 - DNA, 3081 bp, Artificial Sequence
  derived and/or modified sequence
atggtctgtagacctgtatttccgtgtcgcagaaggttctgcccccgcccctttttggtggggcttgtagtggcaatatgcctgttctaccagactctcactctgcggggaagcaggaagctcacagccgccgcgcccggagctgtgccgcacacgagcaccgagacccaggcttcacggtgcaagaagggatttagccaagataaacagtgtttccttctgtctggcaatgcgcaggagactcgaaaggtaaaggagagtatggaaacccattttggctcacatggccggagggccatcctgtacaggccacccttctactcaaagacagagctgcaactgcatcaacacattttgacgcagcatggttacaccgtggttatcgccgaggagcggctcaacgccgggctgggaccaggactgttagagcagggggacctgggaagttgggatttgctgatctgcctctcctcgaaaaaagctgagggcaccccgtgcatcagtaaggaagtgatgtgccaactcggccttcaccaaaaagcaaacaggctgccagaaatccagcagcctctgtgtcgcaaggagggactctgtcagatcgttaggcgttttcctgagctccaactacccgttagtcctagcgtctgccttgatcagggaatgcaactaaaacccagtacgtcctctcatctgcttaagaccgtcaaacctagagtttggaagccgggggattggtcacgcgagcagcttaatgagactaccgtgttagcaccacatgagaccattttccgagcggaggacctatcagtgattctgaaggcctatgtcctggtgacctctctaacgcccctcagagccttcattcactctaccggtactgtctggaatcccccgaaaaagaagcgcttcacggttaagttgcagaccttttttgaaacattcctcagggcgagctccccccagcaagcgttcgatattatgaaagaggcgatcgggaaactgctcctggccgcagaagtttttagcgaaaccagtactcttgggcccaagacgttccaccgatgtaggttttgctttcagctgctgacatttgatatcggctacggctccttcatgtaccccgtggtgttgcaggttcatgaacatttaaacttccaggattacgacaacatggactttgaggatcagaacactgaggaatttttgctgaatgacactttcaacttcttgtttccaaatgagagttctctgtctatattctctgagatcttccagagactgtacaggtccgatgtgtttaaaggcgagaactatcagaaagagttgaatcagtgcctttccttagaggaaataaattccattatgacatttatcaaagagttgggatctctgggtcaattccagttactgtttccctcaacaacccccggcatccagtcactgatgcacgagttctacgacgtggcgaatcccgtggggaatcctgggtcggtgctaacacagtattggtcgctcttaaacgtcttcgagcagttccagttcatgaacaagaagacccagccccatcctctggagtggaactcgtttaccgaagataaaaacatcgagaaaccccaggtgccatttgatgctatcgagaacaaaaaggccgcagtgccacagataaaaaacgaaaacaaggaaattcactgcagcgacgacgagaacactccttgtcatatcaagcagattttcacacacccgcacctcgagcttaacccagattttcatcctaagataaaggattattattgcgaggtgcctttcgacgttgtgactgttaccattggggtggagacccctaaatgtttgtgcaaggttcacctatatgagcaggctgggccatccttcgcatcatatcctctgggcttaggtatgaacaaaatatcgatttttgtggtggacgaaagcccggctcacggcgaaacacttattacctataagctgaccatttatagggaagataggccatctttaccactgtttgaggccttcacggcgtgtggttttgtccaagattgtggactgctgatccatcctgaggaaacctgtggcctgcagccaatctccagtgactatattgaggcaatcctgcagtccgaactgaaaagatgccccagcggggacatgaaaggccagtggattgtcccctgtctcagttgtagtgataacaggacttgtgactggagagagattacctggcaaccgcataattgccagtacggtgtacttaccaagccccagctgcagcagtgtttaggaggccggaaaattctgtttattggtgactctacaaataggggaatcatgtactaccttattgagcgcctgaacgagactctccaggagtggcaaaaggtacatggaactaaattctaccacaatgttaacggcgggaagacactgatctcctatagctactaccctcagttttggatctcgcctagcctgaggccgacttttgagaacgctctggagcatctcctccaacgcagccggcccttggaaaatacagggcagactgttctcgtggtggggggtgtgcaatggctaaacagcaatcacttacaaatcattcataaggtgctcaagcgggaaaacctcctgaacatcctggtgatcatcaagactctgggtattgggttccatttgcccgtggatggagtgcattttctcacgcagtccgaagtacagaatttatggaaagaaaacctgataatcctcgacaccgcaaagaagcatggatacgaggttgtggacaccttcaccattaccatggggagatataaagagttcctgcaaggtaagtgcggatgccattttcacgaggttgtgaagagcaagctgtcaaaagaatataatttcatcaagatgaaaaggtctagaaaccatattatgggtcggtattttagcaatcagtccaaattacagcagggtaccgtcaccaattttagatccccttaccacgtgaggggccctatcaaccaggtatgtagcgaaattctgctgtcccggatgtgcgcgaacaagcggactatgtag

SEQ ID NO: 217409 - DNA, 1650 bp, Artificial Sequence
  derived and/or modified sequence
atggtttgccgccctgtgttcccatgccgtcgacgattttgcccccggccatttctggtaggactagtggtggccatctgcttgttctaccagaccctcaccctgcgcggatcgcgtaagttgacagctgcagccccaggcgctgtccctcatacttctactgaaactcaggccagtcgctgcaagaagggatttagccaagataagcagtgttttctgctgtccggaaacgcacaggagaccagaaaagtcaaggaatctatggagacacactttggttcacacggacgccgcgcaattctttacaggccccccttctactcaaagacagagttgcaactgcatcagcacatcttgacacagcatgggtatactgtcgtcattgctgaagagagactcaacgcaggattaggccccgggttgttggagcagggggaccttggctcttgggacctgctgatttgcctgtcctcgaagaaggcagaagggactccctgcatcagcaaagaggtgatgtgccagctgggattgcaccagaaagccaacagactgcccgaaatacagcagccgttatgtagaaaggaaggattgtgccaaatagttcgccgtttcccagagcttcagctgcctgtatcaccctctgtctgtctagatcagggcatgcagctgaagcccagcacctcaagtcatctacttaaaacagtaaagccccgcgtgtggaaaccaggcgactggagtcgcgaacaacttaacgagacaaccgtgctggcaccacacgagactatcttcagagcggaagatctcagcgtaatattgaaggcttatgtcctggtaacctctctgacacccctgcgagcctttatccactccactggaactgtctggaatccacccaagaagaaacggtttacagttaaacttcaaactttttttgaaacttttctcagagccagtagtcctcaacaagcattcgacatcatgaaggaggctattggaaagcttctcttagcagccgaagttttcagtgagacgagcactctgggcccaaagactttccataggtgcagattttgcttccagctgctcacattcgatatcggatacggcagcttcatgtaccccgttgtactccaggtacatgaacatctaaactttcaggactacgataacatggattttgaggatcagaatactgaagagttcttgctgaacgatactttcaacttcttgtttccaaacgaaagtagtctgtccatattttccgaaatcttccagcgcctgtatcggtcggacgtgttcaaaggcgagaattatcagaaggagttgaaccagtgcctcagtttagaagagataaattcaatcatgacctttatcaaggaacttggctcactgggccaattccagttactcttcccttccaccaccccgggtatccagtcattgatgcacgagttttacgacgttgccaacccagttgggaatccaggatcggttctcacccagtattggagcctactgaacgtcttcgagcagtttcaattcatgaacaaaaagactcagcctcacccactggagtggaactctttcactgaggataaaaatattgagaaaccacaggtgcccttcgacgctatcgaaaataagaaatag

SEQ ID NO: 217410 - DNA, 3081 bp, Artificial Sequence
  derived and/or modified sequence
atggtgtgcaggcctgtgttcccctgcagaagacgcttctgcccccggcccttcctggtgggcctggtggtggccatctgcctcttctaccagaccctgaccctgcggggcagcaggaagctgacagctgctgcccctggagctgtgccccacaccagcacagagacccaggccagccgctgcaagaagggcttcagccaggacaagcagtgcttcctgctgtctggaaatgcccaggagaccaggaaggtgaaggagagcatggagacccacttcggcagccatggaagaagagccatcctgtaccggccccccttctacagcaagacagagctgcagctgcaccagcacatcctgacccagcacggctacacagtggtgattgctgaggagcggctgaatgccggcctgggccctggcctgctggagcagggcgacctgggctcctgggacctgctgatctgcctgagcagcaagaaggccgagggcaccccctgcatcagcaaggaggtgatgtgccagctgggcctgcaccagaaggccaaccggctgcctgagatccagcagcccctgtgcaggaaggagggcctgtgccagatcgtgcggcgcttccctgagctgcagctgcctgtgagccccagcgtgtgcctggaccagggcatgcagctgaagcccagcaccagcagccacctgctgaagacagtgaagccccgggtgtggaagccaggggactggagccgggagcagctgaatgagaccaccgtgctggcccctcatgagaccatcttccgggcagaggacctgagcgtcatcctgaaggcctacgtgctggtgaccagcctgacccccctgcgggccttcatccacagcactggaacagtgtggaacccccccaagaagaagcgcttcaccgtgaagctgcagaccttctttgagaccttcctgcgggccagcagcccccagcaggcctttgacatcatgaaggaggccatcggcaagctgctgctggccgctgaggtgttcagcgagaccagcaccctgggccccaagaccttccaccgctgccgcttctgcttccagctgctgacctttgacatcggctacggcagcttcatgtaccctgtggtgctgcaggtgcatgagcacctgaacttccaggactatgacaacatggactttgaggaccagaacacagaggagttcctgctgaatgacaccttcaacttcctgttccccaatgaaagcagcctgagcatcttcagcgagatcttccagaggctgtacagaagtgatgtgttcaagggggagaactaccagaaggagctgaaccagtgcctgagcctggaggagatcaacagcatcatgaccttcatcaaggagctgggcagcctgggccagttccagctgctcttccccagcaccaccccaggcatccagagcctgatgcatgagttctatgatgtggccaaccctgtgggcaaccctggctctgtgctgacccagtactggagcctgctgaatgtgtttgagcagttccagttcatgaacaagaagacccagccccaccccctggagtggaacagcttcacagaggacaagaacatcgagaagccccaggtgccctttgatgccatcgagaacaagaaggctgctgtgccccagatcaagaatgaaaacaaggagatccactgcagtgatgatgagaacaccccctgccacatcaagcagatcttcacccacccccacctggagctgaacccagacttccaccccaagatcaaggactactactgtgaggtgccctttgatgtggtgacagtgaccatcggcgtggagacccccaagtgcctgtgcaaggtgcacctgtatgagcaggccggccccagctttgccagctaccccctgggcctgggcatgaacaagatcagcatctttgtggtggatgagagccctgcccatggagagaccctcatcacctacaagctgaccatctacagagaagatcggcccagcctgcccctgtttgaggccttcaccgcctgtggctttgtgcaggactgtggcctgctgatccaccctgaggagacctgtggcctgcagcccatcagcagtgactacatcgaggccatcctgcagagcgagctgaagcgctgccccagcggggacatgaagggccagtggatcgtgccctgcctgagctgcagcgacaacagaacctgtgactggagggagatcacctggcagccccacaactgccagtatggagtgctgaccaagccccagctgcagcagtgcctgggcggcaggaagatcctcttcatcggggacagcaccaacagaggcatcatgtactacctgattgagcggctgaatgagaccctgcaggagtggcagaaggtgcacggcaccaagttctaccacaacgtgaatggaggcaagaccctcatctcctacagctactacccccagttctggatcagccccagcctgcggcccacctttgaaaatgccctggagcacctgctgcagaggagccggcccctggagaacacaggccagacagtgctggtggtgggcggcgtgcagtggctgaacagcaaccacctgcagatcatccacaaggtgctgaagcgggagaacctgctgaacatcctggtgatcatcaagaccctgggcatcggcttccacctgcctgtggatggagtgcacttcctgacccagagcgaggtgcagaacctgtggaaggagaacctgatcatcctggacacagccaagaagcacggctatgaggtggtggacaccttcaccatcaccatgggccgctacaaggagttcctgcagggcaaatgtggctgccacttccacgaggtggtgaagagcaagctgagcaaggagtacaacttcatcaagatgaagaggagcaggaaccacatcatgggccgctacttcagcaaccagagcaagctgcagcagggcaccgtgaccaacttccgcagcccctaccacgtgcggggccccatcaaccaggtgtgcagcgagatcctgctgagcaggatgtgtgccaacaagaggaccatgtag

SEQ ID NO: 217411 - DNA, 1650 bp, Artificial Sequence
  derived and/or modified sequence
atggtgtgcaggcctgtgttcccctgcagaagacgcttctgcccccggcccttcctggtgggcctggtggtggccatctgcctcttctaccagaccctgaccctgcggggcagcaggaagctgacagctgctgcccctggagctgtgccccacaccagcacagagacccaggccagccgctgcaagaagggcttcagccaggacaagcagtgcttcctgctgtctggaaatgcccaggagaccaggaaggtgaaggagagcatggagacccacttcggcagccatggaagaagagccatcctgtaccggccccccttctacagcaagacagagctgcagctgcaccagcacatcctgacccagcacggctacacagtggtgattgctgaggagcggctgaatgccggcctgggccctggcctgctggagcagggcgacctgggctcctgggacctgctgatctgcctgagcagcaagaaggccgagggcaccccctgcatcagcaaggaggtgatgtgccagctgggcctgcaccagaaggccaaccggctgcctgagatccagcagcccctgtgcaggaaggagggcctgtgccagatcgtgcggcgcttccctgagctgcagctgcctgtgagccccagcgtgtgcctggaccagggcatgcagctgaagcccagcaccagcagccacctgctgaagacagtgaagccccgggtgtggaagccaggggactggagccgggagcagctgaatgagaccaccgtgctggcccctcatgagaccatcttccgggcagaggacctgagcgtcatcctgaaggcctacgtgctggtgaccagcctgacccccctgcgggccttcatccacagcactggaacagtgtggaacccccccaagaagaagcgcttcaccgtgaagctgcagaccttctttgagaccttcctgcgggccagcagcccccagcaggcctttgacatcatgaaggaggccatcggcaagctgctgctggccgctgaggtgttcagcgagaccagcaccctgggccccaagaccttccaccgctgccgcttctgcttccagctgctgacctttgacatcggctacggcagcttcatgtaccctgtggtgctgcaggtgcatgagcacctgaacttccaggactatgacaacatggactttgaggaccagaacacagaggagttcctgctgaatgacaccttcaacttcctgttccccaatgaaagcagcctgagcatcttcagcgagatcttccagaggctgtacagaagtgatgtgttcaagggggagaactaccagaaggagctgaaccagtgcctgagcctggaggagatcaacagcatcatgaccttcatcaaggagctgggcagcctgggccagttccagctgctcttccccagcaccaccccaggcatccagagcctgatgcatgagttctatgatgtggccaaccctgtgggcaaccctggctctgtgctgacccagtactggagcctgctgaatgtgtttgagcagttccagttcatgaacaagaagacccagccccaccccctggagtggaacagcttcacagaggacaagaacatcgagaagccccaggtgccctttgatgccatcgagaacaagaagtag

SEQ ID NO: 217412 - DNA, 3081 bp, Artificial Sequence
  derived and/or modified sequence
atggtgtgccggcccgtgttcccctgccggcggcggttctgcccccgaccgttcctggtcgggctcgtggtagctatatgtttattctaccagacacttacccttcggggctctcggaagctcactgctgccgccccaggcgccgtgccacatacttcaactgaaacgcaagcttcccggtgcaaaaaaggcttctctcaagacaaacaatgtttccttctgtcagggaacgcacaagagactcggaaagtgaaagaatctatggaaacccacttcggaagccacggccgcagagctatcctgtacaggcctcccttttattcaaaaaccgagctgcagttacaccaacacatcctgacacagcacggttacactgtcgtgattgctgaggaaaggcttaacgctggcctgggacccggccttctggagcagggcgacctgggttcctgggaccttttaatatgcttgagttccaagaaggcagaaggaaccccttgtatctccaaagaagtgatgtgtcaattaggactacaccagaaagcaaatcgcctccccgaaatccaacaacccctgtgtcgcaaagaggggttatgccagattgtgaggcggtttcctgaattgcagctgcccgtctctccaagtgtctgtctggaccaaggtatgcagctgaagcctagcactagctctcatctgcttaaaacagtgaaaccaagagtttggaaacccggggactggtccagagagcagcttaatgaaaccaccgtgctagcgccccatgagaccatatttagggcagaggacttgagtgtgatactgaaagcctacgtcctggtgaccagtctgacacccctccgcgcctttatacacagtacagggaccgtgtggaacccccctaagaagaagcggttcaccgttaaactgcagacttttttcgagaccttcttaagggcatcatccccacagcaggctttcgatatcatgaaagaggcaatcggcaaactgctgttagctgctgaagtgttcagcgagacaagcactttgggaccaaagacctttcatcgctgtagattttgtttccagctgcttacctttgatatcggatatgggtccttcatgtatccggttgtcttacaagtccacgagcacctgaactttcaggactatgacaacatggactttgaggatcagaacactgaagagtttctcttgaatgatactttcaatttcctgtttcccaacgagtcttcattatctattttcagcgagatttttcagaggctatacagaagtgatgttttcaagggcgaaaactaccagaaagaactcaaccagtgtctcagccttgaggaaataaactctataatgactttcataaaggagctcgggagtctgggccagtttcagctcttgttcccgagtaccacaccaggcatccagagtctgatgcatgaattttacgacgtggcgaatcccgtaggcaacccaggcagcgtgcttacgcagtactggagcttgctaaatgtcttcgaacagttccagttcatgaataagaagacccagccccaccctctggaatggaactcatttacagaagataagaacattgagaaaccccaggttcccttcgacgctatcgaaaacaaaaaagccgcagtaccacagatcaaaaatgagaataaagaaatacactgttcagatgatgaaaacacaccctgccacattaagcagatatttacacaccctcatctggaactgaatcctgatttccacccaaagatcaaggattattattgcgaggtcccatttgatgtcgtgactgtgaccatcggcgtggagacacctaagtgcctgtgcaaggtacacttgtacgaacaggcaggccctagctttgcaagctaccccctgggcttgggcatgaataaaatatccatcttcgtcgtggatgaaagtcccgctcacggcgagacactcatcacgtacaagctcactatctacagagaagatcgcccatcacttccccttttcgaagcgtttacagcctgtgggttcgttcaggactgtggtcttttaatccaccctgaagagacctgtggtctgcagcctattagctctgactatattgaagcaatccttcagagtgaacttaagagatgtccaagcggcgacatgaagggccagtggatcgtgccctgtcttagttgctctgacaaccggacttgcgattggcgcgagatcacatggcaaccgcataattgccagtacggcgtcctgacaaaaccccagttacagcagtgtcttggcggtcgcaaaatcctgttcatcggagatagtacaaatcggggcatcatgtattaccttatcgagcgcttgaacgagaccctgcaggaatggcagaaggtgcatgggacaaaattttatcacaatgtgaacggtggcaaaacactaattagctattcttactacccgcagttctggataagtccctcattgagacctacctttgagaacgccctggaacaccttctacaaaggagtaggcccctggagaatacagggcagactgtcctggtggtaggtggagtacagtggctcaattctaatcacctgcagataatccacaaagtgctgaagcgggaaaatctcctcaacatccttgtaataattaagactttaggtatcggattccacctacccgtggacggggtccattttctcacccaatctgaagtccagaatctctggaaggaaaatctgatcatactggataccgcaaaaaagcacggctatgaggttgtggataccttcaccatcaccatgggaaggtacaaggaattccttcagggtaagtgcggctgccactttcacgaggtggttaagagtaaactctcaaaagagtacaactttatcaaaatgaaaaggtcacggaatcatattatggggcgatacttcagtaatcagagcaaactgcagcaggggacagtgactaattttagatccccatatcacgtgagggggcctattaaccaggtgtgctccgagatcctgctctcaagaatgtgtgctaacaaacgcacaatgtag

SEQ ID NO: 217413 - DNA, 1650 bp, Artificial Sequence
  derived and/or modified sequence
atggtgtgccggcccgtgttcccctgccggcggcggttctgcccccgtccctttctggtgggattggtcgtagccatctgccttttctatcagaccctcacgcttcgcggtagccggaagctgacagccgcggctcctggagccgtgccgcacacatcaacagaaacgcaggcttccaggtgtaaaaaggggttttcacaagacaaacagtgcttcctgctgagtggaaacgcccaagagactcgcaaggtgaaggagtccatggaaacccattttggatcacatggccgaagggcaattctttatcggcctccgttctactccaaaaccgagctgcaactccatcagcacattctgacacagcacgggtatacagtcgtaattgcagaggaacgccttaatgcaggcttgggccccggtcttctggagcagggcgacctgggaagttgggatctgctgatctgtctgtccagtaaaaaggcggaagggacgccttgtatttccaaggaagttatgtgtcagctcggcctacaccagaaggctaaccgactgcccgagattcagcagcccctctgccggaaggaaggactgtgtcagattgtaaggaggtttcccgagcttcagttaccagtaagcccatctgtctgccttgaccaaggcatgcagctcaagccttctacttccagccatctcttgaagaccgtgaagcctagagtgtggaagcccggcgattggtctagagaacagctcaacgagacaacagtgctcgccccccatgagactatctttagggccgaggacctgtctgtgatactcaaagcctacgtgcttgttacgtcactaacacccctgcgcgcatttatccattctaccggaaccgtatggaacccccctaaaaagaagcggttcaccgtcaagctccagacatttttcgaaacattcctacgcgctagcagcccccaacaagccttcgacatcatgaaggaggctataggtaagcttctgctcgccgcagaggtgttttccgagacaagcacactcggccctaaaaccttccacagatgccgattctgctttcagctgttgacatttgacatcgggtacggatccttcatgtacccggtggtgctgcaggtgcacgaacacctgaactttcaggactacgacaacatggactttgaagaccagaataccgaggagttcctgcttaacgataccttcaactttctgttccccaatgaatcaagcctgtctatctttagtgagatctttcagagactttatcgttccgacgtgtttaagggggaaaactaccaaaaggagctaaatcagtgtttgtcactggaagagattaattctattatgacgtttatcaaggagctgggatccttgggccaattccaactgctgttccccagtaccaccccgggaattcagagcctgatgcacgaattttacgacgtagccaacccagtcggtaatcctggctcggtcctgacccagtattggtccttattaaacgtgtttgaacagttccagttcatgaacaagaagacgcaaccccacccgctcgagtggaatagtttcaccgaggacaagaacattgaaaagccccaagtaccctttgatgccattgagaacaaaaagtag

SEQ ID NO: 217414 - DNA, 3081 bp, Artificial Sequence
  derived and/or modified sequence
atggtgtgtcggcctgtgtttccatgtcggagacgattctgtcctcggccattcctagttgggctcgttgtcgcgatctgcctgttttaccagaccctgactcttagggggagtcggaaactgactgctgctgcaccaggcgctgtgccccacacatccaccgagactcaagcaagcaggtgcaagaaaggctttagccaggataagcagtgctttctgctgagcggcaatgcccaggaaactcgaaaagtcaaggagtctatggaaactcacttcggcagccacggcaggagggccatactctacagaccacctttttacagcaaaacagagctccagctccatcagcacattttaacgcaacacggatacactgttgtcattgccgaggagcgccttaatgcagggttgggccctggactactggaacaaggagatttaggaagctgggacctgcttatttgtctgagttccaagaaggccgagggaactccgtgcatcagtaaagaagtgatgtgccagcttggactacatcagaaagcaaaccgtctgcccgagattcagcaacctctgtgtcgaaaagagggtttgtgccaaatagttcgtcgctttcctgagttacaacttcctgtgtcccccagcgtttgcttagaccagggcatgcaactcaagccatccaccagcagtcatctgctgaaaacagttaagccacgcgtgtggaagcctggggactggtcacgtgaacagctgaatgaaaccacggtactagcccctcacgaaacaatatttcgcgcagaggacctcagtgtcatcctcaaggcatacgtcttagtgacttccctaacaccgttgagagccttcatacactccactggaaccgtgtggaatcctcccaagaagaaaaggtttacagtaaaactgcagaccttcttcgaaacctttctgagagcctccagtccgcaacaggcgttcgatatcatgaaagaagccatcgggaagttgctgctcgctgccgaggtgttttcagagacttcaactttgggacccaagacattccacaggtgcaggttttgtttccaactcttgacattcgacattggttacggcagttttatgtaccccgtggtcctgcaagtgcatgagcatctaaattttcaggactacgacaacatggacttcgaagaccagaacaccgaggagttcctcttgaacgatactttcaactttctcttccccaacgagtcatccctatccatcttcagcgaaatctttcagaggctataccggtccgacgtgttcaagggagagaattatcagaaagagctcaatcagtgcctttcgctggaggagatcaattctatcatgacattcattaaggagctcggtagcctgggccagttccaactcctgttccccagtaccacgccgggaatacagtcccttatgcacgaattctatgatgttgccaatccagttgggaacccgggatccgtgctgacgcagtattggagcctgctgaacgtttttgagcagtttcagttcatgaacaaaaaaacacagccccatcctttggagtggaacagcttcactgaagacaagaacattgaaaagcctcaggtgccgtttgatgccattgagaataaaaaggctgcggtgccacagatcaaaaatgagaataaagagatacactgttccgatgacgagaataccccatgtcatattaagcagatctttacgcacccccacctggaactgaatcccgattttcaccctaaaatcaaggactattattgtgaagtgccattcgatgtagttactgtaacaataggcgtcgaaacgcccaagtgtctctgtaaggtccacctctatgaacaggccggacctagctttgcttcctatcctttagggctggggatgaataagatatcaatttttgtggttgacgagtctcccgctcatggggagactctcatcacctataagctcaccatttacagggaggatagaccaagcctgccactcttcgaggcctttaccgcctgtggatttgtccaagactgcggactgctgatccacccggaggagacctgtgggctgcagcccatctcgagcgattacattgaagccatcctccagagcgagttgaaacgttgtccctccggagatatgaagggccaatggattgttccgtgcctgagctgtagtgataaccgcacttgtgactggcgggaaatcacctggcagccgcacaactgccagtatggtgtgcttacaaagccacagctgcaacagtgtctagggggtagaaagatcctgtttatcggcgactccacaaacagaggtattatgtactacctcatcgagcggttgaatgaaacactgcaggagtggcaaaaagtccacggaacaaagttctatcacaatgtgaatggaggtaaaacactgattagttattcatattatccccagttttggatctccccatctctgagaccaacgttcgagaacgctctggaacatttgctgcagcgctctcgccctctcgaaaatactggacagactgtgctcgttgtgggtggcgtacaatggctcaatagtaatcacctgcagattattcataaggtcttaaagcgcgagaatctgctgaatatcctggtaatcattaagacgctggggatcggctttcaccttccagttgacggggtgcacttcctcacacaatctgaagttcagaatctttggaaagaaaatctgatcatactagacacagccaaaaaacatggctacgaggtggtggacacattcacaattaccatgggaaggtataaggagtttctccagggcaagtgcgggtgtcatttccacgaggtggtcaagagtaagctatccaaggagtataatttcattaaaatgaagcgaagtaggaatcatataatgggcagatattttagcaatcagtccaaactccagcagggtacagtgacaaacttcagaagtccctatcacgtgagaggacctataaaccaggtctgttcggaaatacttctgagtcgcatgtgcgcaaacaagcggactatgtag

SEQ ID NO: 217415 - DNA, 1650 bp, Artificial Sequence
  derived and/or modified sequence
atggtatgccggcctgtatttccatgcaggagacgattttgccctcgccctttcctagtcggtctcgtggttgcaatttgtcttttctaccagacactcaccctccggggttccaggaaactgactgccgctgctccgggtgcagtgcctcatacatcaactgagacccaggcctctcgctgcaagaagggcttctctcaggataagcagtgctttttgctatccggtaatgcgcaggagaccagaaaggtgaaggagtccatggagacccatttcgggtcccatgggagaagggctatcctttacagacccccattttattccaaaactgagttacagctgcaccagcatatcctgacccagcacgggtacacggtggttattgcggaggagagactaaacgctggactggggcctggcctcctggagcaaggagatttgggctcttgggacctactgatctgtctttccagcaagaaggccgaagggacgccttgtatctctaaagaggtgatgtgtcagctcggcctgcatcagaaggccaatcgactgcccgaaattcaacagcctctctgccggaaggaaggtctgtgccagatagtccgcagatttcccgaattgcagcttccagtatctccttctgtttgcctggaccaaggcatgcagctgaagccgagtacctcctctcatctcctaaaaactgttaaacctcgggtgtggaaacccggagattggagcagggaacagctcaatgagaccacagtacttgctccccatgaaactatctttagagcagaggacctgagtgtgattctgaaagcatacgtgctcgtcacaagtctgacgccactccgggcatttatacactctaccggcacagtttggaacccacccaaaaagaaacgctttacggtgaaacttcaaaccttctttgagactttcctccgggcatcatccccgcaacaggccttcgacatcatgaaggaagcaataggtaagctcctactggctgccgaggtgttttccgaaaccagtaccttggggccaaagactttccaccggtgtagattttgctttcagctcttaacttttgacatcggctatgggagcttcatgtaccctgtggttctgcaagtacacgagcacttgaattttcaggactacgataacatggattttgaggatcagaacaccgaggagtttttacttaatgataccttcaattttctgttccctaatgagtctagtctgagcatcttttctgagatttttcagcgcttgtacaggtcagacgttttcaagggggaaaattaccagaaagaattgaaccagtgcctttccctggaggagattaacagcatcatgacgtttataaaggaactcggctcgctgggacagttccaactcttatttcctagtaccacaccaggcatccagtcactgatgcacgaattctatgacgtagccaaccctgttggcaatcccggttccgtgctcacgcaatattggagtctgttgaacgtattcgaacaattccaatttatgaacaagaaaactcaaccccaccctctggaatggaactctttcaccgaagataaaaacatagagaaaccccaagtgccctttgacgcaatcgagaataaaaagtag

SEQ ID NO: 217416 - protein, 625 aa, Artificial Sequence
  derived and/or modified sequence
MSQESDNNKRLVALVPMPSDPPFNTRRAYTSEDEAWKSYLENPLTAATKAMMSINGDEDSAAALGLLYDYYKVPRDKRLLSVSKASDSQEDQEKRNCLGTSEAQSNLSGGENRVQVLKTVPVNLSLNQDHLENSKREQYSISFPESSAIIPVSGITVVKAEDFTPVFMAPPVHYPRGDGEEQRVVIFEQTQYDVPSLATHSAYLKDDQRSTPDSTYSESFKDAATEKFRSASVGAEEYMYDQTSSGTFQYTLEATKSLRQKQGEGPMTYLNKGQFYAITLSETGDNKCFRHPISKVRSVVMVVFSEDKNRDEQLKYWKYWHSRQHTAKQRVLDIADYKESFNTIGNIEEIAYNAVSFTWDVNEEAKIFITVNCLSTDFSSQKGVKGLPLMIQIDTYSYNNRSNKPIHRAYCQIKVFCDKGAERKIRDEERKQNRKKGKGQASQTQCNSSSDGKLAAIPLQKKSDITYFKTMPDLHSQPVLFIPDVHFANLQRTGQVYYNTDDEREGGSVLVKRMFRPMEEEFGPVPSKQMKEEGTKRVLLYVRKETDDVFDALMLKSPTVKGLMEAISEKYGLPVEKIAKLYKKSKKGILVNMDDNIIEHYSNEDTFILNMESMVEGFKVTLMEI

SEQ ID NO: 217417 - protein, 609 aa, Artificial Sequence
  derived and/or modified sequence
MPSDPPFNTRRAYTSEDEAWKSYLENPLTAATKAMMSINGDEDSAAALGLLYDYYKVPRDKRLLSVSKASDSQEDQEKRNCLGTSEAQSNLSGGENRVQVLKTVPVNLSLNQDHLENSKREQYSISFPESSAIIPVSGITVVKAEDFTPVFMAPPVHYPRGDGEEQRVVIFEQTQYDVPSLATHSAYLKDDQRSTPDSTYSESFKDAATEKFRSASVGAEEYMYDQTSSGTFQYTLEATKSLRQKQGEGPMTYLNKGQFYAITLSETGDNKCFRHPISKVRSVVMVVFSEDKNRDEQLKYWKYWHSRQHTAKQRVLDIADYKESFNTIGNIEEIAYNAVSFTWDVNEEAKIFITVNCLSTDFSSQKGVKGLPLMIQIDTYSYNNRSNKPIHRAYCQIKVFCDKGAERKIRDEERKQNRKKGKGQASQTQCNSSSDGKLAAIPLQKKSDITYFKTMPDLHSQPVLFIPDVHFANLQRTGQVYYNTDDEREGGSVLVKRMFRPMEEEFGPVPSKQMKEEGTKRVLLYVRKETDDVFDALMLKSPTVKGLMEAISEKYGLPVEKIAKLYKKSKKGILVNMDDNIIEHYSNEDTFILNMESMVEGFKVTLMEI

SEQ ID NO: 217418 - protein, 625 aa, Artificial Sequence
  derived and/or modified sequence
MGKDGRSNKRLVALVPMPSDPPFNTRRAYTSEDEAWKSYLENPLTAATKAMMSINGDEDSAAALGLLYDYYKVPRDKRLLSVSKASDSQEDQEKRNCLGTSEAQSNLSGGENRVQVLKTVPVNLSLNQDHLENSKREQYSISFPESSAIIPVSGITVVKAEDFTPVFMAPPVHYPRGDGEEQRVVIFEQTQYDVPSLATHSAYLKDDQRSTPDSTYSESFKDAATEKFRSASVGAEEYMYDQTSSGTFQYTLEATKSLRQKQGEGPMTYLNKGQFYAITLSETGDNKCFRHPISKVRSVVMVVFSEDKNRDEQLKYWKYWHSRQHTAKQRVLDIADYKESFNTIGNIEEIAYNAVSFTWDVNEEAKIFITVNCLSTDFSSQKGVKGLPLMIQIDTYSYNNRSNKPIHRAYCQIKVFCDKGAERKIRDEERKQNRKKGKGQASQTQCNSSSDGKLAAIPLQKKSDITYFKTMPDLHSQPVLFIPDVHFANLQRTGQVYYNTDDEREGGSVLVKRMFRPMEEEFGPVPSKQMKEEGTKRVLLYVRKETDDVFDALMLKSPTVKGLMEAISEKYGLPVEKIAKLYKKSKKGILVNMDDNIIEHYSNEDTFILNMESMVEGFKVTLMEI

SEQ ID NO: 217419 - DNA, 1878 bp, Artificial Sequence
  derived and/or modified sequence
atgtcacaggaatcagacaataataaaaggcttgtggccttagtgccgatgccgtccgatccccctttcaacacaaggcgagcctatacatccgaagacgaagcctggaagagctacttggaaaatccgctcactgctgcaaccaaggctatgatgtccattaatggcgacgaagactccgctgcggcactgggtctgctatatgactactacaaggttcctcgcgataaacgactgctctctgtgtcaaaggcaagtgattcacaggaggatcaggaaaagcgaaattgtctggggacctctgaggcccaaagtaatctgtctggaggcgaaaaccgggtccaggttttaaagaccgtgcctgtcaaccttagcctgaaccaagatcatttggaaaactccaaaagggaacagtactcaatctccttccctgaatcaagcgctattatcccagtgtctggaatcactgtcgtcaaagccgaagactttacccccgtttttatggctcccccggtccattaccctcggggcgacggcgaggagcagcgcgtggtgatctttgaacagacacaatatgacgtgccaagcttggcaacccactcagcatacctcaaggacgaccagaggtctacccccgattcaacgtatagtgaaagctttaaggacgccgctaccgagaaatttcgctctgcatccgtaggtgcagaggagtatatgtacgaccagacatccagtggcacctttcagtatacccttgaggccaccaaatccctgcgtcagaagcaaggagagggccccatgacctatctgaacaagggacagttttatgccattactctgtcagagaccggcgataataaatgctttagacaccctatatccaaagtccggagcgtggtgatggtggtgtttagcgaagataagaacagagatgaacaactcaaatattggaaatactggcactcacgacagcacacagcaaagcaaagagtgctggatattgccgattataaggagtcatttaacaccatcggaaacattgaggaaatcgcctacaacgccgtgagtttcacctgggacgtgaacgaggaggcaaaaatttttattactgtgaattgcttatcaactgatttctctagccaaaaaggagtgaaaggccttccacttatgatccagatagacacctattcttacaataaccggtctaacaaacccatccacagagcatattgtcagatcaaagtgttttgtgataagggagctgaaaggaagataagagacgaagagaggaaacagaacaggaagaaaggcaagggccaagcctctcagacccagtgcaactcctcgtcagacggtaaattggcagccattcccctgcagaagaaatcagacatcacctatttcaaaacgatgcctgatttacattctcagcctgtgttgtttattccagatgtccattttgctaacctccagcgcacaggtcaggtctactacaacacagacgacgaacgcgagggaggcagcgttcttgtgaagaggatgttcagacccatggaggaggagtttgggcctgtgccaagtaaacagatgaaggaagaggggaccaagcgtgtcctgctctacgtaaggaaagagacagacgacgtgttcgacgccctcatgctaaagtcacctacggtcaagggactgatggaggcaataagtgagaagtacgggctgcccgtggaaaaaattgctaagctctataaaaaaagcaaaaaaggcatactggtcaatatggatgataatataatcgaacattattccaatgaggatacgtttattttgaacatggaatctatggtggaggggttcaaagtaactctgatggaaatttag

SEQ ID NO: 217420 - DNA, 1830 bp, Artificial Sequence
  derived and/or modified sequence
atgccctcggacccccccttcaacacccgccgggcttacactagcgaggatgaggcttggaaaagttacctggaaaatcctctgaccgctgcgaccaaggctatgatgtcaatcaacggtgacgaggactccgctgccgctttgggtcttttgtatgactactataaggtcccaagggataaaagactactttccgtctctaaggcaagtgatagccaggaagatcaagaaaaacggaactgcctcgggacctccgaagcccaaagcaacctttctggcggcgaaaatagggtccaggtacttaagacagtgccagttaaccttagtcttaaccaggaccacctggaaaactccaagcgcgaacagtattctatttcattcccggagtccagcgccatcattccggtcagtggaattaccgtcgtgaaggcggaggactttacaccagtgtttatggcccctcccgtccattaccctcggggggacggggaggagcagagggtcgtaatttttgaacaaacccagtatgacgtgccttcattggcaactcacagcgcgtacctgaaagacgatcagcgttctacccccgactccacatacagtgagtcattcaaagacgctgctacggagaagttccgctcagcaagtgtcggggcggaggagtatatgtacgatcaaacttcttctggtacctttcaatatactttggaggccacaaaaagcctcaggcagaaacagggggagggaccgatgacctacttaaacaaagggcagttctatgccattacgctctcagagaccggagataataaatgctttcgacaccccatctcaaaggtgcggagtgtggtcatggtggtattttccgaggacaaaaatagggacgaacagctgaaatattggaagtattggcactctcggcagcacactgccaagcagagggtattagacatcgctgactataaagagtcatttaacactattgggaacatcgaggagattgcttataacgctgtctcttttacctgggacgttaatgaagaagcgaagatcttcataacagtgaactgcctgtctactgatttctcttctcagaaaggagtgaagggactgcctttaatgattcaaattgatacgtactcctataacaaccggagcaataagcccatccacagagcttactgccaaataaaggtgttttgcgacaagggtgctgaacgcaagatcagggacgaagagcgtaagcagaatcgcaaaaaggggaaggggcaggcctctcagacccaatgcaattcatcaagcgacgggaagctcgcagccatcccgttgcagaaaaagtctgacatcacgtacttcaaaaccatgcctgatctccactcgcaacctgtgttatttatcccagatgtgcatttcgccaacctccaacggactggtcaggtttattacaacacagatgacgaacgcgagggaggatctgtcttagtaaagcgcatgttcagacctatggaggaggagtttggacctgtccctagtaagcagatgaaggaggaaggtactaaacgcgtactgctgtatgtcagaaaggagacagatgatgtctttgacgccctgatgcttaagagtcctacggtgaagggcctgatggaggctatttcagagaagtacggtttgcccgttgagaagatcgctaagctctataagaaaagtaagaaaggtattttggtcaatatggacgataatatcattgagcattactccaacgaggacacattcattctcaacatggagagcatggtagaagggttcaaagtgactctcatggagatttag

SEQ ID NO: 217421 - DNA, 1878 bp, Artificial Sequence
  derived and/or modified sequence
atgggtaaagatggaagatcaaataaacggctggttgccttggtgcctatgccctccgacccgccatttaatacccgacgcgcctatacaagtgaggatgaagcctggaagagctatctggagaatccattgacagccgcaactaaagcgatgatgtccatcaacggggatgaagactccgctgccgccctgggccttctatacgactattacaaggtacccagagacaaaaggctgttgtcggtgagcaaggcaagcgacagtcaggaagatcaagaaaagcgcaactgtctggggacttcagaggcccagtccaaccttagcggtggcgagaatagggtccaggtgcttaagaccgtgccagtgaatttgagccttaaccaggatcacctggaaaacagcaaaagggagcagtactctatcagtttccccgagtcatccgccatcattcctgtgtctggcataaccgtggtgaaggccgaggatttcacccccgtgttcatggcgccccccgtccactatccacgaggcgatggggaggagcagcgcgtggttatttttgagcagacacagtacgatgtgccttcactagccactcacagcgcatacctgaaggacgatcagcgaagtacccccgactcaacttatagtgagtcgttcaaggatgccgccactgagaagtttcgcagtgcctcagtgggcgccgaagagtatatgtatgaccagactagcagcggtacctttcaatacactctggaggccacgaagtccttgagacagaagcagggggaagggccgatgacctacctgaataaaggacagttttatgcgatcactctttcagagacaggtgacaacaagtgcttccggcatccaatatccaaggtccgaagcgtggtgatggtggtgttctccgaggataagaacagagacgaacagctaaagtattggaagtattggcattcccggcagcacaccgccaagcagagagtgttggacattgccgactataaggagtcttttaataccatcggaaacatcgaggagatcgcctataatgccgttagcttcacgtgggatgtgaacgaggaagcaaagattttcattactgtgaactgccttagcacagatttttcaagccagaaaggagttaagggcctgcctttgatgatccagatcgatacctattcctacaacaatcgatctaacaagcccatccatcgcgcatactgccaaataaaagttttctgtgacaagggagccgagcggaagatacgcgacgaggaaaggaaacaaaaccggaaaaagggaaagggccaggcttcacagacccaatgcaacagttcttctgatgggaagctggccgcgatccctctacaaaaaaagagtgatatcacctattttaagaccatgcccgatctccactcccagcctgtactgttcatccccgatgtgcactttgccaatttacagagaacaggccaggtgtattacaacacggacgacgagagagaggggggaagcgtcttggtgaaacgcatgtttagaccaatggaagaggaattcggccccgttcccagcaaacagatgaaggaagagggcaccaaaagggtgctgctgtatgtacgaaaggagacggacgatgtattcgatgcccttatgctgaagagtcctactgtcaagggactcatggaggcaattagtgaaaaatacgggctgcctgtggagaagatcgctaagctatacaagaagtctaagaaagggattctggtgaacatggacgacaacatcatcgagcactatagtaatgaagatacgttcatcctcaatatggagtccatggttgaaggattcaaggtgaccctgatggagatctag

SEQ ID NO: 217422 - DNA, 5239 bp, Artificial Sequence
  derived and/or modified sequence
tccttgcgagaaagttacctgtggccgcccaagtccgccactttctgctctgtgtctgcccattgccacgatccaggaggactccgcgccgcccggccgcctccgagctcgggccccatgtgaggggcccccccttatcccacctttccggctaggtgagggcgcgagcgggcgagcgagcgagagtggtgaggggggacggaaaagcagaattacctgtagctcttgttctgccatctcgggcgctctcacacaccttcacctgcacagacttgaaagtccagtttcaccagaggctgaggctccaggaaaagcggagcaagttcattggatcaaacatgtcacaagagtcggacaataataaaagactagtggccttagtgcccatgcccagtgaccctccattcaatacccgaagagcctacaccagtgaggatgaagcctggaagtcatacttggagaatcccctgacagcagccaccaaggccatgatgagcattaatggtgatgaggacagtgctgctgccctcggcctgctctatgactactacaaggttcctcgagacaagaggctgctgtctgtaagcaaagcaagtgacagccaagaagaccaggagaaaagaaactgccttggcaccagtgaagcccagagtaatttgagtggaggagaaaaccgagtgcaagtcctaaagactgttccagtgaacctttccctaaatcaagatcacctggagaattccaagcgggaacagtacagcatcagcttccccgagagctctgccatcatcccggtgtcgggaatcacggtggtgaaagctgaagatttcacaccagttttcatggccccacctgtgcactatccccggggagatggggaagagcaacgagtggttatctttgaacagactcagtatgacgtgccctcgctggccacccacagcgcctatctcaaagacgaccagcgcagcactccggacagcacatacagcgagagcttcaaggacgcagccacagagaaatttcggagtgcttcagttggggctgaggagtacatgtatgatcagacatcaagtggcacatttcagtacaccctggaagccaccaaatctctccgtcagaagcagggggagggccccatgacctacctcaacaaaggacagttctatgccataacactcagcgagaccggagacaacaaatgcttccgacaccccatcagcaaagtcaggagtgtggtgatggtggtcttcagtgaagacaaaaacagagatgaacagctcaaatactggaaatactggcactctcggcagcatacggcgaagcagagggtccttgacattgccgattacaaggagagctttaatacgattggaaacattgaagagattgcatataatgctgtttcctttacctgggacgtgaatgaagaggcgaagattttcatcaccgtgaattgcttgagcacagatttctcctcccaaaaaggggtgaaaggacttcctttgatgattcagattgacacatacagttataacaatcgtagcaataaacccattcatagagcttattgccagatcaaggtcttctgtgacaaaggagcagaaagaaaaatccgagatgaagagcggaagcagaacaggaagaaagggaaaggccaggcctcccaaactcaatgcaacagctcctctgatgggaagttggctgccatacctttacagaagaagagtgacatcacctacttcaaaaccatgcctgatctccactcacagccagttctcttcatacctgatgttcactttgcaaacctgcagaggaccggacaggtgtattacaacacggatgatgaacgagaaggtggcagtgtccttgttaaacggatgttccggcccatggaagaggagtttggtccagtgccttcaaagcagatgaaagaagaagggacaaagcgagtgctcttgtacgtgaggaaggagactgacgatgtgttcgatgcattgatgttgaagtctcccacagtgaagggcctgatggaagcgatatctgagaaatatgggctgcccgtggagaagatagcaaagctttacaagaaaagcaaaaaaggcatcttggtgaacatggatgacaacatcatcgagcactactcgaacgaggacaccttcatcctcaacatggagagcatggtggagggcttcaaggtcacgctcatggaaatctagccctgggtttggcatccgctttggctggagctctcagtgcgttcctccctgagagagacagaagccccagccccagaacctggagacccatctcccccatctcacaactgctgttacaagaccgtgctggggagtggggcaagggacaggccccactgtcggtgtgcttggcccatccactggcacctaccacggagctgaagcctgagcccctcaggaaggtgccttaggcctgttggattcctatttattgcccaccttttcctggagcccaggtccaggcccgccaggactctgcaggtcactgctagctccagatgagaccgtccagcgttcccccttcaagagaaacactcatcccgaacagcctaaaaaattcccatcccttctctctcacccctccatatctatctcccgagtggctggacaaaatgagctacgtctgggtgcagtagttataggtggggcaagaggtggatgcccactttctggtcagacacctttaggttgctctggggaaggctgtcttgctaaatacctccagggttcccagcaagtggccaccaggccttgtacaggaagacattcagtcaccgtgtaattagtaacacagaaagtctgcctgtctgcattgtacatagtgtttataatattgtaataatatattttacctgtggtatgtgggcatgtttactgccactggcctagaggagacacagacctggagaccgttttaatgggggtttttgcctctgtgcctgttcaagagacttgcagggctaggtagagggcctttgggatgttaaggtgactgcagctgatgccaagatggactctgcaatgggcatacctgggggctcgttccctgtccccagaggaagccccctctccttctccatgggcatgactctccttcgaggccaccacgtttatctcacaatgatgtgttttgcttgactttccctttgcgctgtctcgtgggaaaggtcattctgtctgagaccccagctccttctccagctttggctgcgggcatggcctgagctttctggagagcctctgcagggggtttgccatcagggccctgtggctgggtctgctgcagagctccttggctatcaggagaatcctggacactgtactgtgcctcccagtttacaaacacgcccttcatctcaagtggccctttaaaaggcctgctgccatgtgagagctgtgaacagctcagctctgagtcggcaggctggggcttcctcctgggccaccagatggaaagggggtattgtttgcctcactcctggatgctgcgttttaaggaagtgagtgagaaagaatgtgccaagatacctggctcctgtgaaaccagcctcaggagggaaactgggagagagaagctgtggtctcctgctacatgccctgggagctggaagagaaaaacactcccctaaacaatcgcaaaatgatgaaccatcatgggccactgttctctttgaggggacaggtttaggggtttgcgttcgcccttgtgggctgaagcactagctttttggtagctagacacatcctgcacccaaaggttctctacaaaggcccagatttgtttgtaaagcactttgactcttacctggaggcccgctctctaagggcttcctgcgctcccacctcatctgtccctgagatgcagagcaggatggagggtctgcttctagctcagctgtttctccttgaggttgcggaggaattgaattgaatgggacagagggcaggtgctgtggccaagaagatctccgagcagcagtgacggggcaccttgctgtgtgtcctctgggcatgttaacccttctgtggggccaaaggtttgcatcgtggatccagctgtgctccagtctgtcccctcctcctccactctgactgccacgccccggaccagcagcttggggaccctccagggtactaatggggctctgttctgagatggacaaattcagtgttggaaatacatgttgtactatgcacttcccatgctcctagggttaggaatagtttcaaacatgattggcagacataacaacggcaaatactcggactggggcataggactccagagtaggaaaaagacaaaagatttggcagcctgacacaggcaacctacccctctctctccagcctctttatgaaactgtttgtttgccagtcctgccctaaggcagaagatgaattgaagatgctgtgcatgtttcctaagtccttgagcaatcatggtggtgacaattgccacaagggatatgaggccagtgccaccagagggtggtgccaagtgccacatcccttccgatccattcccctctgcatcctcggagcaccccagtttgcctttgatgtgtccgctgtgtatgttagctgaactttgatgagcaaaatttcctgagcgaaacactccaaagagataggaaaacttgccgcctcttcttttttgtcccttaatcaaactcaaataagcttaaaaaaaatccatggaagatcatggacatgtgaaatgagcatttttttcttttttttttttaacaaagtctgaactgaacagaacaagactttttcctcatacatctccaaattgtttaaacttactttatgagtgtttgtttagaagttcggaccaacagaaaaatgcagtcagatgtcatcttggaattggtttctaaaagagtaaggcatgtccctgcccagaaacttaggaagcatgaaataaatcaaatgtttattttccttcttatttaaaatcatgcaaatgcaacagaaatagagggtttgtgccaaatgctatgaacggccctttcttaaagacaagcaagggagattgatatatgtacaatttgctctcatgttttaaaaaaaaaaaggtaaatgtaacttaatagttttgtaaatgggagagggggaatctataaactataaatacagttattttattttttgtacatttttaaggagaaaaaataaatattcataacataagagtaaaa

SEQ ID NO: 217423 - DNA, 2140 bp, Artificial Sequence
  derived and/or modified sequence
attggatcaaacatgtcacaagagtcggacaagtaagtggatcacacgcgccggctgctgctactactaccactttgggctgatggcaactgtaataaaagactagtggccttagtgcccatgcccagtgaccctccattcaatacccgaagagcctacaccagtgaggatgaagcctggaagtcatacttggagaatcccctgacagcagccaccaaggccatgatgagcattaatggtgatgaggacagtgctgctgccctcggcctgctctatgactactacaaggttcctcgagacaagaggctgctgtctgtaagcaaagcaagtgacagccaagaagaccaggagaaaagaaactgccttggcaccagtgaagcccagagtaatttgagtggaggagaaaaccgagtgcaagtcctaaagactgttccagtgaacctttccctaaatcaagatcacctggagaattccaagcgggaacagtacagcatcagcttccccgagagctctgccatcatcccggtgtcgggaatcacggtggtgaaagctgaagatttcacaccagttttcatggccccacctgtgcactatccccggggagatggggaagagcaacgagtggttatctttgaacagactcagtatgacgtgccctcgctggccacccacagcgcctatctcaaagacgaccagcgcagcactccggacagcacatacagcgagagcttcaaggacgcagccacagagaaatttcggagtgcttcagttggggctgaggagtacatgtatgatcagacatcaagtggcacatttcagtacaccctggaagccaccaaatctctccgtcagaagcagggggagggccccatgacctacctcaacaaaggacagttctatgccataacactcagcgagaccggagacaacaaatgcttccgacaccccatcagcaaagtcaggagtgtggtgatggtggtcttcagtgaagacaaaaacagagatgaacagctcaaatactggaaatactggcactctcggcagcatacggcgaagcagagggtccttgacattgccgattacaaggagagctttaatacgattggaaacattgaagagattgcatataatgctgtttcctttacctgggacgtgaatgaagaggcgaagattttcatcaccgtgaattgcttgagcacagatttctcctcccaaaaaggggtgaaaggacttcctttgatgattcagattgacacatacagttataacaatcgtagcaataaacccattcatagagcttattgccagatcaaggtcttctgtgacaaaggagcagaaagaaaaatccgagatgaagagcggaagcagaacaggaagaaagggaaaggccaggcctcccaaactcaatgcaacagctcctctgatgggaagttggctgccatacctttacagaagaagagtgacatcacctacttcaaaaccatgcctgatctccactcacagccagttctcttcatacctgatgttcactttgcaaacctgcagaggaccggacaggtgtattacaacacggatgatgaacgagaaggtggcagtgtccttgttaaacggatgttccggcccatggaagaggagtttggtccagtgccttcaaagcagatgaaagaagaagggacaaagcgagtgctcttgtacgtgaggaaggagactgacgatgtgttcgatgcattgatgttgaagtctcccacagtgaagggcctgatggaagcgatatctgagaaatatgggctgcccgtggagaagatagcaaagctttacaagaaaagcaaaaaaggcatcttggtgaacatggatgacaacatcatcgagcactactcgaacgaggacaccttcatcctcaacatggagagcatggtggagggcttcaaggtcacgctcatggaaatctagccctgggtttggcatccgctttggctggagctctcagtgcgttcctccctgagagagacagaagccccagccccagaacctggagacccatctcccccatctcacaactgctgttacaagaccgtgctggggagtggggcaagggacaggccccactgtcggtgtgcttggcccatccactggcacctac

SEQ ID NO: 217424 - DNA, 4901 bp, Artificial Sequence
  derived and/or modified sequence
atggggaaagatggaaggagtaataaaagactagtggccttagtgcccatgcccagtgaccctccattcaatacccgaagagcctacaccagtgaggatgaagcctggaagtcatacttggagaatcccctgacagcagccaccaaggccatgatgagcattaatggtgatgaggacagtgctgctgccctcggcctgctctatgactactacaaggttcctcgagacaagaggctgctgtctgtaagcaaagcaagtgacagccaagaagaccaggagaaaagaaactgccttggcaccagtgaagcccagagtaatttgagtggaggagaaaaccgagtgcaagtcctaaagactgttccagtgaacctttccctaaatcaagatcacctggagaattccaagcgggaacagtacagcatcagcttccccgagagctctgccatcatcccggtgtcgggaatcacggtggtgaaagctgaagatttcacaccagttttcatggccccacctgtgcactatccccggggagatggggaagagcaacgagtggttatctttgaacagactcagtatgacgtgccctcgctggccacccacagcgcctatctcaaagacgaccagcgcagcactccggacagcacatacagcgagagcttcaaggacgcagccacagagaaatttcggagtgcttcagttggggctgaggagtacatgtatgatcagacatcaagtggcacatttcagtacaccctggaagccaccaaatctctccgtcagaagcagggggagggccccatgacctacctcaacaaaggacagttctatgccataacactcagcgagaccggagacaacaaatgcttccgacaccccatcagcaaagtcaggagtgtggtgatggtggtcttcagtgaagacaaaaacagagatgaacagctcaaatactggaaatactggcactctcggcagcatacggcgaagcagagggtccttgacattgccgattacaaggagagctttaatacgattggaaacattgaagagattgcatataatgctgtttcctttacctgggacgtgaatgaagaggcgaagattttcatcaccgtgaattgcttgagcacagatttctcctcccaaaaaggggtgaaaggacttcctttgatgattcagattgacacatacagttataacaatcgtagcaataaacccattcatagagcttattgccagatcaaggtcttctgtgacaaaggagcagaaagaaaaatccgagatgaagagcggaagcagaacaggaagaaagggaaaggccaggcctcccaaactcaatgcaacagctcctctgatgggaagttggctgccatacctttacagaagaagagtgacatcacctacttcaaaaccatgcctgatctccactcacagccagttctcttcatacctgatgttcactttgcaaacctgcagaggaccggacaggtgtattacaacacggatgatgaacgagaaggtggcagtgtccttgttaaacggatgttccggcccatggaagaggagtttggtccagtgccttcaaagcagatgaaagaagaagggacaaagcgagtgctcttgtacgtgaggaaggagactgacgatgtgttcgatgcattgatgttgaagtctcccacagtgaagggcctgatggaagcgatatctgagaaatatgggctgcccgtggagaagatagcaaagctttacaagaaaagcaaaaaaggcatcttggtgaacatggatgacaacatcatcgagcactactcgaacgaggacaccttcatcctcaacatggagagcatggtggagggcttcaaggtcacgctcatggaaatctagccctgggtttggcatccgctttggctggagctctcagtgcgttcctccctgagagagacagaagccccagccccagaacctggagacccatctcccccatctcacaactgctgttacaagaccgtgctggggagtggggcaagggacaggccccactgtcggtgtgcttggcccatccactggcacctaccacggagctgaagcctgagcccctcaggaaggtgccttaggcctgttggattcctatttattgcccaccttttcctggagcccaggtccaggcccgccaggactctgcaggtcactgctagctccagatgagaccgtccagcgttcccccttcaagagaaacactcatcccgaacagcctaaaaaattcccatcccttctctctcacccctccatatctatctcccgagtggctggacaaaatgagctacgtctgggtgcagtagttataggtggggcaagaggtggatgcccactttctggtcagacacctttaggttgctctggggaaggctgtcttgctaaatacctccagggttcccagcaagtggccaccaggccttgtacaggaagacattcagtcaccgtgtaattagtaacacagaaagtctgcctgtctgcattgtacatagtgtttataatattgtaataatatattttacctgtggtatgtgggcatgtttactgccactggcctagaggagacacagacctggagaccgttttaatgggggtttttgcctctgtgcctgttcaagagacttgcagggctaggtagagggcctttgggatgttaaggtgactgcagctgatgccaagatggactctgcaatgggcatacctgggggctcgttccctgtccccagaggaagccccctctccttctccatgggcatgactctccttcgaggccaccacgtttatctcacaatgatgtgttttgcttgactttccctttgcgctgtctcgtgggaaaggtcattctgtctgagaccccagctccttctccagctttggctgcgggcatggcctgagctttctggagagcctctgcagggggtttgccatcagggccctgtggctgggtctgctgcagagctccttggctatcaggagaatcctggacactgtactgtgcctcccagtttacaaacacgcccttcatctcaagtggccctttaaaaggcctgctgccatgtgagagctgtgaacagctcagctctgagtcggcaggctggggcttcctcctgggccaccagatggaaagggggtattgtttgcctcactcctggatgctgcgttttaaggaagtgagtgagaaagaatgtgccaagatacctggctcctgtgaaaccagcctcaggagggaaactgggagagagaagctgtggtctcctgctacatgccctgggagctggaagagaaaaacactcccctaaacaatcgcaaaatgatgaaccatcatgggccactgttctctttgaggggacaggtttaggggtttgcgttcgcccttgtgggctgaagcactagctttttggtagctagacacatcctgcacccaaaggttctctacaaaggcccagatttgtttgtaaagcactttgactcttacctggaggcccgctctctaagggcttcctgcgctcccacctcatctgtccctgagatgcagagcaggatggagggtctgcttctagctcagctgtttctccttgaggttgcggaggaattgaattgaatgggacagagggcaggtgctgtggccaagaagatctccgagcagcagtgacggggcaccttgctgtgtgtcctctgggcatgttaacccttctgtggggccaaaggtttgcatcgtggatccagctgtgctccagtctgtcccctcctcctccactctgactgccacgccccggaccagcagcttggggaccctccagggtactaatggggctctgttctgagatggacaaattcagtgttggaaatacatgttgtactatgcacttcccatgctcctagggttaggaatagtttcaaacatgattggcagacataacaacggcaaatactcggactggggcataggactccagagtaggaaaaagacaaaagatttggcagcctgacacaggcaacctacccctctctctccagcctctttatgaaactgtttgtttgccagtcctgccctaaggcagaagatgaattgaagatgctgtgcatgtttcctaagtccttgagcaatcatggtggtgacaattgccacaagggatatgaggccagtgccaccagagggtggtgccaagtgccacatcccttccgatccattcccctctgcatcctcggagcaccccagtttgcctttgatgtgtccgctgtgtatgttagctgaactttgatgagcaaaatttcctgagcgaaacactccaaagagataggaaaacttgccgcctcttcttttttgtcccttaatcaaactcaaataagcttaaaaaaaatccatggaagatcatggacatgtgaaatgagcatttttttcttttttttttttaacaaagtctgaactgaacagaacaagactttttcctcatacatctccaaattgtttaaacttactttatgagtgtttgtttagaagttcggaccaacagaaaaatgcagtcagatgtcatcttggaattggtttctaaaagagtaaggcatgtccctgcccagaaacttaggaagcatgaaataaatcaaatgtttattttccttcttatttaaaatcatgcaaatgcaacagaaatagagggtttgtgccaaatgctatgaacggccctttcttaaagacaagcaagggagattgatatatgtacaatttgctctcatgttttaaaaaaaaaaaggtaaatgtaacttaatagttttgtaaatgggagagggggaatctataaactataaatacagttattttattttttgtacatttttaaggagaaaaaataaatattcataacataagagtaaaa

SEQ ID NO: 217425 - DNA, 1878 bp, Artificial Sequence
  derived and/or modified sequence
atgagccaggagagtgacaacaacaagaggctggtggccctggtgcccatgcccagcgacccccccttcaacacccggcgggcctacaccagtgaagatgaggcctggaagagctacctggagaaccccctgacagctgccaccaaggccatgatgagcatcaatggagatgaggacagcgctgctgccctgggcctgctgtatgactactacaaggtgccccgggacaagaggctgctgtctgtgtccaaggccagtgacagccaggaggaccaggagaagaggaactgcctgggcaccagcgaggcccagagcaacctgtctggaggagaaaatagagtgcaggtgctgaagacagtgcctgtgaacctgagcctgaaccaggaccacctggagaacagcaagcgggagcagtacagcatctccttccctgagagcagcgccatcatccctgtgtctggcatcaccgtggtgaaggccgaggacttcacccctgtgttcatggcccctcctgtgcactaccccagaggagatggagaggagcagagggtggtgatctttgagcagacccagtatgatgtgcccagcctggccacccacagcgcctacctgaaggatgaccagaggagcaccccagacagcacctacagcgagagcttcaaggatgctgccacagagaagttccgcagcgcctctgtgggcgctgaggagtacatgtatgaccagaccagcagcggcaccttccagtacaccctggaggccaccaagagcctgcggcagaagcagggcgagggccccatgacctacctgaacaagggccagttctacgccatcaccctgtctgaaacaggagacaacaagtgcttccgccaccccatcagcaaggtgcgctctgtggtgatggtggtgttttctgaggacaagaacagagatgagcagctgaagtactggaagtactggcacagccggcagcacacagccaagcagagggtgctggacattgctgactacaaggagagcttcaacaccatcggcaacatcgaggagatcgcctacaatgctgtgtccttcacctgggatgtgaatgaggaggccaagatcttcatcaccgtgaactgcctgagcacagacttcagcagccagaagggcgtgaagggcctgcccctgatgatccagattgacacctacagctacaacaacagaagcaacaagcccatccaccgggcctactgccagatcaaggtgttctgtgacaagggagctgagaggaagatcagagatgaggagaggaagcagaacaggaagaagggcaagggccaggccagccagacccagtgcaacagcagcagtgatggcaagctggccgccatccccctgcagaagaagagtgacatcacctacttcaagaccatgccagacctgcacagccagcctgtgctcttcatcccagatgtgcactttgccaacctgcagaggacaggccaggtgtactacaacacagatgatgagcgggagggcggctctgtgctggtgaagaggatgttccggcccatggaggaggagtttggacctgtgcccagcaagcagatgaaggaggagggcaccaagagggtgctgctgtatgtgaggaaggagacagatgatgtgtttgatgccctgatgctgaagagccccaccgtgaagggcctgatggaggccatcagcgagaagtatggcctgcctgtggagaagatcgccaagctgtacaagaagagcaagaagggcatcctggtgaacatggatgacaacatcatcgagcactacagcaatgaagacaccttcatcctgaacatggagagcatggtggagggcttcaaggtgaccctgatggagatctag

SEQ ID NO: 217426 - DNA, 1830 bp, Artificial Sequence
  derived and/or modified sequence
atgcccagcgacccccccttcaacacccggcgggcctacaccagtgaagatgaggcctggaagagctacctggagaaccccctgacagctgccaccaaggccatgatgagcatcaatggagatgaggacagcgctgctgccctgggcctgctgtatgactactacaaggtgccccgggacaagaggctgctgtctgtgtccaaggccagtgacagccaggaggaccaggagaagaggaactgcctgggcaccagcgaggcccagagcaacctgtctggaggagaaaatagagtgcaggtgctgaagacagtgcctgtgaacctgagcctgaaccaggaccacctggagaacagcaagcgggagcagtacagcatctccttccctgagagcagcgccatcatccctgtgtctggcatcaccgtggtgaaggccgaggacttcacccctgtgttcatggcccctcctgtgcactaccccagaggagatggagaggagcagagggtggtgatctttgagcagacccagtatgatgtgcccagcctggccacccacagcgcctacctgaaggatgaccagaggagcaccccagacagcacctacagcgagagcttcaaggatgctgccacagagaagttccgcagcgcctctgtgggcgctgaggagtacatgtatgaccagaccagcagcggcaccttccagtacaccctggaggccaccaagagcctgcggcagaagcagggcgagggccccatgacctacctgaacaagggccagttctacgccatcaccctgtctgaaacaggagacaacaagtgcttccgccaccccatcagcaaggtgcgctctgtggtgatggtggtgttttctgaggacaagaacagagatgagcagctgaagtactggaagtactggcacagccggcagcacacagccaagcagagggtgctggacattgctgactacaaggagagcttcaacaccatcggcaacatcgaggagatcgcctacaatgctgtgtccttcacctgggatgtgaatgaggaggccaagatcttcatcaccgtgaactgcctgagcacagacttcagcagccagaagggcgtgaagggcctgcccctgatgatccagattgacacctacagctacaacaacagaagcaacaagcccatccaccgggcctactgccagatcaaggtgttctgtgacaagggagctgagaggaagatcagagatgaggagaggaagcagaacaggaagaagggcaagggccaggccagccagacccagtgcaacagcagcagtgatggcaagctggccgccatccccctgcagaagaagagtgacatcacctacttcaagaccatgccagacctgcacagccagcctgtgctcttcatcccagatgtgcactttgccaacctgcagaggacaggccaggtgtactacaacacagatgatgagcgggagggcggctctgtgctggtgaagaggatgttccggcccatggaggaggagtttggacctgtgcccagcaagcagatgaaggaggagggcaccaagagggtgctgctgtatgtgaggaaggagacagatgatgtgtttgatgccctgatgctgaagagccccaccgtgaagggcctgatggaggccatcagcgagaagtatggcctgcctgtggagaagatcgccaagctgtacaagaagagcaagaagggcatcctggtgaacatggatgacaacatcatcgagcactacagcaatgaagacaccttcatcctgaacatggagagcatggtggagggcttcaaggtgaccctgatggagatctag

SEQ ID NO: 217427 - DNA, 1878 bp, Artificial Sequence
  derived and/or modified sequence
atgggcaaggatggccgcagcaacaagaggctggtggccctggtgcccatgcccagcgacccccccttcaacacccggcgggcctacaccagtgaagatgaggcctggaagagctacctggagaaccccctgacagctgccaccaaggccatgatgagcatcaatggagatgaggacagcgctgctgccctgggcctgctgtatgactactacaaggtgccccgggacaagaggctgctgtctgtgtccaaggccagtgacagccaggaggaccaggagaagaggaactgcctgggcaccagcgaggcccagagcaacctgtctggaggagaaaatagagtgcaggtgctgaagacagtgcctgtgaacctgagcctgaaccaggaccacctggagaacagcaagcgggagcagtacagcatctccttccctgagagcagcgccatcatccctgtgtctggcatcaccgtggtgaaggccgaggacttcacccctgtgttcatggcccctcctgtgcactaccccagaggagatggagaggagcagagggtggtgatctttgagcagacccagtatgatgtgcccagcctggccacccacagcgcctacctgaaggatgaccagaggagcaccccagacagcacctacagcgagagcttcaaggatgctgccacagagaagttccgcagcgcctctgtgggcgctgaggagtacatgtatgaccagaccagcagcggcaccttccagtacaccctggaggccaccaagagcctgcggcagaagcagggcgagggccccatgacctacctgaacaagggccagttctacgccatcaccctgtctgaaacaggagacaacaagtgcttccgccaccccatcagcaaggtgcgctctgtggtgatggtggtgttttctgaggacaagaacagagatgagcagctgaagtactggaagtactggcacagccggcagcacacagccaagcagagggtgctggacattgctgactacaaggagagcttcaacaccatcggcaacatcgaggagatcgcctacaatgctgtgtccttcacctgggatgtgaatgaggaggccaagatcttcatcaccgtgaactgcctgagcacagacttcagcagccagaagggcgtgaagggcctgcccctgatgatccagattgacacctacagctacaacaacagaagcaacaagcccatccaccgggcctactgccagatcaaggtgttctgtgacaagggagctgagaggaagatcagagatgaggagaggaagcagaacaggaagaagggcaagggccaggccagccagacccagtgcaacagcagcagtgatggcaagctggccgccatccccctgcagaagaagagtgacatcacctacttcaagaccatgccagacctgcacagccagcctgtgctcttcatcccagatgtgcactttgccaacctgcagaggacaggccaggtgtactacaacacagatgatgagcgggagggcggctctgtgctggtgaagaggatgttccggcccatggaggaggagtttggacctgtgcccagcaagcagatgaaggaggagggcaccaagagggtgctgctgtatgtgaggaaggagacagatgatgtgtttgatgccctgatgctgaagagccccaccgtgaagggcctgatggaggccatcagcgagaagtatggcctgcctgtggagaagatcgccaagctgtacaagaagagcaagaagggcatcctggtgaacatggatgacaacatcatcgagcactacagcaatgaagacaccttcatcctgaacatggagagcatggtggagggcttcaaggtgaccctgatggagatctag

SEQ ID NO: 217428 - DNA, 1878 bp, Artificial Sequence
  derived and/or modified sequence
atgagccaggagagcgacaacaacaagcggctggtggccctggtgccaatgcctagcgacccgccgttcaatactcgcagagcctatacctcagaggatgaggcgtggaagtcatatttagagaaccccctcacagcagcaactaaagctatgatgagtattaacggggacgaggactcggctgcagcgttggggctgctgtacgattattataaggtccccagggacaaacggctcctctctgtgagcaaggcttccgattctcaggaagatcaggagaaaagaaattgccttggaacctccgaagcgcagtccaatctttccggtggagagaatagggtgcaagtgctgaaaactgtccctgtcaatctttcactcaatcaggaccatctagaaaatagcaaacgcgaacagtacagtatctcattccctgaaagctccgcaattatccccgtgtccgggataaccgttgtgaaggcggaggactttacccctgttttcatggctccgccagttcactacccgagaggggacggcgaggagcaacgcgttgttatctttgagcagacccagtatgacgtgccatccctggccacgcacagcgcatatctgaaagatgatcagcggagtacccccgattctacctacagcgagagctttaaagatgccgcaacagaaaaattccggagcgcatctgtgggcgctgaggagtacatgtacgatcagacatccagcggaaccttccaatatacactggaggctacaaaatcactgagacagaagcaaggagagggccccatgacctatctcaacaaaggacagttctacgccatcacattatcggagacaggcgacaacaagtgcttccgacatcccataagcaaggtgcggtcagtcgtgatggtggtgttcagcgaggacaagaaccgggacgaacagctgaaatactggaaatactggcactctagacaacacaccgccaagcagcgagtgctcgatatcgccgactacaaagagtccttcaataccatagggaacatcgaagagattgcctacaatgctgtctctttcacctgggatgtgaatgaagaagctaagatctttatcacagtgaactgcttaagcacagacttctcatctcagaaaggagtcaaagggctgcccctcatgattcagattgacacatacagttacaataaccgtagtaataagccgattcaccgcgcatactgtcagattaaagttttctgtgacaaaggcgcagaaagaaagatcagggacgaagagagaaaacagaatagaaaaaaggggaagggccaggcctcccaaacacaatgcaacagctcaagtgatgggaaactcgctgcaattcctctccagaagaagtccgatatcacatactttaagaccatgccagatctccatagtcagccagttctgtttattcctgatgtccactttgccaatttacagcgcaccggccaggtgtactacaatactgacgacgagcgagagggcggcagcgtcctggtaaagcgcatgtttagaccaatggaagaggagttcggtccggtcccatctaagcagatgaaggaagagggaacgaagcgcgtcctattgtacgttcgaaaggagactgatgatgtttttgatgctttgatgcttaagtctcccacagtcaagggtctgatggaagctattagtgaaaagtacggcctccctgtggagaagatcgcaaaactgtacaaaaagtccaagaaagggatcttggtgaacatggatgataatattatagagcattactctaatgaggacacattcatccttaacatggagtccatggtggaggggttcaaggtaacactcatggaaatctag

SEQ ID NO: 217429 - DNA, 1830 bp, Artificial Sequence
  derived and/or modified sequence
atgcccagcgacccccccttcaacacccggcgggcctacaccagcgaagacgaagcgtggaagtcatatttggagaaccccctaaccgctgctaccaaagcaatgatgagcattaatggggacgaagactctgccgctgcactgggcttactctatgattattacaaagtgccacgggataagcgcctgctttcggtctccaaggccagtgactctcaggaagatcaggaaaagcggaactgcctcggcacaagtgaggcacagagcaatctgtcaggcggagagaaccgagttcaggtcctgaagaccgtgcctgtcaacctcagtctgaatcaggaccacttagagaattccaaaagagagcagtactctatctcttttcccgagagctctgcaatcattcctgtgtctggtataactgtcgtcaaggctgaggactttacgcccgtatttatggccccgcctgtccactacccaagaggggatggtgaagaacagcgcgtggtgatattcgaacaaacacagtacgatgtgccctccttggcaactcatagcgcttacttgaaggatgaccaacgaagcacccccgatagcacttactctgagagtttcaaggatgctgccactgaaaaattccggtccgcgtctgtgggcgccgaagaatatatgtatgaccagacctctagcggtaccttccagtataccttagaggccacgaagtctctgagacagaagcagggcgagggccccatgacatatttgaacaaaggacagttctacgcgataaccctgtccgaaacgggcgacaacaaatgtttccgccaccccattagcaaggttcgatcagtcgtaatggtcgttttcagcgaggataaaaacagagatgagcagttgaaatactggaaatactggcacagtcgccagcacaccgccaaacagcgcgtgctcgatattgctgattacaaggagtctttcaacacaatcggaaatattgaggagatcgcctataatgcggtctccttcacgtgggatgtgaacgaagaagcgaaaatcttcattaccgtcaactgcctgtctacagacttttccagccagaaaggtgtgaaaggcttgcctttaatgattcagattgatacctactcatacaataatagatctaacaaacctatccaccgagcatactgccagatcaaagtgttctgcgataagggcgcagagcgcaagatcagggacgaagagcgaaagcagaatcgcaaaaagggaaagggtcaggccagccaaacacaatgcaactcctcctccgacggcaaattggcagccatacctcttcagaagaaatccgacattacttatttcaaaacaatgcctgacctacactcgcaaccagtgcttttcatccctgatgtccacttcgcgaatctgcaacgtacagggcaggtgtactacaacaccgacgacgaaagggaaggaggcagcgtgcttgttaagagaatgtttcgaccaatggaagaggaatttggtcctgtgccatccaaacagatgaaagaggagggaacaaaacgcgtgctcctttacgtcaggaaggaaacagacgacgtgttcgatgctctgatgcttaagtcccccactgtcaaaggacttatggaggccattagcgagaaatacggactgccagtggagaagattgccaagctgtacaagaagtcaaagaagggtatccttgtgaatatggatgacaatattattgaacactattcgaatgaagacaccttcattcttaatatggagagcatggtggaggggtttaaggtgactctcatggagatctag

SEQ ID NO: 217430 - DNA, 1878 bp, Artificial Sequence
  derived and/or modified sequence
atgggcaaggacggccggagcaacaagcggctggtggccctggtgcccatgccctcggacccaccgttcaacacccgacgggcatatacgtctgaggatgaggcttggaagagctacctggagaatccactgacagcagcaacaaaagccatgatgtccataaatggtgacgaagactcggctgctgcacttggcctgctgtatgattactataaggtacccagagataaaaggctgcttagcgtgagcaaggcctcagactcacaagaggaccaagaaaagaggaactgcctcggaacgagtgaagcccagtctaatctgtctgggggggagaacagagttcaggttctgaagacagtgccagttaacctttcccttaaccaagatcatctggaaaatagcaagcgggagcagtactcaattagcttccctgaatcctctgcaataattcccgtgagcggtataactgtggtaaaggccgaggactttacacctgtgtttatggcaccaccagtccattaccctcggggggacggcgaagagcaacgtgtcgtaatcttcgagcagacccagtacgacgtgccttctctcgctacgcacagcgcatacctgaaggatgatcaacggtcgacccctgacagcacttacagcgagagtttcaaggatgcagccactgaaaagtttcggtcagcgagcgtgggcgcagaagagtacatgtacgaccagactagctccggcactttccagtacacactcgaagcaacaaaatcacttagacaaaaacagggagaagggccaatgacatatctgaataagggccagttctatgcaataacactgtctgagaccggcgacaataagtgttttcgacatcccatctccaaagtacgcagtgtggtgatggtggtattctccgaggataaaaatagagatgagcagttgaaatattggaaatattggcactcacgccagcacactgccaaacagagagtccttgatatcgcggactacaaggaatcattcaatactatcggcaacatcgaagagatcgcctacaatgccgtgtcattcacctgggatgtgaacgaggaggccaaaatcttcatcactgtcaattgcctctctaccgacttttcttcccagaagggggtgaaaggactgccccttatgattcaaatagacacctactcatataataaccgaagcaacaagcccatccatagagcatactgtcagatcaaagtgttctgcgacaagggcgccgagaggaaaatccgagatgaggagcggaagcagaaccgcaaaaagggcaagggtcaggcatcccagacccagtgtaactcttcttcagacggaaaattggcggcaatcccactgcagaagaaatcagacatcacatactttaagaccatgcctgacctgcatagccagcccgtgctcttcatccccgacgtgcacttcgccaacctccaaaggactggccaggtgtactataatactgatgatgagcgagaaggtgggtctgtcctggtgaaaaggatgttcagaccgatggaggaagaattcggtcccgtaccctcaaagcaaatgaaagaagaagggaccaagagggtgctgttatacgtacgcaaggagactgatgacgtgttcgatgctcttatgttgaaatcccccacagtgaagggcctgatggaagccatttccgaaaagtacggcctcccagtggagaagatagcaaagctgtacaaaaaatccaaaaaagggattctggtaaatatggacgacaacataattgagcactactccaatgaggacacctttattctcaatatggagagtatggtggagggctttaaagtcacactgatggaaatctag

SEQ ID NO: 217431 - DNA, 1878 bp, Artificial Sequence
  derived and/or modified sequence
atgtcccaggaatccgataataataaaaggctggtggcactggttcccatgccatccgaccctccgttcaacacccggagagcttacacgtctgaggatgaagcctggaagtcttacctggagaaccccctaactgccgcaaccaaggccatgatgagcatcaatggagacgaggattctgcagcagccctggggcttctttacgactattacaaggtccccagggataagcgattactttccgtgtctaaagcctctgacagtcaagaggatcaggaaaagcgcaattgtctgggcacctccgaggcgcaatctaacctgtcagggggtgagaatcgggtacaggtgctcaagacagtgcccgtcaacctctcgctcaaccaggaccaccttgaaaacagcaagagggagcaatacagtatctcatttcctgagagttcagcaataatccctgttagtggcattacagtggtgaaggccgaagactttactcctgtgttcatggcacccccagtgcactatcccagaggggatggcgaagagcagcgagtggtgatctttgagcagactcagtacgacgtcccaagtctggctacacacagcgcatatctgaaagacgaccagcgttccacaccggatagcacctatagtgaatcctttaaagacgccgctacggagaaatttcggtccgctagcgttggcgctgaagagtatatgtacgaccagacaagtagcgggactttccaatatacactggaggccacaaagtccctgaggcagaagcagggggagggtcctatgacttacttgaacaaaggacagttctacgccatcacgttaagtgagactggagataacaaatgctttcgtcatcccatctctaaagtgagatctgtcgtcatggtggtgtttagtgaagacaagaaccgcgatgagcagttgaagtattggaaatattggcactctaggcagcatacggcgaaacagcgggtcctggatatcgcagactataaagaatccttcaataccatcggaaatatcgaggaaatcgcctacaatgcagtgagttttacgtgggatgtgaatgaagaggccaagattttcatcactgtgaactgtctcagcactgacttttcatctcaaaaaggagttaaaggcctcccgctgatgattcagatcgacacatacagttataataatcggagcaacaagccaatccatagggcctattgccagattaaggtgttctgcgacaagggggctgagcgcaaaattagagacgaggaacgcaagcaaaaccgaaaaaagggcaagggccaggcgtctcaaacccagtgcaattccagctccgatgggaagctggctgccattcccctgcagaagaaatcagacatcacctacttcaagactatgccggacctgcattctcagccagtgttattcatccctgatgtgcatttcgctaatttgcaacggacaggccaggtttactacaataccgacgatgaaagagagggaggttctgtcctggtgaagaggatgtttagaccgatggaagaggaattcggaccggtgccaagcaagcaaatgaaggaagaggggactaaaagagtgctgctgtatgtccggaaagagaccgacgacgtgttcgacgctctgatgctcaagagtcccaccgtcaaaggcctgatggaagctatctcagagaagtacggactccctgtggagaagatcgccaagctgtataagaaatccaaaaaagggattctggtgaacatggatgataatatcatcgaacactacagtaacgaggacacatttattcttaacatggagagcatggtggaaggctttaaggtcactctgatggagatctag

SEQ ID NO: 217432 - DNA, 1830 bp, Artificial Sequence
  derived and/or modified sequence
atgccctccgaccccccatttaacacaagaagagcatacaccagcgaagatgaggcttggaagagttacttggaaaacccgctcacagccgcaacgaaggccatgatgtccatcaacggggacgaagacagtgcggcagcgttagggttactgtacgactactacaaggtccccagagacaagcgtttgctctccgtttctaaagcgagcgattctcaggaggaccaggagaaaagaaattgtctcggtacctcagaggcccagtccaacctctctggtggcgagaaccgcgtgcaagtgctaaaaaccgtgccagtcaatctgtctctgaatcaggatcacttggagaactcaaagcgcgaacaatactccatctccttcccagaatcctccgctatcattcctgtttcagggatcactgtcgtgaaggctgaggatttcaccccagtttttatggccccaccagtgcactacccccgtggcgacggagaagaacagcgcgtggtaatcttcgaacagacccaatatgatgttcctagtttagcaactcattcagcctacctgaaagatgaccagaggtcgacccctgattctacatatagcgaatccttcaaagacgctgccactgagaaatttcgttctgcctcagtgggcgcagaagaatatatgtacgatcagactagttcaggtaccttccagtatactcttgaggctacaaaatctctgaggcagaaacagggcgaaggacccatgacctacctgaataaaggccagttctacgctataacgctgagcgaaactggggataacaagtgcttcagacaccccatttccaaggtaagatccgtggtaatggtcgtcttctcagaagacaaaaatcgggacgaacagctgaaatactggaagtactggcattcaaggcaacacacggcgaagcagcgcgtgcttgacattgcagattataaagagtccttcaacactataggtaatatagaagagatcgcatataacgcggtctcatttacctgggacgtgaatgaagaagctaaaatctttatcaccgtgaactgccttagcactgacttctcttcgcagaagggagtaaaaggcctgcctctaatgatccagatagacacatacagttacaataatcgaagcaacaagcctatacaccgtgcttactgccaaattaaagtcttttgtgacaagggcgctgagcgcaaaatccgtgacgaagagcggaaacagaacaggaagaagggaaagggacaagcctcccagacccagtgtaatagttcaagtgacggaaagctggccgcaatccctttgcagaagaagtccgacatcacatatttcaagacgatgcctgatttgcactcccagcccgtgttgtttataccagatgttcatttcgccaacctacagcggacaggccaagtctactataataccgacgatgaaagggaaggaggtagcgtgctggtgaagcgcatgtttcgtcccatggaggaggaatttggcccagttccatctaaacagatgaaagaggagggtactaaacgggtgctcttatacgtgcgaaaggagactgacgacgtcttcgatgcactgatgctcaagagtcctaccgtcaagggattaatggaggctatctctgagaagtacgggcttcccgttgaaaaaattgcgaagctatacaagaaatccaagaaaggcatccttgtcaatatggacgacaatatcattgagcactatagcaatgaggacacctttatccttaatatggaatcaatggttgagggttttaaggtgacactgatggagatatag

SEQ ID NO: 217433 - DNA, 1878 bp, Artificial Sequence
  derived and/or modified sequence
atgggaaaggatggtaggagtaacaaaagacttgtggcccttgtccctatgccgagtgacccaccctttaacacgaggcgcgcatacacctcggaggatgaggcttggaaaagctacttagaaaaccccctaacagccgcaaccaaggccatgatgtccataaacggggatgaggactccgccgctgcactggggctgctgtacgactactataaggtgcccagggacaagagattactgtctgtcagcaaggcctccgacagtcaggaagatcaagaaaagcgcaattgtctgggcacgtcagaggcccagagtaacttgtcggggggagagaatcgtgtccaagtcctcaagactgtccccgtaaacctgtcactcaaccaggatcacctggagaacagcaagcgtgaacaatattccatttctttccccgagtccagcgccattatcccagttagcggaataaccgtggtaaaggccgaggacttcacccctgtttttatggctccccctgtgcactacccccgtggagacggagaggagcagagagtggtgatcttcgaacagactcagtacgacgtgccttctttggcaacacactcagcgtatttaaaagacgatcagcgcagtacccctgatagcacttatagtgaatctttcaaggatgcagcaactgagaaatttagaagtgcatccgtaggagctgaagaatacatgtacgatcagacatcttcaggaacattccagtacacgcttgaagcgaccaaatcccttaggcagaaacagggcgagggcccaatgacctacttaaacaaggggcagttctacgcaatcaccctgtctgaaaccggtgacaacaaatgtttcagacatccgatcagcaaggtgcgtagtgtggttatggtcgtattttccgaggacaaaaacagggatgagcagctgaagtattggaagtattggcattcaagacagcacaccgctaagcaaagagtgctggatatcgccgattataaggaaagtttcaacaccattggcaacatcgaagagatcgcctataacgctgtcagctttacatgggatgtcaatgaggaggccaagatcttcatcactgtgaattgcctgagcaccgactttagctcacagaagggggtgaagggcctgcccctcatgatccagatcgatacatactcatacaacaatcggagcaataaacccattcatcgggcttactgccagatcaaggtgttctgcgacaagggcgctgaacgcaaaatccgagacgaggaacggaaacagaatcggaaaaaaggaaagggccaggccagccagacccagtgtaattcatcctctgacggaaagctcgcggcaatccccttgcagaaaaagtcagatatcacctatttcaagactatgccagatctccactctcagccagtactgttcataccggatgttcactttgctaatctccagcggactgggcaggtatactacaatacagacgacgagcgggaaggtggctctgtgctggttaaacgcatgttccgccctatggaagaagaattcgggcctgtcccctctaaacagatgaaagaagagggtacaaagagggtacttctgtacgtgaggaaagaaaccgacgacgtgtttgacgcattaatgctgaaatctcctaccgtcaaagggctgatggaggccatttcagaaaaatatggcctcccagtggaaaaaatcgcaaaattatacaaaaaaagcaagaaggggatcttggtcaatatggacgacaatattatagaacactattcaaacgaggatacttttatcctgaatatggagagtatggtcgagggcttcaaggtgacactgatggagatctag

SEQ ID NO: 217434 - DNA, 1878 bp, Artificial Sequence
  derived and/or modified sequence
atgagccaggagagcgacaacaacaagagactggtggccctggtgcccatgcccagcgacccccccttcaacaccagaagagcctacaccagcgaggacgaggcctggaagagctacctggagaaccccctgaccgccgccaccaaggccatgatgagcatcaacggcgacgaggacagcgccgccgccctgggcctgctgtacgactactacaaggtgcccagagacaagagactgctgagcgtgagcaaggccagcgacagccaggaggaccaggagaagagaaactgcctgggcaccagcgaggcccagagcaacctgagcggcggcgagaacagagtgcaggtgctgaagaccgtgcccgtgaacctgagcctgaaccaggaccacctggagaacagcaagagagagcagtacagcatcagcttccccgagagcagcgccatcatccccgtgagcggcatcaccgtggtgaaggccgaggacttcacccccgtgttcatggccccccccgtgcactaccccagaggcgacggcgaggagcagagagtggtgatcttcgagcagacccagtacgacgtgcccagcctggccacccacagcgcctacctgaaggacgaccagagaagcacccccgacagcacctacagcgagagcttcaaggacgccgccaccgagaagttcagaagcgccagcgtgggcgccgaggagtacatgtacgaccagaccagcagcggcaccttccagtacaccctggaggccaccaagagcctgagacagaagcagggcgagggccccatgacctacctgaacaagggccagttctacgccatcaccctgagcgagaccggcgacaacaagtgcttcagacaccccatcagcaaggtgagaagcgtggtgatggtggtgttcagcgaggacaagaacagagacgagcagctgaagtactggaagtactggcacagcagacagcacaccgccaagcagagagtgctggacatcgccgactacaaggagagcttcaacaccatcggcaacatcgaggagatcgcctacaacgccgtgagcttcacctgggacgtgaacgaggaggccaagatcttcatcaccgtgaactgcctgagcaccgacttcagcagccagaagggcgtgaagggcctgcccctgatgatccagatcgacacctacagctacaacaacagaagcaacaagcccatccacagagcctactgccagatcaaggtgttctgcgacaagggcgccgagagaaagatcagagacgaggagagaaagcagaacagaaagaagggcaagggccaggccagccagacccagtgcaacagcagcagcgacggcaagctggccgccatccccctgcagaagaagagcgacatcacctacttcaagaccatgcccgacctgcacagccagcccgtgctgttcatccccgacgtgcacttcgccaacctgcagagaaccggccaggtgtactacaacaccgacgacgagagagagggcggcagcgtgctggtgaagagaatgttcagacccatggaggaggagttcggccccgtgcccagcaagcagatgaaggaggagggcaccaagagagtgctgctgtacgtgagaaaggagaccgacgacgtgttcgacgccctgatgctgaagagccccaccgtgaagggcctgatggaggccatcagcgagaagtacggcctgcccgtggagaagatcgccaagctgtacaagaagagcaagaagggcatcctggtgaacatggacgacaacatcatcgagcactacagcaacgaggacaccttcatcctgaacatggagagcatggtggagggcttcaaggtgaccctgatggagatctag

SEQ ID NO: 217435 - DNA, 1830 bp, Artificial Sequence
  derived and/or modified sequence
atgcccagcgacccccccttcaacaccagaagagcctacaccagcgaggacgaggcctggaagagctacctggagaaccccctgaccgccgccaccaaggccatgatgagcatcaacggcgacgaggacagcgccgccgccctgggcctgctgtacgactactacaaggtgcccagagacaagagactgctgagcgtgagcaaggccagcgacagccaggaggaccaggagaagagaaactgcctgggcaccagcgaggcccagagcaacctgagcggcggcgagaacagagtgcaggtgctgaagaccgtgcccgtgaacctgagcctgaaccaggaccacctggagaacagcaagagagagcagtacagcatcagcttccccgagagcagcgccatcatccccgtgagcggcatcaccgtggtgaaggccgaggacttcacccccgtgttcatggccccccccgtgcactaccccagaggcgacggcgaggagcagagagtggtgatcttcgagcagacccagtacgacgtgcccagcctggccacccacagcgcctacctgaaggacgaccagagaagcacccccgacagcacctacagcgagagcttcaaggacgccgccaccgagaagttcagaagcgccagcgtgggcgccgaggagtacatgtacgaccagaccagcagcggcaccttccagtacaccctggaggccaccaagagcctgagacagaagcagggcgagggccccatgacctacctgaacaagggccagttctacgccatcaccctgagcgagaccggcgacaacaagtgcttcagacaccccatcagcaaggtgagaagcgtggtgatggtggtgttcagcgaggacaagaacagagacgagcagctgaagtactggaagtactggcacagcagacagcacaccgccaagcagagagtgctggacatcgccgactacaaggagagcttcaacaccatcggcaacatcgaggagatcgcctacaacgccgtgagcttcacctgggacgtgaacgaggaggccaagatcttcatcaccgtgaactgcctgagcaccgacttcagcagccagaagggcgtgaagggcctgcccctgatgatccagatcgacacctacagctacaacaacagaagcaacaagcccatccacagagcctactgccagatcaaggtgttctgcgacaagggcgccgagagaaagatcagagacgaggagagaaagcagaacagaaagaagggcaagggccaggccagccagacccagtgcaacagcagcagcgacggcaagctggccgccatccccctgcagaagaagagcgacatcacctacttcaagaccatgcccgacctgcacagccagcccgtgctgttcatccccgacgtgcacttcgccaacctgcagagaaccggccaggtgtactacaacaccgacgacgagagagagggcggcagcgtgctggtgaagagaatgttcagacccatggaggaggagttcggccccgtgcccagcaagcagatgaaggaggagggcaccaagagagtgctgctgtacgtgagaaaggagaccgacgacgtgttcgacgccctgatgctgaagagccccaccgtgaagggcctgatggaggccatcagcgagaagtacggcctgcccgtggagaagatcgccaagctgtacaagaagagcaagaagggcatcctggtgaacatggacgacaacatcatcgagcactacagcaacgaggacaccttcatcctgaacatggagagcatggtggagggcttcaaggtgaccctgatggagatctag

SEQ ID NO: 217436 - DNA, 1878 bp, Artificial Sequence
  derived and/or modified sequence
atgggcaaggacggcagaagcaacaagagactggtggccctggtgcccatgcccagcgacccccccttcaacaccagaagagcctacaccagcgaggacgaggcctggaagagctacctggagaaccccctgaccgccgccaccaaggccatgatgagcatcaacggcgacgaggacagcgccgccgccctgggcctgctgtacgactactacaaggtgcccagagacaagagactgctgagcgtgagcaaggccagcgacagccaggaggaccaggagaagagaaactgcctgggcaccagcgaggcccagagcaacctgagcggcggcgagaacagagtgcaggtgctgaagaccgtgcccgtgaacctgagcctgaaccaggaccacctggagaacagcaagagagagcagtacagcatcagcttccccgagagcagcgccatcatccccgtgagcggcatcaccgtggtgaaggccgaggacttcacccccgtgttcatggccccccccgtgcactaccccagaggcgacggcgaggagcagagagtggtgatcttcgagcagacccagtacgacgtgcccagcctggccacccacagcgcctacctgaaggacgaccagagaagcacccccgacagcacctacagcgagagcttcaaggacgccgccaccgagaagttcagaagcgccagcgtgggcgccgaggagtacatgtacgaccagaccagcagcggcaccttccagtacaccctggaggccaccaagagcctgagacagaagcagggcgagggccccatgacctacctgaacaagggccagttctacgccatcaccctgagcgagaccggcgacaacaagtgcttcagacaccccatcagcaaggtgagaagcgtggtgatggtggtgttcagcgaggacaagaacagagacgagcagctgaagtactggaagtactggcacagcagacagcacaccgccaagcagagagtgctggacatcgccgactacaaggagagcttcaacaccatcggcaacatcgaggagatcgcctacaacgccgtgagcttcacctgggacgtgaacgaggaggccaagatcttcatcaccgtgaactgcctgagcaccgacttcagcagccagaagggcgtgaagggcctgcccctgatgatccagatcgacacctacagctacaacaacagaagcaacaagcccatccacagagcctactgccagatcaaggtgttctgcgacaagggcgccgagagaaagatcagagacgaggagagaaagcagaacagaaagaagggcaagggccaggccagccagacccagtgcaacagcagcagcgacggcaagctggccgccatccccctgcagaagaagagcgacatcacctacttcaagaccatgcccgacctgcacagccagcccgtgctgttcatccccgacgtgcacttcgccaacctgcagagaaccggccaggtgtactacaacaccgacgacgagagagagggcggcagcgtgctggtgaagagaatgttcagacccatggaggaggagttcggccccgtgcccagcaagcagatgaaggaggagggcaccaagagagtgctgctgtacgtgagaaaggagaccgacgacgtgttcgacgccctgatgctgaagagccccaccgtgaagggcctgatggaggccatcagcgagaagtacggcctgcccgtggagaagatcgccaagctgtacaagaagagcaagaagggcatcctggtgaacatggacgacaacatcatcgagcactacagcaacgaggacaccttcatcctgaacatggagagcatggtggagggcttcaaggtgaccctgatggagatctag

SEQ ID NO: 217437 - protein, 589 aa, Artificial Sequence
  derived and/or modified sequence
MSSSYWSETSSSSCGTQQLPEVLQCQPQHYHCYHQSSQAQQPPEKNVVYERVRTYSGPMNKVVQALDPFNSREVLSPLKTTSSYQNLVWSDHSQELHSPTLKISTCAPSTLHITQNTEQELHSPTVKLTTYPQTTIRKYVVQNPEQEPLSQFLRGSHFFPGNNVIYEKTIRKVEKLNTDQGCHPQAQCHHHIIQQPQVIHSAHWQQPDSSQQIQAITGNNPISTHIGNELCHSGSSQICEQVIIQDDGPEKLDPRYFGELLADLSRKNTDLYHCLLEHLQRIGGSKQDFESTDESEDIESLIPKGLSEFTKQQIRYILQMRGMSDKSLRLVLSTFSNIREELGHLQNDMTSLENDKMRLEKDLSFKDTQLKEYEELLASVRANNHQQQQGLQDSSSKCQALEENNLSLRHTLSDMEYRLKELEYCKRNLEQENQNLRMQVSETCTGPMLQAKMDEIGNHYTEMVKNLRMEKDREICRLRSQLNQYHKDVSKREGSCSDFQFKLHELTSLLEEKDSLIKRQSEELSKLRQEIYSSHNQPSTGGRTTITTKKYRTQYPILGLLYDDYEYIPPGSETQTIVIEKTEDKYTCP

SEQ ID NO: 217438 - protein, 306 aa, Artificial Sequence
  derived and/or modified sequence
MSSSYWSETSSSSCGTQQLPEVLQCQPQHYHCYHQSSQAQQPPEKNVVYERVRTYSGPMNKVVQALDPFNSREVLSPLKTTSSYQNLVWSDHSQELHSPTLKISTCAPSTLHITQNTEQELHSPTVKLTTYPQTTIRKYVVQNPEQEPLSQFLRGSHFFPGNNVIYEKTIRKVEKLNTDQGCHPQAQCHHHIIQQPQVIHSAHWQQPDSSQQIQAITGNNPISTHIGNELCHSGSSQICEQVIIQDDGPEKLDPRYFGELLADLSRKNTDLYHCLLEHLQRIGRKQSLSSTYTIRHGIQTKRTGIL

SEQ ID NO: 217439 - DNA, 1770 bp, Artificial Sequence
  derived and/or modified sequence
atgagttctagttattggagtgagactagcagtagcagttgtggcacccagcagctgccagaggtgctacagtgccaaccccagcattaccactgctaccaccagtctagtcaggcccagcagcctcctgagaagaacgtagtatacgaacgagttcgcacatatagcggacccatgaacaaggttgtacaggctctggatccatttaactcacgggaggtcctcagcccattgaaaacaacttcaagctaccaaaaccttgtttggtccgatcacagccaggaactacacagcccaactctgaaaatctccacctgcgcgcctagcaccttgcacattacacaaaataccgagcaggaactgcattcgccaaccgtcaagctgacaacatatccacagacaaccatcagaaaatacgtggttcagaacccagagcaggaacccctctcccaattcctgagagggtcacacttttttcccgggaacaatgttatttacgagaagacaatcagaaaggtcgagaagctaaataccgatcagggctgccaccctcaagcgcaatgtcaccaccacattatccagcagccgcaggttattcactccgcgcactggcagcaacctgattcaagccagcagatacaggccatcacagggaataaccctattagcacacatattggaaacgagctgtgtcactctggctcgagccagatttgtgagcaggtgatcattcaagatgatggcccagagaaactggatcctcgatattttggcgagctgctggcggacctcagtcgcaaaaacactgacctctatcattgcctgctggagcacttacagagaatcgggggatcaaaacaggacttcgaaagcactgatgagtccgaggacatcgagagcctcattccaaaggggctgagcgaatttacaaaacagcagattagatatattctgcaaatgagaggcatgtccgacaagtccctgcgtctggtcctcagcactttctctaatattagagaggagttgggacacttgcagaacgacatgacatcccttgagaatgacaagatgcggcttgagaaagatctgagcttcaaggacacgcagctcaaagagtacgaagaattactcgcctcagttcgagccaacaaccaccagcagcaacagggacttcaggacagttcatccaagtgtcaggccctcgaagagaataacttgtcacttagacacacgctgtccgatatggagtatcgcctaaaggaactcgaatactgtaagcgcaacctggagcaggagaaccaaaatctgcgcatgcaagtgagcgagacatgcaccggcccaatgctgcaggccaaaatggatgaaattggcaatcactacaccgagatggtaaagaacctgcgcatggagaaggatcgtgagatttgtaggctccgctcacagcttaatcagtaccataaagacgttagtaagcgggaaggctcctgttctgattttcaattcaagcttcacgaacttaccagcctgctcgaggagaaggattcccttatcaaacggcaaagcgaggagctgtcaaagcttagacaggagatctatagttcccataaccagcctagcacgggcggcaggacaaccatcactactaagaaatatcggacacaatacccaatactgggcctactctacgacgactatgaatatatccccccaggatccgagactcaaactatagtcatcgagaagactgaagataagtatacttgtccatag

SEQ ID NO: 217440 - DNA, 921 bp, Artificial Sequence
  derived and/or modified sequence
atgtctagctcttattggtcagaaacatctagcagttcttgcggcacacagcaactgcctgaggtcctccagtgtcagccacagcactatcactgctaccatcaaagttcacaagctcagcagcctccggaaaaaaatgtggtttatgaaagggtgagaacatattccgggcccatgaataaggtagtgcaggcccttgacccattcaacagccgagaagtgttgagccctctcaagaccaccagttcttaccaaaacctggtgtggagcgatcactcgcaagagctccattcgcccactctgaagatttccacctgtgccccctctacattgcacataacgcagaacacagagcaagagctgcattctcctaccgtcaaactcactacctacccacagacaactatcaggaagtacgtagtccagaatcctgaacaggaacccctcagccaattcctgagaggctcacacttctttccaggcaataatgtgatttatgagaagaccattcgcaaagtggaaaaactgaacacggatcaagggtgccatcctcaagcccaatgccaccaccatattatacagcaaccccaggtgattcactctgcacactggcaacagcctgacagcagtcagcagattcaggcaattacgggaaacaacccaatctcgacacacataggcaatgagctgtgccattccggttcatctcagatatgcgagcaagttatcatccaggacgacggcccggagaaactggacccccgatatttcggtgaactgctggctgacctgtctcgcaaaaataccgacctctaccactgcctgctggaacacctccagcgtattgggcgcaaacagtccttgagctctacctacaccattaggcacggaattcagacaaaaagaaccgggatattatag

SEQ ID NO: 217441 - DNA, 1770 bp, Artificial Sequence
  derived and/or modified sequence
atgagcagcagctactggagcgagaccagcagcagcagctgtggcacccagcagctgcctgaggtgctgcagtgccagccccagcactaccactgctaccaccagagcagccaggcccagcagcccccagagaagaatgtggtgtatgagcgggtgaggacctacagcggccccatgaacaaggtggtgcaggccctggaccccttcaacagccgggaggtgctgagccccctgaagaccaccagcagctaccagaacctggtgtggagcgaccacagccaggagctgcacagccccaccctgaagatcagcacctgtgcccccagcaccctgcacatcacccagaacacagagcaggagctgcacagccccaccgtgaagctgaccacctacccccagaccaccatcagaaaatatgtggtgcagaaccctgagcaggagcccctgagccagttcctgcggggcagccacttcttccctggcaacaacgtcatctatgagaagaccatcaggaaggtggagaagctgaacacagaccagggctgccacccccaggcccagtgccaccaccacatcatccagcagccccaggtgatccacagcgcccactggcagcagcctgacagcagccagcagatccaggccatcactggaaacaaccccatcagcacccacatcggaaatgagctgtgccacagcggcagcagccagatctgtgagcaggtgatcatccaggatgatggccctgagaagctggacccccgctactttggagagctgctggccgacctgagcaggaagaacacagacctgtaccactgcctgctggagcacctgcagagaattggaggcagcaagcaggactttgagagcacagatgaaagtgaggacatcgagagcctcatccccaagggcctgtctgagttcaccaagcagcagatccgctacatcctgcagatgaggggcatgtctgacaagagcctgcggctggtgctgagcaccttcagcaacatccgggaggagctgggccacctgcagaatgacatgaccagcctggagaatgacaagatgaggctggagaaggacctgtccttcaaggacacccagctgaaggagtatgaggagctgctggcctctgtgcgggccaacaaccaccagcagcagcagggcctgcaggacagcagcagcaagtgccaggccctggaggagaacaacctgagcctgcggcacaccctgagtgacatggagtaccgcctgaaggagctggagtactgcaagaggaacctggagcaggagaaccagaacctgaggatgcaggtgtctgagacctgcaccggccccatgctgcaggccaagatggatgagatcggcaaccactacacagagatggtgaagaacctgaggatggagaaggaccgggagatctgccgcctgcggagccagctgaaccagtaccacaaggatgtgtccaagcgggagggcagctgcagcgacttccagttcaagctgcacgagctgaccagcctgctggaggagaaggacagcctcatcaagaggcagagcgaggagctgagcaagctgcggcaggagatctacagcagccacaaccagcccagcactggaggccgcaccaccatcaccaccaagaagtaccgcacccagtaccccatcctgggcctgctgtatgatgattatgagtacatccccccaggcagcgagacccagaccatcgtgattgagaagacagaggacaagtacacctgcccctag

SEQ ID NO: 217442 - DNA, 921 bp, Artificial Sequence
  derived and/or modified sequence
atgagcagcagctactggagcgagaccagcagcagcagctgtggcacccagcagctgcctgaggtgctgcagtgccagccccagcactaccactgctaccaccagagcagccaggcccagcagcccccagagaagaatgtggtgtatgagcgggtgaggacctacagcggccccatgaacaaggtggtgcaggccctggaccccttcaacagccgggaggtgctgagccccctgaagaccaccagcagctaccagaacctggtgtggagcgaccacagccaggagctgcacagccccaccctgaagatcagcacctgtgcccccagcaccctgcacatcacccagaacacagagcaggagctgcacagccccaccgtgaagctgaccacctacccccagaccaccatcagaaaatatgtggtgcagaaccctgagcaggagcccctgagccagttcctgcggggcagccacttcttccctggcaacaacgtcatctatgagaagaccatcaggaaggtggagaagctgaacacagaccagggctgccacccccaggcccagtgccaccaccacatcatccagcagccccaggtgatccacagcgcccactggcagcagcctgacagcagccagcagatccaggccatcactggaaacaaccccatcagcacccacatcggaaatgagctgtgccacagcggcagcagccagatctgtgagcaggtgatcatccaggatgatggccctgagaagctggacccccgctactttggagagctgctggccgacctgagcaggaagaacacagacctgtaccactgcctgctggagcacctgcagagaattggaaggaagcagagcctgagcagcacctacaccatccgccacggcatccagaccaagaggacaggcatcctgtag

SEQ ID NO: 217443 - DNA, 1770 bp, Artificial Sequence
  derived and/or modified sequence
atgagcagcagctactggagcgagaccagcagcagcagctgcggcacccagcagcttcccgaggtgctgcagtgccagccccagcactaccattgttatcatcagtcctcacaggcccagcagccaccagagaagaatgttgtgtacgaacgcgttcggacttactcaggccccatgaataaggtggtgcaggccttggatcccttcaatagtagggaagtgttgtccccactcaagacaaccagcagctatcagaatcttgtgtggagtgaccactcacaagaactgcattctcccaccttaaaaatttctacctgcgcaccgagtacgttgcacatcacacagaacaccgaacaggagctgcactctcccaccgttaagttgacgacttaccctcagactactatcagaaagtatgtggtgcagaaccccgagcaagagcctcttagtcagttcttgcgaggttcccatttcttccccggaaacaacgttatttatgagaagaccattaggaaagtcgagaaactcaatactgaccaggggtgccatcctcaggcgcagtgccatcaccatattatccagcagccacaggtcatccattccgctcactggcagcagcccgacagctcgcagcagattcaggccatcactggaaacaatccaatttctactcacatcgggaacgaactgtgtcattccggatccagccaaatatgtgagcaagtcatcatccaggacgacggacccgagaaactagatccgaggtattttggcgagctgctggcagatctttcgaggaagaatacagatctctaccattgcttactagagcatctgcaaaggatcggcggttctaagcaggattttgaaagtacagacgagtctgaggacatcgaaagtctgattccaaaggggttgtccgagttcactaaacagcagattcgctatattctgcagatgcgtgggatgtctgacaagtcgttgcgtttagtgctttcaactttttctaatattcgagaagagctaggccatttacagaacgacatgacatccttagagaacgacaagatgcgacttgaaaaagatctgtcattcaaagacacgcagttgaaagagtatgaggagctgctggccagtgttagagccaataatcaccaacaacagcaaggcctccaggacagctcctcaaagtgtcaggctttggaggagaacaacttatccctccgccacaccctgtccgacatggagtaccgactcaaagagctcgaatattgcaaaaggaacctggagcaagaaaaccagaacctgagaatgcaggtcagtgaaacctgtaccggcccgatgttacaggcgaagatggacgagatcgggaatcattatactgagatggtgaagaaccttaggatggaaaaggatcgcgaaatctgtcgcctgagatcccaactgaaccagtaccacaaggacgttagcaaaagagaaggatcttgtagtgacttccaatttaagctccacgaacttacttcactcttggaagaaaaagatagtttaatcaaacggcagagcgaagagctgagtaagctgaggcaggagatctactcttcccataatcagcccagcacgggcggacgaacgaccatcacaacaaagaagtatcgcacacagtacccaatcctggggctgctctacgacgactatgagtacatccccccgggatcggagacacagacaattgtcatcgagaagactgaggacaaatacacgtgtccttag

SEQ ID NO: 217444 - DNA, 921 bp, Artificial Sequence
  derived and/or modified sequence
atgagcagcagctactggagcgagaccagcagcagcagctgcggcactcagcagttgccggaggtcttgcagtgccagccccaacactaccattgctaccaccaatcatcccaagcacagcaaccacccgagaaaaatgttgtgtatgagcgtgtcagaacctattcgggacccatgaataaagtcgtgcaggcattagatcccttcaattcaagggaagtactgtctccgctaaagacaacgtcatcctaccaaaatctggtctggagcgatcattcccaggagttgcattcccctacactaaaaattagtacttgtgcaccctctaccctgcacatcactcagaataccgaacaagagcttcacagcccgaccgttaagctgacgacctacccacagaccaccattagaaagtacgtggtgcagaatccagagcaagagccgctgagccagtttctccgcggcagccacttttttccaggcaacaatgtcatatatgaaaagacaatcaggaaagtggagaagctgaacacagaccagggctgtcatccccaggctcaatgccaccatcatatcatccagcaacctcaggtcatccactcagcgcattggcagcagccagatagtagtcagcagattcaagctatcacagggaacaacccaatttctacccatatcggtaacgagttgtgccattctggaagcagccagatttgtgagcaggtgatcattcaagacgatggccccgaaaaactcgacccaagatatttcggcgagctcttagccgatctctctcggaaaaacaccgatttgtaccactgcctcctggagcacctgcagaggattggacgcaagcaatcactctcttctacatacacaattcgacatggtattcagactaaacgtaccggtattctgtag

SEQ ID NO: 217445 - DNA, 3941 bp, Artificial Sequence
  derived and/or modified sequence
accatttcctggagcaatgtcacagggtggctccattttccatttgagctcaaatattttgctgcttcctctgtagctgccagacctgctcttgctgctgctcaggtagaacatctgggaggtcccttgctgaccactggaagaagatgagctcgagctattggagtgagacgagcagcagcagctgtggaacccagcagctcccagaggtgctgcagtgccagccccagcattaccactgctaccatcagtcaagccaagcccagcagcctccagaaaaaaatgtagtgtatgagcgagtgaggacctacagtgggcccatgaacaaggtggtgcaggccttggaccccttcaactcacgggaagtgctctcccctctcaaaaccacctcctcctaccaaaatttggtttggagcgaccattctcaggaactccattctccaactttaaaaatatctacatgtgccccaagtactctacatataacccaaaatactgaacaggaacttcattctccaacagtgaaacttactacatatccacagaccactattaggaaatatgtagtacaaaatcctgaacaggaaccactgtctcaattcctaagaggaagccatttcttcccaggaaacaatgttatttatgaaaaaacaataagaaaagtggagaagctaaatactgatcaggggtgccatcctcaggctcaatgccatcatcacattatccaacagccccaggtcatccactctgcacactggcaacaacctgattctagccagcaaatccaagccatcacaggaaataatccaatttctacacatattggaaatgaactgtgccatagtggatcaagccagatttgtgagcaggtgataattcaggatgatggccctgaaaaattggaccccagatattttggagagttgcttgctgatctgagccgtaagaatacggatctatatcactgcttattagaacatttgcagagaattggaggaagcaaacaggactttgagtctacagatgagtcggaagacattgaatcattgattcctaaaggattatcagagtttacaaaacagcaaatacgctacattctgcagatgaggggtatgtctgataagtcactccgactagtgctgtccacatttagcaacatacgggaggagcttggacatcttcaaaatgatatgacatcactggaaaatgacaagatgagacttgagaaagatttatcattcaaagacactcaattaaaagagtacgaagaactcttggcatcagtgagagcaaataatcaccagcagcagcaaggacttcaagactcaagttcaaaatgccaggcattggaagaaaacaatctctctcttcgacatacactatcagacatggaatacagactaaaagaactggaatattgtaaacgtaatttagagcaagagaatcaaaaccttagaatgcaggtttctgagacttgcacaggcccaatgttgcaggctaaaatggatgagattggcaaccactacacggagatggtaaaaaacttgagaatggagaaagatagagagatctgcagactgaggtcccaattaaaccagtaccataaagatgtttcaaagagagaaggaagttgtagtgacttccaatttaagcttcatgaactgacaagcttgctggaagagaaggattccctcataaagcgtcagtcagaggaactctccaagttgcggcaagaaatatattcctctcataaccaaccctccactggtggaaggactactattaccactaaaaagtacaggacacaatatccaatcctaggcctcctatatgatgactacgaatatataccaccaggtagtgaaacacagactattgtgattgagaaaacagaagacaaatacacttgtccatgaatggatccactttaaagtattacaactcaaagccgttttttttttgtgtgtgtgtctctgcattagtactttgttatttttccatcactaaaggccaatcagaatttggaaccatgctgctacccaagaaatctaatggaatgaattagttctgtagatgacaatttcttcacccatttatgagacctaaatcttttccataacactcatgtattcagtataacaacatactaactgaaagagggacctgattgtttaaagtttgattgcagacactgtagaacataactcattatgtttcagataaggtaactcctagatatcaaactaatttgttggggtagagattttacaagtcatgccattagaagattttctctgatattatatgtgcagttcagttacaagatgaaatcatgtttttttaacaaaagagataaaatacaattgaagcaaaaaataacagctagtatataatatatacagtctgtatttgcttttcacagtaggcctgatgactaaaagatatgctttattacacgctattttcacctcttgaaagtcaaaggtgatgattaatttcatttagcagggaagtggaataatatcttttgaaataactaagtccactaaattatacagtatgctattctggttctaagtacatattagtcccttggcaaatctgttctttcaaagcataccttccccaaatgagcctacctacttcttaaaaaacatataacacaatgtggtagtagtaggtgtaaggaaggtaagttttttcatagtggtatgcaaacatatcattgaaatattacatagatataaagacttagggaataaaaatagcagcaacaaatacttgatagatttatcctacttgggagaaatattttgtagcagagtatttagtatacttagaagttgatttagcaattaggctttaatgaccttacaaagtgaacataactgaacacaagtattttttcaatgcaagatgaggatgaaaattttacatttcaacccatctggctaaagttaagacttagcaaaaattaaaatgttgcctttgtccaagtatagattaaggcaacaaacatatttgggtgtgtaatttgaagttttggactgaaatatctttgcaagtatccacataaaattctgtaatgccttataattatattctaataattatgcattatactaagacaccattaagaacagttgaggcactacactaaatcaaaccataaatgaggaaaaaacttttaatgttcttttctagaagtgttcaaataggtcttgatatgaagctaaaagccttatttatattatcttaatatttcggctaaaatgttaagctccataacatgaattgatacaattccaattttatcaatattttgtgatagaaaaatgttaatattattcatgagctatacagtccttacattttttcccttggtgtaggaacaacggaggagtttctcctctgctaactattcatatatgtaactgtaacaaaagtgtactatgttatgcacacattacaaataatataaggggaagttttattagcttagtaggaaattgttattattaaggtttaaaaatgagaacaggtgtgagttttccaaaatacttaaaaataatagtgtcaaaaattcaggggcagttaaggagtcatggatggaactagaggtcactatattaagtgacataagccagaaacagacaaacattgcatgttctcaattatttgcgggatctaaaagtcaaaacaattgaactcatggatatagagagtagaaggatggttactagtggctgggaaaaggggtgtgcgaggggaactggggatgcttaatgtgtacaaaaactatgtagttagaaagtataaataagacctagtatttgatagcacaaccgggtgagtatagtcaataatagcttaattgtacaaataactaagagtataattggattgtttgtaacacaaataaatacttgagtggatggata

SEQ ID NO: 217446 - DNA, 1067 bp, Artificial Sequence
  derived and/or modified sequence
accatttcctggagcaatgtcacagggtggctccattttccatttgagctcaaatattttgctgcttcctctgtagctgccagacctgctcttgctgctgctcaggtagaacatctgggaggtcccttgctgaccactggaagaagatgagctcgagctattggagtgagacgagcagcagcagctgtggaacccagcagctcccagaggtgctgcagtgccagccccagcattaccactgctaccatcagtcaagccaagcccagcagcctccagaaaaaaatgtagtgtatgagcgagtgaggacctacagtgggcccatgaacaaggtggtgcaggccttggaccccttcaactcacgggaagtgctctcccctctcaaaaccacctcctcctaccaaaatttggtttggagcgaccattctcaggaactccattctccaactttaaaaatatctacatgtgccccaagtactctacatataacccaaaatactgaacaggaacttcattctccaacagtgaaacttactacatatccacagaccactattaggaaatatgtagtacaaaatcctgaacaggaaccactgtctcaattcctaagaggaagccatttcttcccaggaaacaatgttatttatgaaaaaacaataagaaaagtggagaagctaaatactgatcaggggtgccatcctcaggctcaatgccatcatcacattatccaacagccccaggtcatccactctgcacactggcaacaacctgattctagccagcaaatccaagccatcacaggaaataatccaatttctacacatattggaaatgaactgtgccatagtggatcaagccagatttgtgagcaggtgataattcaggatgatggccctgaaaaattggaccccagatattttggagagttgcttgctgatctgagccgtaagaatacggatctatatcactgcttattagaacatttgcagagaattggaagaaaacaatctctctcttcgacatacactatcagacatggaatacagactaaaagaactggaatattgtaa

SEQ ID NO: 217447 - DNA, 1770 bp, Artificial Sequence
  derived and/or modified sequence
atgtctagtagttactggagcgaaacatcttcctcttcatgcggaacgcaacagcttcccgaagttctccagtgccagccgcagcactaccactgctaccaccagagcagccaggcccaacagccccctgaaaagaatgttgtgtatgagagggtacggacttactccggccctatgaacaaagtggttcaggctctagaccccttcaattcaagagaggtactgagtcctctcaagactactagcagctaccagaatttggtgtggagcgaccacagccaggaactccacagtcccactttgaagatctcgacctgcgcacctagcacccttcatatcacacagaataccgaacaggagctgcattcccctactgtaaaattaacaacctaccctcagactaccatccgcaagtacgttgtacagaaccctgaacaagaacctctgtctcaattcctcaggggatcccatttcttcccagggaacaatgtaatatacgagaaaaccatccggaaggtggaaaagctgaacacagaccaggggtgccatccgcaagcccagtgccatcaccacataattcagcagccacaggtgattcattccgctcattggcagcagcctgattcctcacagcagattcaggccattacaggcaataatccaatttccacccatatcggaaatgaactctgccattccggatcttcacaaatatgcgaacaagttattatacaggacgacggcccagagaaacttgatccccgatattttggcgagctccttgccgacctgagtcgcaagaataccgatctgtatcactgccttctggaacatttgcagcgcatcggtggcagtaagcaggacttcgagtccacagacgagagcgaggatatcgaaagcctaatccccaagggcctgtctgagttcaccaagcagcaaatacgatatatcctgcaaatgagaggcatgagtgataagtccttgaggctggtgctttctaccttcagcaacattcgagaagagctgggacaccttcaaaacgatatgacatcgctggaaaatgataagatgaggctagagaaggacctctcatttaaggatacccagttaaaagaatacgaggagctgctcgcctcagtgcgtgcaaacaatcatcagcagcaacagggtctgcaagactcctctagtaaatgccaagcactggaggaaaacaatttgtcacttaggcatactttgtctgatatggagtatcgcctcaaagaacttgagtactgtaagcgtaacctggaacaagagaatcagaaccttagaatgcaggtgagcgagacgtgcaccgggccaatgctgcaggccaaaatggacgaaataggcaatcactataccgaaatggtcaagaatctgcgcatggaaaaagatagagaaatttgcaggctacgcagtcagctcaatcaatatcataaagatgtcagtaaacgcgaagggtcctgctcagatttccagtttaaattacacgaactgacttctctgctggaggagaaggatagcctgatcaaaaggcagtccgaggaattatctaagcttcgccaggagatctactcctcacataaccaaccatccaccggagggcgtacaacaattaccacaaaaaagtatcggacccaatatcctatccttgggttactctatgacgactatgaatatattcctccaggcagtgaaacacaaaccattgtcatcgagaagacggaagataagtacacttgcccatag

SEQ ID NO: 217448 - DNA, 921 bp, Artificial Sequence
  derived and/or modified sequence
atgtccagcagctactggagcgaaaccagttcctcttcttgcggaacacagcagctgcctgaagtacttcagtgtcagccgcagcactaccattgttaccatcaatcttcccaagcacagcagccacccgagaaaaatgttgtttatgaacgggttagaacctacagtggcccaatgaacaaagtagtacaggccctggatccatttaattctcgggaagtgcttagtcctctgaaaaccacatcatcctatcaaaaccttgtgtggtccgatcacagccaggaactgcactcgccaactctgaagatttctacgtgtgcaccatctaccctgcatatcactcaaaatacagagcaggagcttcattctccaaccgtaaagctgaccacctaccctcagaccactatacgcaaatacgttgtacagaaccctgaacaggagccactatcccagtttttaaggggctcccacttcttcccaggaaataatgtgatctatgagaagaccattcggaaagtggagaaactgaacacagaccagggttgtcacccccaggcccagtgccatcatcatataattcagcagccccaagtcatccattcagcacactggcagcagcccgatagtagtcagcagatccaggctatcaccggaaataaccccattagcacccacataggcaatgagctgtgccacagcgggtcatctcaaatctgtgaacaggttattatccaggatgatggaccggaaaagttggaccctcgatactttggcgagttgctcgccgatctgtcgcgaaagaataccgacctatatcactgccttttggaacacttacaacgcatcggcagaaagcagtcactttcttcaacttacaccattcgccatggaatccagactaaacgtacaggtattttatag

SEQ ID NO: 217449 - DNA, 1770 bp, Artificial Sequence
  derived and/or modified sequence
atgagcagcagctactggagcgagaccagcagcagcagctgcggcacccagcagctgcccgaggtgctgcagtgccagccccagcactaccactgctaccaccagagcagccaggcccagcagccccccgagaagaacgtggtgtacgagagagtgagaacctacagcggccccatgaacaaggtggtgcaggccctggaccccttcaacagcagagaggtgctgagccccctgaagaccaccagcagctaccagaacctggtgtggagcgaccacagccaggagctgcacagccccaccctgaagatcagcacctgcgcccccagcaccctgcacatcacccagaacaccgagcaggagctgcacagccccaccgtgaagctgaccacctacccccagaccaccatcagaaagtacgtggtgcagaaccccgagcaggagcccctgagccagttcctgagaggcagccacttcttccccggcaacaacgtgatctacgagaagaccatcagaaaggtggagaagctgaacaccgaccagggctgccacccccaggcccagtgccaccaccacatcatccagcagccccaggtgatccacagcgcccactggcagcagcccgacagcagccagcagatccaggccatcaccggcaacaaccccatcagcacccacatcggcaacgagctgtgccacagcggcagcagccagatctgcgagcaggtgatcatccaggacgacggccccgagaagctggaccccagatacttcggcgagctgctggccgacctgagcagaaagaacaccgacctgtaccactgcctgctggagcacctgcagagaatcggcggcagcaagcaggacttcgagagcaccgacgagagcgaggacatcgagagcctgatccccaagggcctgagcgagttcaccaagcagcagatcagatacatcctgcagatgagaggcatgagcgacaagagcctgagactggtgctgagcaccttcagcaacatcagagaggagctgggccacctgcagaacgacatgaccagcctggagaacgacaagatgagactggagaaggacctgagcttcaaggacacccagctgaaggagtacgaggagctgctggccagcgtgagagccaacaaccaccagcagcagcagggcctgcaggacagcagcagcaagtgccaggccctggaggagaacaacctgagcctgagacacaccctgagcgacatggagtacagactgaaggagctggagtactgcaagagaaacctggagcaggagaaccagaacctgagaatgcaggtgagcgagacctgcaccggccccatgctgcaggccaagatggacgagatcggcaaccactacaccgagatggtgaagaacctgagaatggagaaggacagagagatctgcagactgagaagccagctgaaccagtaccacaaggacgtgagcaagagagagggcagctgcagcgacttccagttcaagctgcacgagctgaccagcctgctggaggagaaggacagcctgatcaagagacagagcgaggagctgagcaagctgagacaggagatctacagcagccacaaccagcccagcaccggcggcagaaccaccatcaccaccaagaagtacagaacccagtaccccatcctgggcctgctgtacgacgactacgagtacatcccccccggcagcgagacccagaccatcgtgatcgagaagaccgaggacaagtacacctgcccctag

SEQ ID NO: 217450 - DNA, 921 bp, Artificial Sequence
  derived and/or modified sequence
atgagcagcagctactggagcgagaccagcagcagcagctgcggcacccagcagctgcccgaggtgctgcagtgccagccccagcactaccactgctaccaccagagcagccaggcccagcagccccccgagaagaacgtggtgtacgagagagtgagaacctacagcggccccatgaacaaggtggtgcaggccctggaccccttcaacagcagagaggtgctgagccccctgaagaccaccagcagctaccagaacctggtgtggagcgaccacagccaggagctgcacagccccaccctgaagatcagcacctgcgcccccagcaccctgcacatcacccagaacaccgagcaggagctgcacagccccaccgtgaagctgaccacctacccccagaccaccatcagaaagtacgtggtgcagaaccccgagcaggagcccctgagccagttcctgagaggcagccacttcttccccggcaacaacgtgatctacgagaagaccatcagaaaggtggagaagctgaacaccgaccagggctgccacccccaggcccagtgccaccaccacatcatccagcagccccaggtgatccacagcgcccactggcagcagcccgacagcagccagcagatccaggccatcaccggcaacaaccccatcagcacccacatcggcaacgagctgtgccacagcggcagcagccagatctgcgagcaggtgatcatccaggacgacggccccgagaagctggaccccagatacttcggcgagctgctggccgacctgagcagaaagaacaccgacctgtaccactgcctgctggagcacctgcagagaatcggcagaaagcagagcctgagcagcacctacaccatcagacacggcatccagaccaagagaaccggcatcctgtag

SEQ ID NO: 217451 - protein, 571 aa, Artificial Sequence
  derived and/or modified sequence
MERAVRVESGVLVGVVCLLLACPATATGPEVAQPEVDTTLGRVRGRQVGVKGTDRLVNVFLGIPFAQPPLGPDRFSAPHPAQPWEGVRDASTAPPMCLQDVESMNSSRFVLNGKQQIFSVSEDCLVLNVYSPAEVPAGSGRPVMVWVHGGALITGAATSYDGSALAAYGDVVVVTVQYRLGVLGFFSTGDEHAPGNQGFLDVVAALRWVQENIAPFGGDLNCVTVFGGSAGGSIISGLVLSPVAAGLFHRAITQSGVITTPGIIDSHPWPLAQKIANTLACSSSSPAEMVQCLQQKEGEELVLSKKLKNTIYPLTVDGTVFPKSPKELLKEKPFHSVPFLMGVNNHEFSWLIPRGWGLLDTMEQMSREDMLAISTPVLTSLDVPPEMMPTVIDEYLGSNSDAQAKCQAFQEFMGDVFINVPTVSFSRYLRDSGSPVFFYEFQHRPSSFAKIKPAWVKADHGAEGAFVFGGPFLMDESSRLAFPEATEEEKQLSLTMMAQWTHFARTGDPNSKALPPWPQFNQAEQYLEINPVPRAGQKFREAWMQFWSETLPSKIQQWHQKQKNRKAQEDL

SEQ ID NO: 217452 - protein, 210 aa, Artificial Sequence
  derived and/or modified sequence
MEQMSREDMLAISTPVLTSLDVPPEMMPTVIDEYLGSNSDAQAKCQAFQEFMGDVFINVPTVSFSRYLRDSGSPVFFYEFQHRPSSFAKIKPAWVKADHGAEGAFVFGGPFLMDESSRLAFPEATEEEKQLSLTMMAQWTHFARTGDPNSKALPPWPQFNQAEQYLEINPVPRAGQKFREAWMQFWSETLPSKIQQWHQKQKNRKAQEDL

SEQ ID NO: 217453 - DNA, 1716 bp, Artificial Sequence
  derived and/or modified sequence
atggagcgagcagtgcgcgtggagtctggagtgctcgtcggggtcgtttgtctgctcctggcatgccctgctacggcaaccggtcctgaggtggcacagccagaggtagacactaccctgggccgggttagaggcagacaggtcggcgttaaaggcactgatagactggtgaatgtctttttggggatacctttcgcacagccgccgctaggacctgatcgattcagcgcacctcaccctgcccagccatgggagggcgtgcgcgatgccagtaccgcaccgcccatgtgtctgcaggatgtcgaatctatgaacagtagccgtttcgtgttgaacggcaaacagcaaatcttttccgtgtccgaggattgcctagtccttaacgtctatagtcccgccgaggtccctgcaggcagcggcaggccagtgatggtgtgggtgcatggcggtgctctgatcacaggggctgctacgtcatatgacggtagcgctcttgccgcctacggggatgttgtggtggtaacagtccaatacagactgggagtgctcggctttttctccacaggtgatgaacacgccccaggaaaccaggggtttttagatgtggtagctgctctcagatgggtgcaggagaacatcgcccctttcgggggcgatctgaattgtgtcaccgtgtttggagggtcggcaggagggagcataatctccggattggtcctgtccccagtggccgcaggtttatttcaccgcgctatcactcaatccggggtaataacgacacccggtattatcgactcccacccatggcctttggcccaaaagatcgctaacaccctggcttgctcctccagcagccctgctgaaatggttcagtgtctgcagcagaaggaaggagaggaactcgtactgagtaaaaagctgaaaaacactatttatcccttgaccgttgatggcaccgtgtttcccaaatctcctaaggagctattgaaggaaaaacccttccactctgtgcccttcttaatgggggtcaacaaccacgaattcagctggctgataccccgcggctggggattattggatacaatggagcagatgagcagagaggacatgcttgctatttctacccccgtccttaccagtctagacgttccaccggaaatgatgccaacagttattgatgagtacctcggatccaactccgatgcccaggctaagtgtcaagcttttcaggaatttatgggagacgtcttcataaacgtgcccaccgtgtcattttcacggtacctgcgggacagtggatcccccgtgtttttttacgagttccagcatcgcccgtcttctttcgccaaaataaaacctgcttgggtgaaggcggaccacggtgctgagggcgccttcgtgttcggtgggccattcttgatggacgaaagtagccgtttggcattccctgaggcaacagaggaagagaagcagttgtccttgactatgatggcccagtggactcatttcgctcggaccggagacccgaactcgaaagccctgcccccttggccccagttcaatcaagctgagcaatatttggagattaacccagtaccccgggcggggcagaaatttcgagaagcatggatgcagttctggtccgaaactttaccgagcaagattcagcagtggcatcaaaagcaaaaaaacaggaaggctcaagaagacctgtag

SEQ ID NO: 217454 - DNA, 1716 bp, Artificial Sequence
  derived and/or modified sequence
atggagagagctgtgcgggtggagagcggcgtgctggtgggcgtggtgtgcctgctgctggcctgcccagccacagccactggacctgaggtggcccagcctgaggtggacaccaccctgggccgggtgcggggccggcaggtgggcgtgaagggcacagaccggctggtgaatgtgttcctgggcatcccctttgcccagccccccctgggccctgaccgcttcagcgccccccacccagcccagccctgggagggcgtgagagatgccagcacagccccacccatgtgcctgcaggatgtggagagcatgaacagcagcagatttgtgctgaatggcaagcagcagatcttctctgtgtctgaggactgcctggtgctgaatgtgtacagccctgctgaggtgcctgctggcagcggccggcctgtgatggtgtgggtgcacggcggggccctgatcaccggggccgccaccagctatgatggcagcgccctggccgcctatggagatgtggtggtggtgacagtgcagtaccgcctgggcgtgctgggcttcttcagcactggagatgagcacgcccctggcaaccagggcttcctggatgtggtggccgccctgcgctgggtgcaggagaacatcgccccctttggaggagacctgaactgtgtgacagtgtttggaggcagcgctgggggcagcatcatcagcggcctggtgctgagccctgtggccgccggcctcttccaccgggccatcacccagagcggggtcatcaccaccccaggcatcatcgacagccacccctggcccctggcccagaagatcgccaacaccctggcctgcagcagcagcagccctgctgagatggtgcagtgcctgcagcagaaggagggggaggagctggtgctgagcaagaagctgaagaacaccatctaccccctgactgtggatggcaccgtcttccccaagagccccaaggagctgctgaaggagaagcccttccacagcgtgcccttcctgatgggcgtgaacaaccacgagttctcctggctgatcccccggggctggggcctgctggacaccatggagcagatgagccgggaggacatgctggccatcagcacccctgtgctgaccagcctggatgtgcccccagagatgatgcccaccgtgattgatgagtacctgggcagcaacagtgatgcccaggccaagtgccaggccttccaggagttcatgggagatgtgttcatcaacgtgcccaccgtgtccttcagccgctacctgcgggacagcggcagccctgtgttcttctatgagttccagcaccggcccagcagctttgccaagatcaagccagcctgggtgaaggctgaccacggggctgagggcgcctttgtgtttggaggccccttcctgatggatgagagcagccggctggccttccctgaggccacagaggaggagaagcagctgagcctgaccatgatggcccagtggacccactttgccaggactggagaccccaacagcaaggccctgcccccctggccccagttcaaccaggccgagcagtacctggagatcaaccctgtgcccagggctggccagaagttccgggaggcctggatgcagttctggagcgagaccctgcccagcaagatccagcagtggcaccagaagcagaagaacaggaaggcccaggaggacctgtag

SEQ ID NO: 217455 - DNA, 1716 bp, Artificial Sequence
  derived and/or modified sequence
atggagcgggccgtgcgggtggagagcggcgtgctggtgggcgtggtttgtctgctacttgcctgtcctgccaccgccacgggacctgaggtggcacagcctgaggtggacaccacccttggacgtgttcgggggagacaggtgggggtgaagggtacggatagacttgtaaacgtgttcctggggatcccgtttgcccagccccccctcggtccagaccgcttttctgctccccatccagcccagccctgggagggcgtccgggatgcctccaccgccccccccatgtgccttcaggatgttgagtccatgaatagtagtaggtttgtcctcaacggaaaacagcaaattttttccgtatccgaagattgtttggttttaaacgtttatagccctgctgaggtacccgcaggctctggcagacctgtgatggtctgggtgcacgggggtgccttgatcacaggggctgccacctcctacgacggcagtgcgttggctgcatacggcgacgtggttgtcgtgaccgtccaatatagactgggtgtgcttggattctttagtacgggggatgaacatgcaccgggtaaccagggctttctggatgtcgttgccgcacttcggtgggtacaggagaacattgctcccttcggcggggacctgaattgcgtaaccgtgttcggagggtctgctggcgggtccatcataagtgggctcgtgctgagccctgtggctgccggcctcttccaccgcgccatcactcagagcggcgtgatcactacacctggcattatcgactcacatccttggcccctggcccagaaaattgctaacactctagcctgtagtagtagttccccggcggagatggttcagtgcctacagcagaaggagggagaggagctcgtcctttctaaaaagcttaaaaacacaatctacccactgactgtggacggaaccgtttttcccaaaagccccaaagaactcttaaaggagaagcccttccacagcgttccctttttgatgggagttaataaccacgaatttagctggcttattccccggggatggggactactagatacgatggagcagatgtccagggaagatatgctggcaatttcaacccccgtcctgacttcactcgatgtgccacctgaaatgatgccaacggttatagacgagtatctgggaagcaactccgatgcacaggcaaagtgtcaggcttttcaggagttcatgggagacgtgttcattaacgtgccaaccgtgtctttcagcagatatctgagggattctggcagccccgtcttcttttacgagttccaacaccgacccagcagcttcgccaagattaagcccgcttgggtgaaggccgatcacggggcagagggtgcttttgtgttcggtggtccattcttaatggatgagagtagtaggctcgcctttcctgaagccacagaggaggaaaagcaactttccctgacaatgatggctcagtggacccattttgctcgcacaggagatccaaattctaaagcactacctccttggccccaattcaatcaagcggaacagtaccttgaaatcaatcctgttcccagagcgggacagaagtttcgagaagcctggatgcagttctggagcgagaccctgcccagcaaaattcagcaatggcatcagaagcagaagaacagaaaggcccaggaggatctgtag

SEQ ID NO: 217456 - DNA, 1716 bp, Artificial Sequence
  derived and/or modified sequence
atggaacgcgctgtgagagtggagagcggtgtgctcgtcggtgtcgtatgcctgctgttggcgtgcccagccacggcaaccggtcctgaagttgcccaaccggaggtggatactaccctgggaagagtgaggggtagacaagttggcgtgaaggggacagatcgactagtaaatgtatttctggggatcccttttgcacagcccccactgggtcccgatcgtttcagcgcccctcatccagcccagccgtgggagggggtgcgggatgcgtcaactgcgcctccgatgtgtttgcaggatgtggagtccatgaacagcagtcggtttgtactgaacggtaaacagcagatcttttccgtctctgaggactgcctcgtattgaacgtgtacagcccggcagaggtccccgctggcagcggaagacctgttatggtttgggtgcatggaggcgcactgattaccggcgcagcaaccagctacgatgggagcgccctcgccgcttacggcgatgtggtggtcgtgaccgtccagtatcgtctgggtgttctcgggttttttagcacaggggatgagcatgcaccaggcaaccaagggtttctggatgtggttgcagctctccgctgggtacaggagaatattgccccatttgggggagatctgaattgtgtgaccgtgttcggtggcagcgccggtggtagtattatctccgggttggttttgtcacctgtggctgcagggctctttcatcgggctattactcagtctggcgtgattaccacgcccggaattattgactcccacccttggcctctcgcccagaagatagccaatacacttgcctgctcctccagcagcccggcagaaatggtgcagtgcctacaacagaaggagggggaggagttggtgttatccaaaaagttgaaaaacactatttatcctctgacagtagatggcactgtgttcccgaaatccccgaaggagcttctgaaagagaagcctttccattccgtgccgtttctcatgggcgtgaacaatcacgaattctcttggttgattccacgcggttgggggttactggacactatggagcagatgagcagggaggacatgctggccatatccacaccagtcctgacatccctggatgtcccacccgagatgatgccaactgtgattgacgaatatctggggagcaatagcgacgcccaggccaagtgccaagcttttcaggagtttatgggagatgtgttcattaacgtcccaacggtgagtttctccaggtatctccgggatagtggcagtcccgtgtttttttacgaatttcagcatcggccatcatccttcgctaagattaagccagcctgggtgaaggccgatcatggagcagagggtgccttcgtcttcggcggtcccttccttatggatgaaagtagccgcctcgcgttccctgaggccaccgaagaggagaagcagctgtccctcacaatgatggcacagtggacccatttcgcgcgaaccggcgaccccaatagcaaggcactccccccatggccacagtttaatcaggccgaacaatacctcgagattaaccccgtgccgcgtgccggacagaaattccgagaggcctggatgcagttctggagtgaaactcttccgagcaagatccagcagtggcaccagaagcagaagaatcggaaggctcaggaggatttgtag

SEQ ID NO: 217457 - DNA, 3834 bp, Artificial Sequence
  derived and/or modified sequence
gatcggtggtgctgaagggcagggatcttattccaccttctgaagcttctgtcgaaccagttgtaaggagaatggagagagcagtgagagtggagtccggggtcctggtcggggtggtctgtctgctcctggcatgccctgccacagccactgggcccgaagttgctcagcctgaagtagacaccaccctgggtcgtgtgcgaggccggcaggtgggcgtgaagggcacagaccgccttgtgaatgtctttctgggcattccatttgcccagccgccactgggccctgaccggttctcagccccacacccagcacagccctgggagggtgtgcgggatgccagcactgcgcccccaatgtgcctacaagacgtggagagcatgaacagcagcagatttgtcctcaacggaaaacagcagatcttctccgtttcagaggactgcctggtcctcaacgtctatagcccagctgaggtccccgcagggtccggtaggccggtcatggtatgggtccatggaggcgctctgataactggcgctgccacctcctacgatggatcagctctggctgcctatggggatgtggtcgtggttacagtccagtaccgccttggggtccttggcttcttcagcactggagatgagcatgcacctggcaaccagggcttcctagatgtggtagctgctttgcgctgggtgcaagaaaacatcgcccccttcgggggtgacctcaactgtgtcactgtctttggtggatctgccggtgggagcatcatctctggcctggtcctgtccccagtggctgcagggctgttccacagagccatcacacagagtggggtcatcaccaccccagggatcatcgactctcacccttggcccctagctcagaaaatcgcaaacaccttggcctgcagctccagctccccggctgagatggtgcagtgccttcagcagaaagaaggagaagagctggtccttagcaagaagctgaaaaatactatctatcctctcaccgttgatggcactgtcttccccaaaagccccaaggaactcctgaaggagaagcccttccactctgtgcccttcctcatgggtgtcaacaaccatgagttcagctggctcatccccaggggctggggtctcctggatacaatggagcagatgagccgggaggacatgctggccatctcaacacccgtcttgaccagtctggatgtgccccctgagatgatgcccaccgtcatagatgaatacctaggaagcaactcggacgcacaagccaaatgccaggcgttccaggaattcatgggtgacgtattcatcaatgttcccaccgtcagtttttcaagataccttcgagattctggaagccctgtctttttctatgagttccagcatcgacccagttcttttgcgaagatcaaacctgcctgggtgaaggctgatcatggggccgagggtgcttttgtgttcggaggtcccttcctcatggacgagagctcccgcctggcctttccagaggccacagaggaggagaagcagctaagcctcaccatgatggcccagtggacccactttgcccggacaggggaccccaatagcaaggctctgcctccttggccccaattcaaccaggcggaacaatatctggagatcaacccagtgccacgggccggacagaagttcagggaggcctggatgcagttctggtcagagacgctccccagcaagatacaacagtggcaccagaagcagaagaacaggaaggcccaggaggacctctgaggccaggcctgaaccttcttggctggggcaaaccactcttcaagtggtggcagagtcccagcacggcagcccgcctctccccctgctgagactttaatctccaccagcccttaaagtgtcggccgctctgtgactggagttatgctcttttgaaatgtcacaaggccgcctcccacctctggggcattgtacaagttcttccctctccctgaagtgcctttcctgctttcttcgtggtaggttctagcacattcctctagcttcctggaggactcactcccccaggaagccttccctgccttctctgggctgtgcggccccgagtctgcgtccattagagcacagtccacccgaggctagcaccgtgtctgtgtctgtctccccctcagaggagctctctcaaaatggggattagcctaaccccactctgtcacccacaccaggatcgggtgggacctggagctagggggtgtttgctgagtgagtgagtgaaacacagaatatgggaatggcagctgctgaacttgaacccagagccttcaggtgccaaagccatactcaggcccccaccgacattgtccaccctggccagaagggtgcatgccaatggcagagacctgggatgggagaagtcctggggcgccaggggatccagcctagagcagaccttagcccctgactaaggcctcagactagggcgggaggggtctcctcctctctgctgcccagtcctggcccctgcacaagacaacagaatccatcagggccatgagtgtcacccagacctgaccctcaccaattccagccctgaccctcaggacgctggatgccagctcccagccccagtgccgggtcctccctcccttcctggcttggggagaccagtttctggggagcttccaagagcacccaccaagacacagcaggacaggccaggggagggcatctggaccagggcatccgtcgggctattgtcacagagaaaagaagagacccacccactcgggctgcaaaaggtgaaaagcaccaagaggttttcagatggaagtgagaggtgacagtgtgctggcagccctcacagccctcgcttgctctccctgccgcctctgcctgggctcccactttggcagcacttgaggagcccttcaacccgccgctgcactgtaggagcccctttctgggctggccaaggccggagccagctccctcagcttgcggggaggtgcggagggagaggggcgggcaggaaccggggctgcgcgcagcgcttgcgggccagagtgagttccgggtgggcgtgggctcggcggggccccactcagagcagctggccggccccaggcagtgagggccttagcacctgggccagcagctgctgtgctcgatttctcgctgggccttagctgcctccccgcggggcagggctcgggacctgcagccctccatgcctgaccctccccccaccccccgtgggctcctgtgcggccggagcctccccaaggagcgccgccccctgctccacagcgcccagtcccatcgaccacccaagggctgaggagtgcgggtgcacagcgcgggactggcaggcagctccacctgctgccccagtgctggatccactgggtgaagccagctgggctcctgagtctggtggggacttggagaacctttatgtctagctaagggattgtaaatacaccgatgggcactctgtatctagctcaaggtttgtaaacacaccaatcagcaccctgtgtctagctcagtgtttgtgaatgcaccaatccacactctgtatctggctactctggtggggacttggagaacctttgtgtccacactctgtatctagctaatctagtggggatgtggagaacctttgtgtctagctcagggatcgtaaacgcaccaatcagcaccctgtcaaaacagaccacttgactctctgtaaaatggaccaatcagcaggatgtgggtggggcgagacaagagaataaaagcaggctgcctgagccagcagtgacaacccccctcgggtcccctccca

SEQ ID NO: 217458 - DNA, 1716 bp, Artificial Sequence
  derived and/or modified sequence
atggagagagccgtgagagtggagagcggcgtgctggtgggcgtggtgtgcctgctgctggcctgccccgccaccgccaccggccccgaggtggcccagcccgaggtggacaccaccctgggcagagtgagaggcagacaggtgggcgtgaagggcaccgacagactggtgaacgtgttcctgggcatccccttcgcccagccccccctgggccccgacagattcagcgccccccaccccgcccagccctgggagggcgtgagagacgccagcaccgccccccccatgtgcctgcaggacgtggagagcatgaacagcagcagattcgtgctgaacggcaagcagcagatcttcagcgtgagcgaggactgcctggtgctgaacgtgtacagccccgccgaggtgcccgccggcagcggcagacccgtgatggtgtgggtgcacggcggcgccctgatcaccggcgccgccaccagctacgacggcagcgccctggccgcctacggcgacgtggtggtggtgaccgtgcagtacagactgggcgtgctgggcttcttcagcaccggcgacgagcacgcccccggcaaccagggcttcctggacgtggtggccgccctgagatgggtgcaggagaacatcgcccccttcggcggcgacctgaactgcgtgaccgtgttcggcggcagcgccggcggcagcatcatcagcggcctggtgctgagccccgtggccgccggcctgttccacagagccatcacccagagcggcgtgatcaccacccccggcatcatcgacagccacccctggcccctggcccagaagatcgccaacaccctggcctgcagcagcagcagccccgccgagatggtgcagtgcctgcagcagaaggagggcgaggagctggtgctgagcaagaagctgaagaacaccatctaccccctgaccgtggacggcaccgtgttccccaagagccccaaggagctgctgaaggagaagcccttccacagcgtgcccttcctgatgggcgtgaacaaccacgagttcagctggctgatccccagaggctggggcctgctggacaccatggagcagatgagcagagaggacatgctggccatcagcacccccgtgctgaccagcctggacgtgccccccgagatgatgcccaccgtgatcgacgagtacctgggcagcaacagcgacgcccaggccaagtgccaggccttccaggagttcatgggcgacgtgttcatcaacgtgcccaccgtgagcttcagcagatacctgagagacagcggcagccccgtgttcttctacgagttccagcacagacccagcagcttcgccaagatcaagcccgcctgggtgaaggccgaccacggcgccgagggcgccttcgtgttcggcggccccttcctgatggacgagagcagcagactggccttccccgaggccaccgaggaggagaagcagctgagcctgaccatgatggcccagtggacccacttcgccagaaccggcgaccccaacagcaaggccctgcccccctggccccagttcaaccaggccgagcagtacctggagatcaaccccgtgcccagagccggccagaagttcagagaggcctggatgcagttctggagcgagaccctgcccagcaagatccagcagtggcaccagaagcagaagaacagaaaggcccaggaggacctgtag

SEQ ID NO: 217459 - protein, 1887 aa, Artificial Sequence
  derived and/or modified sequence
MAARGRGLLLLTLSVLLAAGPSAAAAKLNIPKVLLPFTRATRVNFTLEASEGCYRWLSTRPEVASIEPLGLDEQQCSQKAVVQARLTQPARLTSIIFAEDITTGQVLRCDAIVDLIHDIQIVSTTRELYLEDSPLELKIQALDSEGNTFSTLAGLVFEWTIVKDSEADRFSDSHNALRILTFLESTYIPPSYISEMEKAAKQGDTILVSGMKTGSSKLKARIQEAVYKNVRPAEVRLLILENILLNPAYDVYLMVGTSIHYKVQKIRQGKITELSMPSDQYELQLQNSIPGPEGDPARPVAVLAQDTSMVTALQLGQSSLVLGHRSIRMQGASRLPNSTIYVVEPGYLGFTVHPGDRWVLETGRLYEITIEVFDKFSNKVYVSDNIRIETVLPAEFFEVLSSSQNGSYHRIRALKRGQTAIDAALTSVVDQDGGVHILQVPVWNQQEVEIHIPITLYPSILTFPWQPKTGAYQYTIRAHGGSGNFSWSSSSHLVATVTVKGVMTTGSDIGFSVIQAHDVQNPLHFGEMKVYVIEPHSMEFAPCQVEARVGQALELPLRISGLMPGGASEVVTLSDCSHFDLAVEVENQGVFQPLPGRLPPGSEHCSGIRVKAEAQGSTTLLVSYRHGHVHLSAKITIAAYLPLKAVDPSSVALVTLGSSKEMLFEGGPRPWILEPSKFFQNVTAEDTDSIGLALFAPHSSRNYQQHWILVTCQALGEQVIALSVGNKPSLTNPFPAVEPAVVKFVCAPPSRLTLAPVYTSPQLDMSCPLLQQNKQVVPVSSHRNPRLDLAAYDQEGRRFDNFSSLSIQWESTRPVLASIEPELPMQLVSQDDESGQKKLHGLQAILVHEASGTTAITATATGYQESHLSSARTKQPHDPLVPLSASIELILVEDVRVSPEEVTIYNHPGIQAELRIREGSGYFFLNTSTADVVKVAYQEARGVAMVHPLLPGSSTIMIHDLCLVFPAPAKAVVYVSDIQELYIRVVDKVEIGKTVKAYVRVLDLHKKPFLAKYFPFMDLKLRAASPIITLVALDEALDNYTITFLIRGVAIGQTSLTASVTNKAGQRINSAPQQIEVFPPFRLMPRKVTLLIGATMQVTSEGGPQPQSNILFSISNESVALVSAAGLVQGLAIGNGTVSGLVQAVDAETGKVVIISQDLVQVEVLLLRAVRIRAPIMRMRTGTQMPIYVTGITNHQNPFSFGNAVPGLTFHWSVTKRDVLDLRGRHHEASIRLPSQYNFAMNVLGRVKGRTGLRVVVKAVDPTSGQLYGLARELSDEIQVQVFEKLQLLNPEIEAEQILMSPNSYIKLQTNRDGAASLSYRVLDGPEKVPVVHVDEKGFLASGSMIGTSTIEVIAQEPFGANQTIIVAVKVSPVSYLRVSMSPVLHTQNKEALVAVPLGMTVTFTVHFHDNSGDVFHAHSSVLNFATNRDDFVQIGKGPTNNTCVVRTVSVGLTLLRVWDAEHPGLSDFMPLPVLQAISPELSGAMVVGDVLCLATVLTSLEGLSGTWSSSANSILHIDPKTGVAVARAVGSVTVYYEVAGHLRTYKEVVVSVPQRIMARHLHPIQTSFQEATASKVIVAVGDRSSNLRGECTPTQREVIQALHPETLISCQSQFKPAVFDFPSQDVFTVEPQFDTALGQYFCSITMHRLTDKQRKHLSMKKTALVVSASLSSSHFSTEQVGAEVPFSPGLFADQAEILLSNHYTSSEIRVFGAPEVLENLEVKSGSPAVLAFAKEKSFGWPSFITYTVGVLDPAAGSQGPLSTTLTFSSPVTNQAIAIPVTVAFVVDRRGPGPYGASLFQHFLDSYQVMFFTLFALLAGTAVMIIAYHTVCTPRDLAVPAALTPRASPGHSPHYFAASSPTSPNALPPARKASPPSGLWSPAYASH

SEQ ID NO: 217460 - DNA, 5664 bp, Artificial Sequence
  derived and/or modified sequence
atggcagcaagggggcgggggctgttgctgttgacgctgagcgttttgcttgctgcaggcccatctgcagcagcagcgaaacttaacatccctaaggttctgctaccttttacccgagccactcgcgtgaacttcacacttgaggcttccgagggctgttatcggtggctgtctactcggccagaagtcgcaagcattgagcccctcggactggacgaacagcagtgctcacagaaggcagtggttcaggccaggcttacccagcctgcccggctgacctcaattatattcgctgaggatatcacgaccggccaggttcttaggtgtgacgctatcgttgatcttattcatgacattcagattgtttcaacgacacgagaactctatctggaagactccccgctggaactcaagatacaggcgctggactcagaaggaaatacctttagtacgctggctggactggtctttgagtggaccattgttaaggactcggaggcagatcggttctccgactcgcacaatgccctcaggatcttgacattcctggagtcaacttacattcctccctcctatattagtgaaatggaaaaggcagccaaacaaggagacaccatcctggtgtcaggaatgaaaacgggttctagcaagctaaaggcaagaattcaggaggcagtctataaaaacgtccgacctgccgaagtcaggctgctgatactcgagaacatcctgcttaatcctgcttatgacgtttatctaatggtgggtacatcgattcattacaaagtgcagaagattcggcaaggcaagattacagaactcagcatgcctagcgatcaatacgagctacagctgcagaactccataccaggacctgagggcgatcctgcaagaccggtggctgttctcgcccaggacacgagtatggtgaccgcacttcaactggggcagtcaagtctggtgctaggccatcgctccatccggatgcagggggcctctaggttgcccaactccacgatttacgtggtcgagcctggctacctggggtttaccgtgcatcccggtgatagatgggtgctggaaacagggagactgtacgagattaccatcgaagtttttgataaattttctaataaagtttacgtcagcgacaatatccgcattgaaaccgtccttcctgcagagtttttcgaggttctcagtagctcgcagaatggctcttatcataggattagagccctcaagcggggtcagactgcaatcgacgccgcactgacatcagtggttgaccaggacggcggggtgcacatcctgcaagttcctgtttggaaccagcaggaagtcgaaatacacatccccattactctttacccctcaatcttgacttttccttggcaacccaaaacgggcgcttaccagtataccatccgggcacacggcggcagcggcaacttctcttggtcctccagcagccacctcgtcgctacagtgacagtgaaaggggtgatgaccacagggtctgacataggttttagcgtgatccaggcccacgatgtccagaatccattgcacttcggggagatgaaagtgtacgtgattgagccacactcaatggaatttgccccatgtcaggtggaagcccgggttggacaggctctggaactgcctctccgcataagcgggctcatgccgggtggcgcgtcagaagtcgtcacactcagcgattgtagtcactttgaccttgccgtcgaggtcgagaaccaaggtgtcttccaaccattgcctggcagacttcccccagggtcagagcactgcagtggaatacgcgttaaggcagaggcccagggttccacaacactgttggtgtcataccgccacggacatgttcatctgtccgctaagatcacaatcgcagcttacttgcccctgaaagccgtggatccatccagtgtggccctcgtcaccctgggtagcagcaaagagatgctattcgaaggggggcccaggccttggatcctggagccttcgaaattctttcagaacgttactgctgaggatacggatagtatcggactagctctcttcgccccacactcctcccgaaattaccagcagcactggattctagttacgtgtcaggctctgggtgagcaggtaatcgcactctctgtcgggaacaagccttcgttgactaacccctttcctgctgtcgaacctgctgtcgtcaaatttgtgtgcgcaccccctagcaggctgacgctggcgcccgtctacacttctccacagctagacatgagttgtcctctattgcaacagaacaagcaagtcgtgccagtgagcagccaccggaatcccaggctcgacctggcggcgtacgatcaggaaggccgaagattcgacaacttctcgtcgctctcgatccaatgggaaagcacgagaccggtcctggcaagcatcgagcctgagctccccatgcagttagtatcccaggatgatgaaagtggccagaagaaactccacggcctccaagctattctggtgcatgaggcatctggcacaacagccataactgctaccgcaaccggctaccaagaaagccatctctcttccgccagaacaaaacagccacatgacccactcgttcctttgagcgcctccattgaactcatattggtcgaggatgttcgtgtctcacctgaagaagtcacaatctacaaccaccccgggatacaagcggagttaagaatccgcgaaggaagcggatattttttcttgaatacaagcaccgctgatgtggtgaaggttgcttaccaagaggccaggggagttgccatggtacacccactgctgcccggcagctcaactatcatgatccacgacctttgtctcgtattcccggcccccgccaaggccgtcgtgtacgttagtgatatccaggaattgtacatcagagtggtggataaagtggagattggcaaaacagtaaaagcttatgtgcgcgtgctggatctccataaaaaaccttttctcgctaaatattttcctttcatggatctgaagctgagagctgcatccccaatcattacactcgtcgctctggatgaggccctggacaactacaccatcacattcctcatccgcggggtggcaatcggtcagacttccctgaccgcctcagtaactaacaaagctggtcagcggattaacagcgccccacagcagattgaagtgttcccacctttcaggctcatgcctagaaaagtaactttactgattggagccaccatgcaggtcacctcagaaggtggaccacagccccaaagcaatatactcttctccatcagcaatgaatccgtcgcgctggtgtcagccgctgggcttgtgcaaggtttggccatcggcaacggtacagttagcggcctcgttcaggccgttgacgcggaaacaggcaaggtggttatcatcagccaggaccttgtgcaggttgaagtgctcctactgcgggccgttcggattagggcccctatcatgaggatgagaacaggaacccagatgcctatttacgtaaccggaattaccaatcatcaaaaccctttttcgttcggtaatgccgtccccggcctcacattccactggagtgttaccaaacgggatgtattggatctgcgcggtcggcatcatgaagcctccattcggttaccctctcaatataatttcgccatgaacgttctagggagggtgaagggcaggactggattacgagtcgtggtcaaggccgtggaccctacaagcggccagttgtacggtctggctcgcgagctctcagatgaaatccaagtgcaagtgttcgaaaaactgcaattattaaaccccgagattgaagctgagcaaatattgatgtccccaaactcctacattaagctgcagactaatcgggatggcgcagcgagcctttcctatcgtgtgctcgatggccccgagaaagtccctgttgtgcacgtggatgagaaaggttttctcgcctccggcagtatgattgggacaagcaccatcgaggttatcgcccaagaacctttcggggccaatcaaactatcattgtagcagtgaaagtatctccagtgagctacctgagagtgtccatgagccctgtgctgcacacccagaacaaggaggctctggtagccgtgccactgggaatgacggttaccttcactgtacatttccacgacaattccggagacgtgtttcatgcgcactccagcgtgcttaactttgccaccaatcgcgacgacttcgtccagatcggcaaggggcctaccaacaatacgtgtgtggtgcgaacagtatccgtagggttgacactgctcagagtttgggacgcagagcatccaggactctcagactttatgcccttgcccgttcttcaggccatcagtcccgaactgagcggcgctatggtggttggcgacgtcctctgcctcgctacggtccttacttcactggaaggactcagcggcacttggtcgagttccgctaattccatcttacacattgaccctaagacaggtgtggccgtggcccgggccgtggggagcgtgacagtgtattacgaagtcgctggtcacctacgaacctacaaggaggtggtcgtgtctgttccacagcgcataatggcacggcacctgcatccgatccagacctcgtttcaggaagctaccgcctccaaggtgatagtcgctgtgggcgacaggtccagcaacctgcggggcgaatgcacgcccactcagcgagaagttatccaggcactccaccccgagaccctgattagctgccagagccagttcaaaccagcagtctttgacttccccagtcaagacgtgtttactgtcgagcctcagttcgatacggccctgggacaatacttttgttcaatcaccatgcatcgactgacagataaacagcggaaacacctaagcatgaaaaaaaccgctttggtggtctccgcaagcttaagctcatcacacttcagcacagagcaggtgggtgcagaagtgccttttagtcctggtctgtttgccgatcaagcagagattctgttgtctaatcattacacgagctctgagataagggtgtttggagcaccggaggtgctcgaaaatctggaagtgaaatccggctcaccagccgtcctcgcttttgccaaggagaaatcctttggctggcccagcttcataacctacacagtgggtgttctcgatcccgctgcagggagtcagggccccttgtccactaccctcacgttttcgtctcctgtgaccaatcaggccatcgctatacctgtgacggtggcctttgttgttgaccgtcgcggaccaggaccctatggtgcttccctgttccaacactttctcgattcttatcaagttatgttcttcacgttattcgctctgttggccggcaccgccgtgatgatcatcgcataccatactgtctgtaccccacgcgacctggccgtgccagccgccttaacccctagggctagccctggtcactcaccccattactttgctgcatcttcacctacgtcacccaacgctctgccacccgcccgaaaggcctccccacctagcgggctttggagccccgcctacgcgagccattag

SEQ ID NO: 217461 - DNA, 5664 bp, Artificial Sequence
  derived and/or modified sequence
atggccgcccggggccggggcctgctgctgctgaccctgtctgtgctgctggccgccggccccagcgctgctgctgccaagctgaacatccccaaggtgctgctgcccttcacccgggccaccagggtgaacttcaccctggaggccagcgagggctgctaccgctggctgagcaccaggcctgaggtggccagcattgagcccctgggcctggatgagcagcagtgcagccagaaggctgtggtgcaggcccggctgacccagcctgcccggctgaccagcatcatctttgctgaggacatcaccaccggccaggtgctgcgctgtgatgccatcgtggacctgattcatgacatccagatcgtgtccaccacccgggagctgtacctggaggacagccccctggagctgaagatccaggccctggacagcgagggcaacaccttcagcaccctggccggcctggtgtttgagtggaccatcgtgaaggacagcgaggccgaccgcttcagtgacagccacaatgccctgcgcatcctgaccttcctggagagcacctacatccccccatcctacatcagcgagatggagaaggccgccaagcagggcgacaccatcctggtgtctggcatgaagacaggcagcagcaagctgaaggcccgcatccaggaggccgtgtacaagaatgtgcggcctgctgaggtgcggctgctgatcctggagaacatcctgctgaacccagcctatgatgtgtacctgatggtgggcaccagcatccactacaaggtgcagaagatccggcagggcaagatcacagagctgtccatgcccagcgaccagtatgagctgcagctgcagaacagcatccctggccctgagggggaccctgcccggcctgtggccgtgctggcccaggacacctccatggtgacagccctgcagctgggccagagcagcctggtgctgggccacaggagcatccgcatgcagggcgccagccggctgcccaacagcaccatctacgtggtggagcccggctacctgggcttcaccgtgcaccctggggaccgctgggtgctggagaccggccgcctgtatgagatcaccatcgaggtgtttgacaagttcagcaacaaggtgtatgtgtctgacaacatccgcatcgagaccgtgctgcctgctgagttctttgaggtgctgagcagcagccagaatggcagctaccaccgcatccgggccctgaagaggggccagacagccattgatgctgccctgacctctgtggtggaccaggacggcggcgtgcacatcctgcaggtgcctgtgtggaaccagcaggaggtggagatccacatccccatcaccctgtaccccagcatcctgaccttcccctggcagcccaagacaggagcctaccagtacaccatccgggcccatggaggcagcggcaacttctcctggagcagcagcagccacctggtggccaccgtgacagtgaagggcgtgatgaccactggaagtgacatcggcttcagcgtcatccaggcccatgatgtgcagaaccccctgcactttggagagatgaaggtgtatgtgattgagccccacagcatggagtttgccccctgccaggtggaggcccgggtgggccaggccctggagctgcccctgcgcatcagcggcctgatgcctgggggcgccagcgaggtggtgaccctgagtgactgcagccactttgacctggccgtggaggtggagaaccagggcgtcttccagcccctgcccggccgcctgcccccaggcagcgagcactgcagcggcatccgggtgaaggccgaggcccagggcagcaccaccctgctggtgtcctaccgccacggccacgtgcacctgagcgccaagatcaccatcgccgcctacctgcccctgaaggctgtggaccccagctctgtggccctggtgaccctgggcagcagcaaggagatgctgtttgagggcggcccccggccctggatcctggagcccagcaagttcttccagaatgtgacagctgaggacacagacagcatcggcctggccctgtttgccccccacagcagcaggaactaccagcagcactggatcctggtgacctgccaggccctgggggagcaggtgattgccctgtctgtgggcaacaagcccagcctgaccaaccccttccctgctgtggagcctgctgtggtgaagtttgtgtgtgccccacccagccggctgaccctggcccctgtgtacaccagcccccagctggacatgagctgccccctgctgcagcagaacaagcaggtggtgcctgtgagcagccacaggaacccccggctggacctggccgcctatgaccaggagggcagaagatttgacaacttcagcagcctgagcatccagtgggagagcaccaggcctgtgctggccagcattgagcctgagctgcccatgcagctggtgtcccaggatgatgagagcggccagaagaagctgcacggcctgcaggccatcctggtgcatgaggccagcggcaccacagccatcacagccacagccaccggctaccaggagagccacctgagcagcgcccggaccaagcagccccatgaccccctggtgcccctgagcgccagcattgagctgatcctggtggaggatgtgcgggtgtccccagaggaggtgaccatctacaaccaccctggcatccaggccgagctgcgcatccgggagggcagcggctacttcttcctgaacaccagcacagcagatgtggtgaaggtggcctaccaggaggcccggggcgtggccatggtgcaccccctgctgcccggcagcagcaccatcatgattcatgacctgtgcctggtgtttcctgccccagccaaggctgtggtgtatgtgtctgacatccaggagctgtacatccgggtggtggacaaggtggagatcggcaagacagtgaaggcctacgtgcgggtgctggacctgcacaagaagcccttcctggccaagtacttccccttcatggacctgaagctgcgggccgccagccccatcatcaccctggtggccctggatgaggccctggacaactacaccatcaccttcctgatccggggcgtggccatcggccagaccagcctgacagcctctgtgaccaacaaggccggccagaggatcaacagcgccccccagcagatcgaggtgtttcctcccttccggctgatgcccaggaaggtgaccctgctgattggagccaccatgcaggtgaccagcgagggcggcccccagccccagagcaacatcctcttcagcatcagcaatgaatctgtggccctggtgtctgctgctggcctggtgcagggcctggccatcggaaatggaacagtgtctggcctggtgcaggccgtggatgctgagaccgggaaggtggtgatcatcagccaggacctggtgcaggtggaggtgctgctgctgcgggctgtgcgcatccgggcccccatcatgaggatgaggacaggcacccagatgcccatctacgtgacaggcatcaccaaccaccagaaccccttctcctttggaaatgctgtgcccggcctgaccttccactggagcgtgaccaagagagatgtgctggacctgcggggccgccaccacgaggccagcatccggctgcccagccagtacaactttgccatgaatgtgctgggccgggtgaagggccgcacaggcctgcgggtggtggtgaaggctgtggaccccaccagcggccagctgtatggcctggcccgggagctgagtgatgagatccaggtgcaggtgtttgagaagctgcagctgctgaaccctgagattgaagctgagcagatcctgatgagccccaacagctacatcaagctgcagaccaacagagatggagctgccagcctgagctacagagtgctggatggccctgagaaggtgcctgtggtgcacgtggatgagaagggcttcctggccagcggctccatgattggcaccagcaccattgaagtcatcgcccaggagccctttggagccaaccagaccatcatcgtggccgtgaaggtgtcccctgtgtcctacctgcgggtgtccatgagccctgtgctgcacacccagaacaaggaggccctggtggccgtgcccctgggcatgacagtgaccttcaccgtgcacttccatgacaacagcggagatgtgttccacgcccacagctctgtgctgaactttgccaccaacagagatgactttgtgcagatcggcaagggccccaccaacaacacctgtgtggtgaggacagtgtctgtgggcctgaccctgctgcgggtgtgggatgctgagcaccctggcctgagtgacttcatgcccctgcctgtgctgcaggccatcagccctgagctgagcggggccatggtggtgggagatgtgctgtgcctggccaccgtgctgaccagcctggagggcctgagcggcacctggagcagcagcgccaacagcatcctgcacatcgaccccaagacaggagtggccgtggcccgggctgtgggctctgtgacagtgtactatgaggtggccggccacctgcggacctacaaggaggtggtggtgtctgtgccccagaggatcatggcccggcacctgcaccccatccagaccagcttccaggaggccacagccagcaaggtgattgtggccgtgggggacaggagcagcaacctgcggggagaatgtacccccacccagcgggaggtgatccaggccctgcaccctgagaccctcatcagctgccagagccagttcaagccagctgtgtttgacttccccagccaggatgtgttcaccgtggagccccagtttgacacagccctgggccagtacttctgcagcatcaccatgcaccggctgacagacaagcagaggaagcacctgtccatgaagaagacagccctggtggtgtctgccagcctgagcagcagccacttcagcacagagcaggtgggcgctgaggtgcccttcagccctggcctgtttgctgaccaggccgagatcctgctgagcaaccactacaccagcagcgagatccgggtgtttggagcccctgaggtgctggagaacctggaggtgaagagcggcagccctgctgtgctggcctttgccaaggagaagagctttggctggcccagcttcatcacctacacagtgggcgtgctggaccctgctgctggcagccagggccccctgagcaccaccctgaccttcagcagccctgtgaccaaccaggccatcgccatccctgtgacagtggcctttgtggtggacagaagaggccctggcccctatggagccagcctcttccagcacttcctggacagctaccaggtgatgttcttcaccctgtttgccctgctggccggcacagctgtgatgatcatcgcctaccacacagtgtgcaccccccgggacctggccgtgcctgctgccctgaccccccgggccagccctggccacagcccccactactttgctgccagcagccccaccagccccaatgccctgcccccagccaggaaggccagccccccatctggcctgtggagccctgcctatgccagccactag

SEQ ID NO: 217462 - DNA, 5664 bp, Artificial Sequence
  derived and/or modified sequence
atggccgcccggggccggggcctgctgctgctgaccctgagcgtgctgctggccgccggtccatcagctgctgccgcaaaactaaatatcccgaaggtcttgctgccttttacaagagccacgcgggttaatttcacattggaagcctctgaaggatgctacagatggctgagtaccaggcccgaagttgcatccattgagccccttggcctcgacgagcagcaatgcagccagaaggccgtggttcaagcccgcctcactcagcctgcccggctgacttccattatctttgccgaagatattacaaccggccaggtgttgagatgcgacgccatcgtcgatctgatacatgatatccaaatcgtatcgacaacgcgggaattatatttggaagattctccactcgagctcaaaattcaggcacttgacagtgaaggcaacaccttttctacactggccggcctggtgtttgagtggacaatagtcaaggacagcgaggccgatagattctctgacagtcataatgccctgaggatcttaaccttcttggagtcaacatatatccctccatcctatatttctgagatggaaaaagccgccaagcagggagacacaattctggtcagcggaatgaaaacaggcagttctaaattgaaggcccgaattcaggaagccgtgtacaaaaacgttaggccagccgaagttcgattgctgatcttagaaaatatactgttgaaccccgcatatgacgtgtatctcatggtcgggaccagtatccactataaagtccagaaaatccgccaaggcaaaatcaccgaactgtcaatgccttccgaccagtacgagctgcagctgcagaacagcatccccggccctgagggagacccagccaggcctgtggctgtccttgcccaggacactagtatggtgacagcactgcaactgggccagagctcacttgtactggggcacagaagcatcagaatgcagggcgccagtcgattacccaacagcactatatacgtggtggagccagggtatttagggtttactgttcacccaggtgaccgctgggtgctagaaacaggtcgactatacgagataaccatagaggttttcgataagttttccaataaggtatatgtttccgacaatatccgaatcgaaactgtcctgcctgccgaattcttcgaagtgttatctagtagccaaaacggttcttatcacagaattcgcgccttgaagaggggccaaacggctatcgatgccgcactgacctcggttgtagatcaagatggaggagtgcatatcttgcaggtgcctgtctggaaccagcaggaggtggaaatccacatccccattaccctttaccccagtatcctgaccttcccatggcaacctaagactggcgcctatcagtatactataagagcccacggcggatctgggaactttagctggtcttctagttcacatctcgttgcaacagttaccgtgaagggcgtgatgaccaccggctccgacattggattctcggtgatacaagcacacgatgtgcaaaaccctctacactttggggagatgaaagtctatgtgatcgaaccccattcgatggaatttgcaccatgtcaagtggaagctcgtgtggggcaagcactggaactcccgttaagaatatccgggttaatgcccggtggggcaagcgaagtcgtcactctgtccgattgtagccattttgatcttgctgtggaggtcgagaatcagggcgtcttccagcctctcccaggtaggctgccgcctggatcggagcactgttctggtattcgagtcaaggccgaggctcaaggctcgaccacattgctggtgtcctacagacacggtcacgtacacttaagtgctaaaattaccatcgctgcttacctccctctcaaggctgttgatccgagcagcgtggcacttgtgactctcggttcttccaaggaaatgctttttgagggtggacctcggccttggatactggagcctagcaaatttttccaaaatgtcacagccgaagacacagactccattggtctggctctcttcgcaccccattctagcagaaattatcagcaacactggatcctcgtgacctgtcaggccctcggagagcaagtaatcgccttgtcagtgggcaacaagcctagtctgacaaatccgtttccagcagttgaacctgccgtagttaagtttgtgtgcgccccaccaagtcgcctgactctggcacctgtgtatacttcaccccagctcgatatgtcttgcccgctgctacagcagaataaacaagtggttccagtgagcagccaccgcaatcctagattggacctcgccgcgtacgatcaagagggacgccgattcgataacttctcctctctttctatccagtgggagtcaaccaggccagtgttggccagtattgagcctgagttacctatgcagctggtatctcaggacgatgagtccggtcagaagaagctgcatggcctgcaggctattctcgttcatgaggcttcgggcacgacggccataaccgcgacagcaaccggctatcaagaatcccatttatcgtccgccaggacaaagcagcctcacgacccactggtgcccctgtcagcttccatcgagctcatcctggttgaggatgttcgcgtctcacccgaggaggtcacgatctataaccacccagggatccaggcagagctgagaattagagaagggtctggatatttctttctgaacacttctacagccgatgttgtgaaagtcgcctaccaggaagcacggggggtagcaatggtgcatccactcctccccggcagcagtaccattatgatccacgatttatgtctggtattcccagcgcctgccaaggcggtggtttacgtctcagatatccaggaattatatatacgcgtggtggacaaggtggaaatcggcaagaccgtgaaggcctatgtgagagtcctggatctccataagaagccctttctcgctaagtacttcccattcatggatcttaagctccgagccgccagtccgattatcacattggtcgccctggacgaggcactggacaactataccatcacctttctcatcaggggagtcgctattggtcagaccagcttgacagcctcggtgactaacaaggcaggccagcggattaactctgccccccagcagatagaggtcttcccgccattcagactgatgccacgcaaggtcaccctgctgatcggcgcaacgatgcaagtgacgtccgagggagggccacagccacaaagcaatatcctgtttagtatctctaatgagagtgtggcccttgtgagtgcagcaggtttagtgcaggggctagccatcgggaacgggacagtcagcgggttggtgcaggccgtagacgctgagaccggcaaggtggtgatcatctcacaggacctggtgcaggtcgaggtgctgctcttgagagcagtcaggattcgcgctccaatcatgcgaatgcggaccggtacgcagatgcccatttatgttaccggtataactaatcaccagaacccattcagtttcggtaacgccgtgccaggcttaacttttcactggtctgttacgaaaagagatgtcttggaccttcgggggaggcaccacgaggcgagcatacgactcccttctcaatacaatttcgcgatgaacgtgctcgggcgagtcaaaggtagaacagggctgagagtagtggtgaaagctgtcgatcctacaagtggtcagctctacggcctggcccgcgaactgtccgatgaaattcaggtgcaagttttcgaaaaattgcagctattaaatcccgagatcgaggcggagcagatcttgatgtctccgaattcttacatcaagcttcagactaacagagacggagctgctagtcttagttatagagtattggacggcccagaaaaggtgccagtggtccatgtcgacgagaaaggctttctggcatccggctccatgatcggtaccagcacaatcgaggtgattgcacaggagccctttggggcgaaccagacaatcatcgtcgccgtgaaagtttctcctgtaagctatttgagggtgtccatgagtccggtgcttcacactcagaataaagaggcactggtggccgtgccattaggcatgaccgtcactttcactgtccattttcacgataatagcggggacgtatttcatgcccattctagtgtgctgaatttcgccacaaaccgagatgactttgtgcagattggtaaggggcccaccaataatacttgtgtggtacgaaccgtcagtgtgggcctcaccttgttgagggtatgggatgccgaacatcccggactatctgatttcatgccgctgcccgtcctgcaagctatttcccctgaactatcaggcgctatggtggtaggggatgtgctctgtctcgcaaccgtcctgacaagcctggagggcctctccggaacctggtcctcttccgcaaattcgattttacacattgaccctaagacaggcgtggcggtggccagagctgtgggttcggtcactgtgtactatgaagtcgcgggccacctaaggacatacaaggaagtcgtcgttagtgtaccccagcggattatggctcgccaccttcaccctatccagaccagctttcaggaagctaccgcatccaaagtgatcgtggccgtgggtgacagatcctccaacctgcggggagagtgcacacctacgcagcgtgaggtcatccaggcactgcaccctgaaacacttataagctgtcagtcccaatttaagcccgcagtctttgactttccctcccaagatgtgttcacggtggagcctcagttcgacacagctttgggccagtacttttgtagtattaccatgcacagactgactgataaacaacgaaaacacctgtcaatgaagaagaccgcactggtcgtttcggccagtttatcaagcagccattttagtaccgaacaggttggggccgaagtaccgttcagccccgggctcttcgcagaccaggccgagatactgctgtccaaccattatacctcgagcgagatcagggtatttggcgcccccgaagtgctggaaaatctcgaagtcaagagcggatctcccgccgtgctggctttcgctaaggagaagtcctttgggtggccctcattcatcacatacacagtcggcgtactagatccagccgcagggtcacagggccccctgtctacaacattaactttctcgtcgcccgttactaatcaggcgatcgctatacccgttactgtagcattcgtggtggaccggcggggacctgggccttatggcgcatctctgttccagcactttctggatagctaccaggtcatgttcttcacactgtttgccctgctggcaggcacggcggttatgatcattgcttaccatacagtgtgtacacctcgtgacctagccgtgccagccgctctgacaccaagagccagtccaggtcatagtccacactactttgctgcttctagccccacctctcctaatgccctgccccccgctaggaaagcctcccctccttccggtctctggtctcctgcctacgcaagccactag

SEQ ID NO: 217463 - DNA, 7191 bp, Artificial Sequence
  derived and/or modified sequence
gcgcgcgcgcgggcgggagcggagggcaacggggcggcgcgggcggccgggcgcagggtcgcgggaggtgacgcgcggcgaggatggcggcgcggggccgggggctgctgctgctgacgctgtcggtgctgttggcggcgggcccctccgccgctgcggccaagctcaacatccccaaagtgctgctgcccttcacgcgggccacgcgcgttaacttcacgctggaggcctcggagggctgctaccgctggttgtccacccggccggaggtggccagcatcgagccgctgggcctggacgagcagcagtgctcccagaaggcagtggtgcaggcccgcctgacccagcctgcccgcctcaccagcatcatcttcgcagaggacatcaccacaggccaggtcctgcgctgtgatgccattgtggacctcatccatgacatccagatcgtctccaccacccgcgagctctacctggaggactcccccctggagctgaagatccaggccctggactccgaagggaacaccttcagcactctggctggactggtcttcgagtggacgattgtgaaggactccgaggcggacaggttctcagactcccacaatgcgctgcgaatcctcactttcttggagtctacgtacatccctccttcttacatctcagagatggagaaggctgccaagcaaggggacaccatcctggtgtctgggatgaagaccgggagctccaagctcaaggctcgcatccaggaggctgtctacaagaatgtacgccctgcagaagtcaggctgctgattttggaaaacatccttctgaacccggcctatgacgtctacctgatggtgggaacctccattcactacaaggtgcagaagatcaggcaagggaaaattacagaactctccatgccttccgatcagtacgagttgcagcttcagaacagcatcccgggccccgaaggagacccagcccggccggtggctgtcttggcccaggacacgtcgatggtcactgcactgcagctgggacagagcagcctcgtccttggccacaggagtattcgcatgcaaggtgcttctaggttacccaacagcactatctacgtggtcgaacctggatacctagggttcactgttcaccctggtgacaggtgggtgctggagaccggccgcctgtatgaaatcaccatcgaagtttttgacaagttcagcaacaaggtctatgtatctgacaacatccgaattgaaactgtgcttcctgctgagttcttcgaggtgctctcgtcctcccagaatgggtcataccatcgcatcagggcactaaagaggggacagacggccattgacgcggccctcacctctgtggtggaccaggatggaggggtccacatactacaggtgcctgtgtggaaccagcaggaggtggaaattcacatcccgatcaccctgtatcccagcatcttgacatttccgtggcaaccaaagacgggcgcctatcagtacacaataagggcccacggtggcagtgggaacttcagctggtcttcgtcaagccacctggttgccacagttactgtcaagggcgtgatgaccacaggcagtgacatcgggttcagtgtgatccaggcacatgatgtgcagaacccactccatttcggtgagatgaaggtgtatgtgatcgagccccacagcatggagtttgccccgtgccaggtggaggcacgtgtgggccaggccctggagctgcccctgaggatcagtggcctcatgcccggcggggccagtgaggtggtcaccttgagcgactgctcccactttgacttggctgtcgaggtggagaaccagggtgtgttccagccactcccagggaggctgccgccaggctctgagcactgcagcggcatccgggtaaaggccgaggcccagggctctaccacgcttcttgtgagctacagacacggccacgtccacctgagtgccaagatcaccattgctgcctacctgcccctcaaggctgtggatccctcctctgttgccttggtaaccctgggctcctcaaaggagatgctgtttgaaggaggtcccagaccttggatcctcgagccgtccaaattcttccagaacgtcaccgctgaggacactgacagcatcggcctggctctctttgccccccattcctcccggaattatcagcaacactggatccttgtgacctgtcaggccttgggtgagcaggtcatcgccctgtcggtggggaacaagcccagcctcaccaacccctttcctgcggtggagcctgccgtggtgaagttcgtctgcgccccaccgtccaggctcaccctcgcgcctgtctacaccagcccccagctggacatgtcctgtccgctgctgcagcagaacaagcaggtggtcccagtgtccagccaccgcaacccccggctggacctggctgcttacgaccaggagggccgccggttcgacaacttcagctctctgagcatccagtgggagtccaccaggccagtgttggccagcatcgagcctgagctgcccatgcagctggtgtcccaggacgatgagagtggccaaaagaagctgcacggtttgcaggccattttggttcacgaggcatcaggaaccacagccatcactgccactgccactggctaccaggagtcccacctcagctctgccagaacaaagcagccgcatgaccctctggtgcctctgtcggcctccatagagctcatcctggtggaggacgtgagggtgagcccagaagaggtgaccatctacaaccaccctggcatccaggcagagctccgcatcagggaaggctcaggttacttcttcctcaacaccagcaccgcagatgttgtcaaggtggcctaccaggaggccaggggtgtcgccatggtgcaccctttgctcccgggctcatccaccatcatgatccatgacttgtgcctcgtcttcccggccccagccaaggctgtcgtttacgtgtcggacattcaggagctgtacatccgtgtggttgacaaggtggagattgggaagacagtgaaggcatacgtccgcgtgctggacttgcacaagaagcccttccttgccaaatacttcccctttatggacctgaagctccgagcagcctccccgatcattacattggtggcccttgatgaagcccttgacaactacaccatcacattcctcatccgcggtgtggccatcggccagaccagtctaactgcaagtgtgaccaataaagctggacagagaatcaactcagccccacaacagattgaagtctttcccccgttcaggctgatgcccaggaaggtgacactgcttatcggggccacgatgcaggtcacctccgagggcggcccccagcctcagtccaacatccttttctccatcagcaatgagagcgttgcgctggtgagcgctgctgggctggtacagggcctcgccatcgggaacggcactgtgtctgggctcgtgcaggcagtggatgcagagaccggcaaggtggtcatcatctctcaggacctcgtgcaggtggaggtgctgctgctaagggccgtgaggatccgcgcccccatcatgcggatgaggacgggcacccagatgcccatctatgtcaccggcatcaccaaccaccagaaccctttctcctttggcaatgccgtgccaggcctgaccttccactggtctgtcaccaagcgggacgtcctggacctccgagggcggcaccacgaggcgtcgatccgactcccgtcacagtacaactttgccatgaacgtgctcggccgggtaaaaggccggaccgggctgagggtggtggtcaaggctgtggaccccacatcggggcagctgtatggcctggccagagaactctcggatgagatccaagtccaggtgtttgagaagctgcagctgctcaaccctgaaatagaagcagaacaaatattaatgtcgcccaactcatatataaagctgcagacaaacagggatggtgcagcctctctgagctaccgcgtcctggatggacccgaaaaggttccagttgtgcatgttgatgagaaaggctttctagcatcagggtctatgatcgggacatccaccatcgaagtgattgcacaagagccctttggggccaaccaaaccatcattgttgctgtaaaggtatcccctgtttcctacctgagggtttccatgagccctgtcctgcacacccagaacaaggaggccctggtggccgtgcctttgggaatgaccgtgaccttcactgtccacttccacgacaactctggagatgtcttccatgctcacagttcggtcctcaactttgccactaacagagacgactttgtgcagatcgggaagggccccaccaacaacacctgcgttgtccgcacagtcagcgtgggcctgacactgctccgtgtgtgggacgcagagcacccgggcctctcggacttcatgcccctgcctgtcctacaggccatctccccagagctgtctggggccatggtggtgggggacgtgctctgtctggccactgttctgaccagcctggaaggcctctcaggaacctggagctcctcggccaacagcatcctccacatcgaccccaagacgggtgtggctgtggcccgggccgtgggatccgtgacggtttactatgaggtcgctgggcacctgaggacctacaaggaggtggtggtcagcgtccctcagaggatcatggcccgtcacctccaccccatccagaccagcttccaggaggctacagcctccaaagtgattgttgccgtgggagacagaagctctaacctgagaggcgagtgcacccccacccagagggaagtcatccaggccttgcacccagagaccctcatcagctgccagtcccagttcaagccggccgtctttgatttcccatctcaagatgtgttcaccgtggagccacagtttgacactgctctcggccagtacttctgctcaatcacaatgcacaggctgacggacaagcagcggaagcacctgagcatgaagaagacagctctggtggtcagtgcctccctctccagcagccacttctccacagagcaggtgggggccgaggtgcccttcagcccaggtctcttcgccgaccaggctgaaatccttttgagcaaccactacaccagttccgagatcagggtctttggtgccccggaggttctggagaacttggaggtgaaatccgggtccccggccgtgctggcattcgcaaaggagaagtcttttgggtggcccagcttcatcacatacacggtcggcgtcttggaccccgcggctggcagccaagggcctctgtccactaccctgaccttctccagccccgtgaccaaccaagccattgccatcccagtgacagtggcttttgtggtggatcgccgtgggcccggtccttatggagccagcctcttccagcacttcctggattcctaccaggtcatgttcttcacgctcttcgccctgttggctgggacagcggtcatgatcatagcctaccacactgtctgcacgccccgggatcttgctgtgcctgcagccctcacgcctcgagccagccctggacacagcccccactatttcgctgcctcatcacccacatctcccaatgcattgcctcctgctcgcaaagccagccctccctcagggctgtggagcccagcctatgcctcccactaggccgcgtgaaggttcccggaggatgggtctcagccgagcctcgtgcacccccaagatggaacatccctgctgcattcacactggaacaagcccctccagatgagtgccccggccccaggccagcttcactgccgtctcttcacacagagctgtagtttcggctctgcccattagctcattttatgtaggagttttaaatgtgtgtttttttcctttcaagtcttacaaagctaagactttttggctcattcctttttgcatggttgtctagggtttctggacaatgtgctgttgcatttttattttcctagccttgctaaaatctttcccttctcaagactttgagcagttagaagtgctctttagaagttgtctgtgggtgatgttactgtagtggtctcagggaaaggattgtccagttactttagggggtttttggtggggtttttccccctgtgaaaacttactttgcccctagtctggctgctgctaggacttctgaggagcaatgggacatgagtgtccctgtatctgcgccactgccgcaagggaagcctcaggaaccagcacctggaggccaggatagccaagccctgggtgagcgagaggctggagaacacaggagctcacccagggctgctgcccaaccatgggccactgtgaacagacttcagtcctctgtttttgtttcataagccgttgagacatctgatggacttggcttaggccctgctgggacatcccacgtgtgatccctttcactccatcaggacaccaggactgtccttaggaaaatgtccttgagatggcagcaggagtcatattttctgtgtgtgtgtttcggaaagccgctgtgtcctgcctcagcacaaagacccagtgtcatttgctcctcctgttcctgtgccactccagaacctcagcagatctgagccaccgcctgccagtgtgagaggcggccactttcatggcagctcatcaggcgcagggccccagacagcttcccagcaggccctagagcccggcctgggccaatgatggagggcggccgccagcccagggcctgcccatccagaagggactccccagggcctgggggaggagacccttggaaaagtcctctcttcccagctcctgattctggatctgagattctcagatcacaggcccctgtgctccaggccgaggctgggctaccctcagggagatccagagactcatgcccatggccatccatgcgtggacgctgtgtggagagtccaggatgacgggatcccgcacaagctcccttcagtccttcagggctgggccatgtggttgatttttctaaagctggagaaaggaagaattgtgccttgcatattacttgagcttaaactgacaacctggatgtaaataggagcctttctactggtttatttaataaagttctatgtgatttttt

SEQ ID NO: 217464 - DNA, 5664 bp, Artificial Sequence
  derived and/or modified sequence
atggccgctaggggtagaggtctcctgctcctgaccctgtcagttttgctcgccgcagggccttctgccgcagccgcaaaattgaatatccccaaagttctcctccctttcacgcgtgcgaccagagtaaactttactcttgaagcttccgaaggatgttatcgctggctaagcaccaggcccgaggtggcgagcatcgaaccacttggactcgacgaacagcagtgcagccagaaggcagtagttcaggctagacttactcagcctgccagactgacatcaatcattttcgccgaggatattacaaccggtcaggtcctccgttgtgacgcgatagttgacctgattcacgatatacagattgtgtctactactcgggagctgtacttagaggactccccccttgagctgaagatccaggcccttgatagtgagggcaacacattctcaactctggccggtctggtgttcgagtggactatcgtcaaggatagcgaagcagatcgtttcagtgatagccacaatgcgctgaggatccttacatttttggaatcaacttatatacctccatcttacattagcgagatggaaaaggcagcaaaacagggagatacaatactagtatcaggaatgaaaacaggctcttctaaactgaaagccaggatccaggaagccgtatataaaaatgttagacccgctgaggtgcgcttacttattctggagaacatcctcctgaatcctgcatacgatgtgtatttaatggtgggtacatctatccactataaagtgcaaaagattcgccagggtaagattactgagctatcgatgccttcggaccagtacgagctgcagctccagaatagtatccctggcccagagggggatcctgcacgccctgtcgctgtccttgctcaagacacgtcaatggtaactgctcttcagctgggacagtctagtttggtgctcgggcaccggagcatccggatgcagggggcaagcaggctcccaaatagtactatctatgttgtcgagccgggatacttgggcttcactgtgcaccctggtgataggtgggtactggaaactggcagattatacgagataacaattgaggtgttcgataaatttagcaataaagtgtatgtgtctgacaacattagaattgaaaccgtgctgcccgcagaattttttgaggtgctcagttcaagtcagaatggaagttatcatagaataagggctctaaagcgaggacaaactgccatcgacgccgcactgacctccgtggtggatcaggacggtggggtacacatattgcaggtacctgtttggaatcagcaagaggtggagatccacattccgatcacactgtacccttctatactcacctttccttggcagcccaaaacgggggcttaccagtatactatcagagctcacggcggtagcgggaacttcagctggagctccagctctcatctcgttgccaccgtcaccgttaagggagtcatgactacgggaagcgatatcgggttctctgtgattcaggcacacgacgttcagaaccctctccactttggtgaaatgaaagtgtacgtcattgaacctcattccatggagttcgctccctgtcaagtcgaggccagagtcggtcaggccctcgaactgccgctgcggatcagcggactgatgcctggaggcgcttctgaggtggtaaccttgtcagattgctctcactttgaccttgctgttgaggtggagaatcagggcgtttttcagcccctgccagggcgacttccgcctgggagcgagcattgttctggcattcgcgttaaggctgaagcacagggctctacgactttactggtctcttaccgccacggacacgtgcacctgagtgccaagatcacaatcgccgcttatctgccgttaaaagccgtcgaccccagcagtgtagcattagtgacgctgggctcttccaaggaaatgcttttcgagggtgggcctagaccttggattctggagccaagcaaattcttccagaatgtgactgcagaagatacagactcgattggactggccctgttcgcgcctcatagctcaaggaattaccagcagcactggatcctagtgacttgtcaggccctgggcgaacaagtcatcgcgcttagtgtcggcaataaaccatctttgactaatcctttccctgctgtcgagcccgctgttgtgaagttcgtctgtgcccctcccagcaggctaactctggcgccagtctacacaagtccccagttggacatgagttgcccattgttacagcagaataaacaggtcgtgcccgtctcctcccatagaaatcccagactcgacctggcggcttatgatcaggagggaagacggtttgacaacttttcctccctgtccatccagtgggagagtactaggcccgtcctcgcatcaattgagcccgaattaccgatgcagctggtgagtcaggacgatgaatccggtcagaagaagctgcacgggctgcaggcgatcctggtgcacgaagccagtggaactacggcgattacagccacagccactggctaccaagaaagccacctttcttcagctcgtactaagcagccccatgacccactggtgccgctgtctgcttccatcgaactgatccttgtggaggacgttcgggtgagcccggaggaagtgacgatctataatcatcccggaatacaggctgagttgagaattcgggaggggtccggatattttttcctcaacactagcacagccgacgtggtcaaggtggcttatcaggaggcacgcggtgttgctatggttcaccctttgttgccgggatcctccacaattatgatccacgacctttgcctggtgtttccagcccctgcaaaagctgttgtgtatgtcagcgatatccaagaactgtatattcgcgtcgtcgataaagtggagattggcaaaacagtgaaagcctacgtcagagtcctggacttgcacaaaaaaccattccttgcaaagtattttccctttatggaccttaagctccgcgcagcttcgcccattattaccttggttgcattggatgaggccctggataactacaccataacattcctcatcaggggtgtcgccatcgggcagacctctcttacagcctcagtgactaataaagcaggacagcgcatcaattccgcaccgcagcagattgaggtgtttccgccattccgactgatgccacgcaaagtgacccttctgatcggggctaccatgcaagtaactagcgagggcggtccccaaccccagtccaatattcttttcagcatttccaacgagtcggtggccctggtgagcgctgccggactcgttcagggtctggccattggaaatggcacggtcagtggcttggtgcaggcagttgatgccgagacgggcaaggtggtgattatcagccaagatctagtgcaggtggaggtactactgttaagagctgtgaggattagagcaccaatcatgagaatgaggaccgggacacagatgccgatttatgttaccggtattacaaaccatcaaaatccttttagcttcggcaacgccgttccaggtctgacattccactggtccgtgacaaaacgtgacgtccttgacctccgtgggcgacatcatgaggcttctattcggctcccaagccagtacaactttgccatgaatgtgttaggaagggttaaagggagaactgggctccgagtcgtcgtaaaggcggtcgaccccacaagtggccagttgtacggcctcgcaagagagctgtccgacgagatacaggtgcaggtgttcgagaagttgcagctcttaaacccagaaattgaggcagaacagatcttaatgagcccaaacagttatatcaaacttcagacgaaccgcgatggagctgcgagcctgtcataccgggtcttggacgggcctgagaaagtgcctgtggttcacgtggatgagaagggctttctcgcatccggcagcatgatagggacaagcactattgaagtcatcgcccaggagccattcggggcaaatcagaccattattgtagccgttaaagtctcccccgtgagctatttaagggtttcaatgagccccgttcttcatacgcagaataaagaggccttagtggccgtgcctctggggatgacagtgacattcacagtgcactttcatgacaactctggggatgtgtttcacgcccacagcagtgtcctgaacttcgcaacgaatcgcgacgatttcgttcagattgggaagggccctacgaacaatacttgtgttgtaaggactgtgtccgtcggattgactctcctccgtgtatgggacgcagaacacccaggactgtccgacttcatgcctctgccagtcctccaggcaatctcccctgagctgagtggtgctatggtggtcggagatgtcctttgtcttgccacagtcctgaccagtctcgaaggcctctccggaacctggtccagtagcgccaactcgatcctccacatcgacccaaaaactggtgtagctgttgctagggccgtgggatctgtcaccgtatattatgaggtggcgggtcacctgcgcacctacaaggaagtcgtggtctccgtacctcagcgcatcatggcccgtcaccttcatccaatccagacctcgttccaggaggctacagcatccaaggtaattgttgcggtcggagatcggtcttccaacctgagaggcgagtgtacccccacacagagagaggttattcaggccttgcatcccgaaaccctgatttcatgccagtctcagtttaagcccgcagtgttcgattttccatcacaggacgtctttactgtggagccacaattcgacaccgctctgggacaatacttttgctccattacgatgcaccgactgacagacaagcagcgaaaacacttaagcatgaagaaaactgcgctcgtcgtgagcgcgtctcttagcagttcacactttagcactgagcaagtgggcgctgaggtccctttttcacccggtctctttgcagatcaggccgagatcctgctttcaaaccattacactagctccgaaattagagtgttcggcgctccggaagttttggagaacctcgaagtcaaaagcggttctccggcagtgctggctttcgcgaaagagaaaagctttggttggccatcatttattacctacaccgtgggtgtgctggatccagccgctggctcccagggtccgctatcgacaacactgacttttagcagcccagttaccaatcaggccattgcaatccccgtgaccgttgcttttgtcgtggataggcggggtccgggtccgtacggagctagtctgtttcagcattttctggactcgtatcaggttatgttcttcaccctcttcgccctcctggccggaacggctgtgatgatcattgcatatcacaccgtctgtacccctcgcgacctggccgttcctgcagctctgacacccagagcaagtcctgggcatagcccccactacttcgccgcaagcagccctacatctcccaacgcactacccccagcccgtaaagcgagcccaccgagtggactgtggtcccctgcttacgcatcccattat

SEQ ID NO: 217465 - DNA, 5664 bp, Artificial Sequence
  derived and/or modified sequence
atggccgccagaggcagaggcctgctgctgctgaccctgagcgtgctgctggccgccggccccagcgccgccgccgccaagctgaacatccccaaggtgctgctgcccttcaccagagccaccagagtgaacttcaccctggaggccagcgagggctgctacagatggctgagcaccagacccgaggtggccagcatcgagcccctgggcctggacgagcagcagtgcagccagaaggccgtggtgcaggccagactgacccagcccgccagactgaccagcatcatcttcgccgaggacatcaccaccggccaggtgctgagatgcgacgccatcgtggacctgatccacgacatccagatcgtgagcaccaccagagagctgtacctggaggacagccccctggagctgaagatccaggccctggacagcgagggcaacaccttcagcaccctggccggcctggtgttcgagtggaccatcgtgaaggacagcgaggccgacagattcagcgacagccacaacgccctgagaatcctgaccttcctggagagcacctacatcccccccagctacatcagcgagatggagaaggccgccaagcagggcgacaccatcctggtgagcggcatgaagaccggcagcagcaagctgaaggccagaatccaggaggccgtgtacaagaacgtgagacccgccgaggtgagactgctgatcctggagaacatcctgctgaaccccgcctacgacgtgtacctgatggtgggcaccagcatccactacaaggtgcagaagatcagacagggcaagatcaccgagctgagcatgcccagcgaccagtacgagctgcagctgcagaacagcatccccggccccgagggcgaccccgccagacccgtggccgtgctggcccaggacaccagcatggtgaccgccctgcagctgggccagagcagcctggtgctgggccacagaagcatcagaatgcagggcgccagcagactgcccaacagcaccatctacgtggtggagcccggctacctgggcttcaccgtgcaccccggcgacagatgggtgctggagaccggcagactgtacgagatcaccatcgaggtgttcgacaagttcagcaacaaggtgtacgtgagcgacaacatcagaatcgagaccgtgctgcccgccgagttcttcgaggtgctgagcagcagccagaacggcagctaccacagaatcagagccctgaagagaggccagaccgccatcgacgccgccctgaccagcgtggtggaccaggacggcggcgtgcacatcctgcaggtgcccgtgtggaaccagcaggaggtggagatccacatccccatcaccctgtaccccagcatcctgaccttcccctggcagcccaagaccggcgcctaccagtacaccatcagagcccacggcggcagcggcaacttcagctggagcagcagcagccacctggtggccaccgtgaccgtgaagggcgtgatgaccaccggcagcgacatcggcttcagcgtgatccaggcccacgacgtgcagaaccccctgcacttcggcgagatgaaggtgtacgtgatcgagccccacagcatggagttcgccccctgccaggtggaggccagagtgggccaggccctggagctgcccctgagaatcagcggcctgatgcccggcggcgccagcgaggtggtgaccctgagcgactgcagccacttcgacctggccgtggaggtggagaaccagggcgtgttccagcccctgcccggcagactgccccccggcagcgagcactgcagcggcatcagagtgaaggccgaggcccagggcagcaccaccctgctggtgagctacagacacggccacgtgcacctgagcgccaagatcaccatcgccgcctacctgcccctgaaggccgtggaccccagcagcgtggccctggtgaccctgggcagcagcaaggagatgctgttcgagggcggccccagaccctggatcctggagcccagcaagttcttccagaacgtgaccgccgaggacaccgacagcatcggcctggccctgttcgccccccacagcagcagaaactaccagcagcactggatcctggtgacctgccaggccctgggcgagcaggtgatcgccctgagcgtgggcaacaagcccagcctgaccaaccccttccccgccgtggagcccgccgtggtgaagttcgtgtgcgccccccccagcagactgaccctggcccccgtgtacaccagcccccagctggacatgagctgccccctgctgcagcagaacaagcaggtggtgcccgtgagcagccacagaaaccccagactggacctggccgcctacgaccaggagggcagaagattcgacaacttcagcagcctgagcatccagtgggagagcaccagacccgtgctggccagcatcgagcccgagctgcccatgcagctggtgagccaggacgacgagagcggccagaagaagctgcacggcctgcaggccatcctggtgcacgaggccagcggcaccaccgccatcaccgccaccgccaccggctaccaggagagccacctgagcagcgccagaaccaagcagccccacgaccccctggtgcccctgagcgccagcatcgagctgatcctggtggaggacgtgagagtgagccccgaggaggtgaccatctacaaccaccccggcatccaggccgagctgagaatcagagagggcagcggctacttcttcctgaacaccagcaccgccgacgtggtgaaggtggcctaccaggaggccagaggcgtggccatggtgcaccccctgctgcccggcagcagcaccatcatgatccacgacctgtgcctggtgttccccgcccccgccaaggccgtggtgtacgtgagcgacatccaggagctgtacatcagagtggtggacaaggtggagatcggcaagaccgtgaaggcctacgtgagagtgctggacctgcacaagaagcccttcctggccaagtacttccccttcatggacctgaagctgagagccgccagccccatcatcaccctggtggccctggacgaggccctggacaactacaccatcaccttcctgatcagaggcgtggccatcggccagaccagcctgaccgccagcgtgaccaacaaggccggccagagaatcaacagcgccccccagcagatcgaggtgttcccccccttcagactgatgcccagaaaggtgaccctgctgatcggcgccaccatgcaggtgaccagcgagggcggcccccagccccagagcaacatcctgttcagcatcagcaacgagagcgtggccctggtgagcgccgccggcctggtgcagggcctggccatcggcaacggcaccgtgagcggcctggtgcaggccgtggacgccgagaccggcaaggtggtgatcatcagccaggacctggtgcaggtggaggtgctgctgctgagagccgtgagaatcagagcccccatcatgagaatgagaaccggcacccagatgcccatctacgtgaccggcatcaccaaccaccagaaccccttcagcttcggcaacgccgtgcccggcctgaccttccactggagcgtgaccaagagagacgtgctggacctgagaggcagacaccacgaggccagcatcagactgcccagccagtacaacttcgccatgaacgtgctgggcagagtgaagggcagaaccggcctgagagtggtggtgaaggccgtggaccccaccagcggccagctgtacggcctggccagagagctgagcgacgagatccaggtgcaggtgttcgagaagctgcagctgctgaaccccgagatcgaggccgagcagatcctgatgagccccaacagctacatcaagctgcagaccaacagagacggcgccgccagcctgagctacagagtgctggacggccccgagaaggtgcccgtggtgcacgtggacgagaagggcttcctggccagcggcagcatgatcggcaccagcaccatcgaggtgatcgcccaggagcccttcggcgccaaccagaccatcatcgtggccgtgaaggtgagccccgtgagctacctgagagtgagcatgagccccgtgctgcacacccagaacaaggaggccctggtggccgtgcccctgggcatgaccgtgaccttcaccgtgcacttccacgacaacagcggcgacgtgttccacgcccacagcagcgtgctgaacttcgccaccaacagagacgacttcgtgcagatcggcaagggccccaccaacaacacctgcgtggtgagaaccgtgagcgtgggcctgaccctgctgagagtgtgggacgccgagcaccccggcctgagcgacttcatgcccctgcccgtgctgcaggccatcagccccgagctgagcggcgccatggtggtgggcgacgtgctgtgcctggccaccgtgctgaccagcctggagggcctgagcggcacctggagcagcagcgccaacagcatcctgcacatcgaccccaagaccggcgtggccgtggccagagccgtgggcagcgtgaccgtgtactacgaggtggccggccacctgagaacctacaaggaggtggtggtgagcgtgccccagagaatcatggccagacacctgcaccccatccagaccagcttccaggaggccaccgccagcaaggtgatcgtggccgtgggcgacagaagcagcaacctgagaggcgagtgcacccccacccagagagaggtgatccaggccctgcaccccgagaccctgatcagctgccagagccagttcaagcccgccgtgttcgacttccccagccaggacgtgttcaccgtggagccccagttcgacaccgccctgggccagtacttctgcagcatcaccatgcacagactgaccgacaagcagagaaagcacctgagcatgaagaagaccgccctggtggtgagcgccagcctgagcagcagccacttcagcaccgagcaggtgggcgccgaggtgcccttcagccccggcctgttcgccgaccaggccgagatcctgctgagcaaccactacaccagcagcgagatcagagtgttcggcgcccccgaggtgctggagaacctggaggtgaagagcggcagccccgccgtgctggccttcgccaaggagaagagcttcggctggcccagcttcatcacctacaccgtgggcgtgctggaccccgccgccggcagccagggccccctgagcaccaccctgaccttcagcagccccgtgaccaaccaggccatcgccatccccgtgaccgtggccttcgtggtggacagaagaggccccggcccctacggcgccagcctgttccagcacttcctggacagctaccaggtgatgttcttcaccctgttcgccctgctggccggcaccgccgtgatgatcatcgcctaccacaccgtgtgcacccccagagacctggccgtgcccgccgccctgacccccagagccagccccggccacagcccccactacttcgccgccagcagccccaccagccccaacgccctgccccccgccagaaaggccagcccccccagcggcctgtggagccccgcctacgccagccactag

SEQ ID NO: 217466 - protein, 717 aa, Artificial Sequence
  derived and/or modified sequence
MTPPPPPPPPPGPDPAADPAADPCPWPGSLVVLFGATAGALGRDLGSDETDLILLVWQVVEPRSRQVGTLHKSLVRAEAAALSTQCREASGLSADSLARAEPLDKVLQQFSQLVNGDVALLGGGPYMLCTDGQQLLRQVLHPEASRKNLVLPDMFFSFYDLRREFHMQHPSTCPARDLTVATMAQGLGLETDATEDDFGVWEVKTMVAVILHLLKEPSSQLFSKPEVIKQKYETGPCSKADVVDSETVVRARGLPWQSSDQDVARFFKGLNVARGGVALCLNAQGRRNGEALIRFVDSEQRDLALQRHKHHMGVRYIEVYKATGEEFVKIAGGTSLEVARFLSREDQVILRLRGLPFSAGPTDVLGFLGPECPVTGGTEGLLFVRHPDGRPTGDAFALFACEELAQAALRRHKGMLGKRYIELFRSTAAEVQQVLNRYASGPLLPTLTAPLLPIPFPLAPGTGRDCVRLRGLPYTATIEDILSFLGEAAADIRPHGVHMVLNQQGRPSGDAFIQMTSAERALAAAQRCHKKVMKERYVEVVPCSTEEMSRVLMGGTLGRSGMSPPPCKLPCLSPPTYTTFQATPTLIPTETAALYPSSALLPAARVPAAPTPVAYYPGPATQLYLNYTAYYPSPPVSPTTVGYLTTPTAALASAPTSVLSQSGALVRMQGVPYTAGMKDLLSVFQAYQLPADDYTSLMPVGDPPRTVLQAPKEWVCL

SEQ ID NO: 217467 - DNA, 2154 bp, Artificial Sequence
  derived and/or modified sequence
atgacacctccccctccgccccctcctccaccaggacccgacccggcagccgatcctgccgccgacccgtgcccttggcccggctcactggttgtcctctttggagccaccgccggagctctaggccgagatttgggttctgacgaaacggacttaattctcttggtctggcaggttgtggaaccgcggagtcggcaggtcggaactctgcataagtctctcgtgagagccgaggcagccgcactttccacacagtgcagagaggcttctggtctctccgctgatagtttggcccgcgctgagcctcttgacaaggtcctgcagcagttctctcagctggtcaacggagatgttgccctgctgggtggaggcccgtatatgctgtgcactgatggtcagcaactcctgagacaggtcttgcacccagaagcatctagaaagaaccttgtactgcccgatatgttcttctccttctacgacttgcgacgggaattccatatgcagcatcccagcacctgtcctgctcgggatctgacagtcgccacaatggcacagggcctgggtctagaaactgacgcgacagaagatgatttcggcgtgtgggaggtgaagaccatggtggcagtaatcctgcacctattaaaggagccgtcttcccagctgtttagtaaaccggaagtcatcaagcagaagtacgagactggcccatgctctaaagcagacgtggtggattctgaaacagtggtgcgcgctcgggggctaccatggcaatctagcgatcaagatgttgcacggtttttcaagggcctcaacgttgctcgcggaggagtggccctgtgcctgaacgcgcagggccgccggaacggcgaggccctcattcgcttcgtggactcagaacaaagggacttagctctccagagacataaacaccatatgggagtaagatatatcgaggtgtataaggccacaggggaggaatttgtcaagatcgccgggggaactagtttggaggtggcccgatttctgtcgcgagaagaccaggttatcttgcgccttcggggcctgccattctccgccgggcctacggatgtgctcggctttctgggacctgagtgtcctgttactggaggtaccgaaggccttctcttcgtccggcatccagatgggaggccaaccggagacgcctttgcattgttcgcttgcgaagagctggcccaagcagcactgagacgccacaaggggatgctcggcaaacgatacatagaacttttcaggtcgaccgccgctgaagtgcaacaagtactgaatcggtacgccagcggccctctgctccccaccctgactgcaccactccttcccatcccatttcctctcgcacctggaactgggcgggactgcgttagactgagaggtttgccctatactgccaccatcgaagacatcctgtctttccttggcgaagccgccgcggatatccgacctcatggtgtccacatggtgttgaatcaacaggggagaccctctggagacgccttcatccagatgacatccgctgagagggccctggccgcggctcaacgatgccataagaaggttatgaaggaacggtatgtagaggtcgtaccttgctccactgaagagatgtctcgggtcctgatgggggggaccctcggccggtccggcatgtccccccctccatgcaagctgccctgcctgagccccccgacctacactacattccaagccactccaaccctgatccccactgagacagccgccctgtacccctcaagcgcccttctgccagcagccagagttcccgccgcccctacacccgtcgcctactacccagggccggctacccagctgtatctaaattacacagcgtactacccgagccctccagtgagtcccaccactgtcggctacctgacgacccccacagcagcactggcgagcgcccctacgtccgtcttgagtcagtccggagccctggttcggatgcagggggtgccttacacagcaggaatgaaagatctgctaagcgtgttccaggcttaccagttgcccgccgatgactacacgtcgctgatgcccgtgggtgacccaccacgtacggtcctgcaggccccaaaggagtgggtgtgcctgtag

SEQ ID NO: 217468 - DNA, 2154 bp, Artificial Sequence
  derived and/or modified sequence
atgaccccacctcctcctcctcctcctcctcctggccctgaccctgctgctgaccctgctgctgacccctgcccctggccaggcagcctggtggtgctgtttggagccacagctggggccctgggccgggacctgggcagtgatgaaacagacctgatcctgctggtgtggcaggtggtggagcccaggagccggcaggtgggcaccctgcacaagagcctggtgcgggcagaggccgccgccctgagcacccagtgccgggaggccagcggcctgtctgctgacagcctggcccgggcagagcccctggacaaggtgctgcagcagttcagccagctggtgaatggagatgtggccctgctgggcggcggcccctacatgctgtgcacagatggccagcagctgctgcggcaggtgctgcaccctgaggccagcaggaagaacctggtgctgcctgacatgttcttctccttctatgacctgcggcgggagttccacatgcagcaccccagcacctgcccagcccgggacctgactgtggccaccatggcccagggcctgggcctggagacagatgccacagaagatgactttggagtgtgggaggtgaagaccatggtggccgtcatcctgcacctgctgaaggagcccagcagccagctgttcagcaagccagaggtgatcaagcagaagtatgagaccggcccctgcagcaaggcagatgtggtggacagcgagaccgtggtgcgggcccggggcctgccctggcagagcagtgaccaggatgtggcccgcttcttcaagggcctgaatgtggcccggggcggcgtggccctgtgcctgaatgcccagggcagaagaaatggagaggccctgatccgctttgtggacagcgagcagagggacctggccctgcagaggcacaagcaccacatgggcgtgcgctacatcgaggtgtacaaggccactggagaggagtttgtgaagattgctgggggcaccagcctggaggtggcccgcttcctgagccgggaggaccaggtgatcctgcggctgcggggcctgcccttctctgctggccccacagatgtgctgggcttcctgggcccagaatgtcctgtgactggaggaacagagggcctgctgtttgtgcgccacccagatggccggcccactggagatgcctttgccctgtttgcctgtgaggagctggcccaggccgccctgcggcggcacaagggcatgctgggcaagcgctacatcgagctgttccgcagcacagctgctgaggtgcagcaggtgctgaacagatatgccagcggccccctgctgcccaccctgacagcccccctgctgcccatccccttccccctggcccctggcaccggccgggactgtgtgcggctgcggggcctgccctacacagccaccatcgaggacatcctgtccttcctgggggaggccgctgctgacatccggccccatggagtgcacatggtgctgaaccagcagggccggcccagcggagatgccttcatccagatgaccagcgctgagcgggccctggccgccgcccagcgctgccacaagaaggtgatgaaggagagatatgtggaggtggtgccctgcagcacagaggagatgagccgggtgctgatgggcggcaccctgggccgcagcggcatgagccccccaccctgcaagctgccctgcctgagcccccccacctacaccaccttccaggccacccccaccctcatccccacagaaacagctgccctgtaccccagcagcgccctgctgcctgctgcccgggtgcctgctgcccccacccctgtggcctactacccaggccctgccacccagctgtacctgaactacacagcctactaccccagcccccctgtgagccccaccaccgtgggctacctgaccacccccacagctgccctggccagcgcccccacctctgtgctgagccagagcggggccctggtgaggatgcagggcgtgccctacacagctggcatgaaggacctgctgagcgtcttccaggcctaccagctgcctgcagatgactacaccagcctgatgcctgtgggggacccccccaggacagtgctgcaggcccccaaggagtgggtgtgcctgtag

SEQ ID NO: 217469 - DNA, 2154 bp, Artificial Sequence
  derived and/or modified sequence
atgacccccccccccccccccccccccccccccggccccgaccccgccgccgatcctgccgcagatccatgcccttggcccggcagcctcgtcgtgttgtttggagccaccgccggcgcgctggggagggacctcggcagtgacgaaacggaccttattttgttggtttggcaggtggtagaaccccgctctagacaggttggtactctgcataagagcctcgttcgagctgaggccgctgcactctcaacccagtgccgagaagcctcgggcctgtcagccgatagcctcgccagagctgaacctctggataaagtgttgcaacagttcagccagttagtaaacggggatgttgccttgttggggggcggcccctacatgctctgcactgatggacaacagctgctgcgacaggtactccatcccgaggcatctagaaagaacctggtgctgcccgacatgtttttctcattctatgacctgagaagggagtttcacatgcagcatcctagcacgtgtccagcgcgtgacctgacagtggcaacaatggcccagggacttggtctagaaaccgacgctaccgaggatgattttggggtttgggaagtgaagaccatggtggcagttattctgcatcttctgaaggagcctagcagccagctgtttagcaaaccagaagtcattaagcaaaagtatgaaactggtccctgttctaaagccgacgtggttgactcagagacagtcgtgagagcacggggcttgccttggcagagttcggaccaagatgtggccaggttctttaaaggcctgaatgttgcccggggcggggtggcactctgcctcaacgctcagggcagacgcaacggggaggctcttattaggtttgtcgactcggaacagcgggatctggctctacaaaggcataagcatcatatgggtgtgaggtacattgaggtatataaggctaccggcgaggaattcgtgaaaattgccggagggacatctttagaagtggcacgcttcctttcccgcgaggaccaagtgattctacggcttcgcggcctccccttcagcgccggaccaacagacgtcttggggtttcttggccctgaatgtccggtgaccggaggcaccgagggacttctcttcgtgcggcatccagacggcaggccaactggagatgcattcgctctgtttgcctgcgaggaactggctcaagcggcgcttagaaggcacaaaggaatgctagggaaaaggtacatcgaactgtttagatccacagcagcagaggttcagcaggtcctcaatcgatacgcatcaggcccactgttgcccacgctgacggcgccacttctccccatcccgtttcccctagctccaggcaccggaagggactgcgtgagacttagggggttgccgtacactgcaacgattgaagatattctttcctttctgggcgaggctgctgccgacatccggcctcatggggttcacatggtgctcaatcagcaggggcggccatctggcgacgccttcatccaaatgaccagcgcagagagagctctcgccgcagcccagaggtgtcacaaaaaggtgatgaaagagagatatgttgaggtggttccatgttcgacggaggagatgagccgagtactcatgggggggactttagggcgatcaggcatgtctccaccgccctgtaagctgccctgcctgtctccaccaacgtacaccacctttcaagcaacgcccaccttgatccctaccgagaccgccgccctctatccttcttccgcgctcctgcccgccgcgcgcgtgcccgccgcgccgacaccagttgcgtactaccctggaccagcaacgcagctgtatttgaactatacggcctattacccaagtccccctgtgtcacccacaactgtgggttatttgaccacacctaccgcagctctggccagcgccccaacgagcgtgttgtcccagtctggggcactggtgcgtatgcagggtgtcccatacactgccggcatgaaagatctgttgtctgtcttccaggcgtatcagctcccggccgatgactacacctcgctgatgcccgtgggagatccgcctcgaaccgtgctccaggcaccgaaagagtgggtgtgcctgtag

SEQ ID NO: 217470 - DNA, 2154 bp, Artificial Sequence
  derived and/or modified sequence
atgacacccccaccgcctcccccaccacctcccggaccggatcccgctgccgacccagcggctgatccctgcccatggcccggatccttggtggttctgttcggcgcaactgcgggtgctctgggcagggacctcggaagcgatgagacagatctgatcctgctggtgtggcaggtggttgagcccaggtcccgccaggttggaacattacataagtcacttgtgagggctgaagccgctgctctgtctacccagtgcagggaagcctcagggctttccgctgattctctagcacgggctgagcccctggataaagttctgcagcaattttctcagttagtaaacggcgatgttgcacttctgggcggtggcccttatatgctttgtaccgatggtcaacaactgctccgacaggttttacatcccgaagcctcccgcaaaaacctcgtgctgcccgacatgttcttctctttctatgatttgagaagagagttccacatgcagcacccatctacatgtccggctcgcgacctaacagtagcaacaatggcccagggcctgggcctggagactgatgcaactgaagatgacttcggtgtttgggaagtcaagaccatggtggcagtgattctgcacctattgaaagaaccttccagtcagctcttcagtaagcccgaagttatcaagcagaaatacgagacaggcccatgcagcaaagcggacgtggtcgattcggagaccgtcgtgcgtgccagaggtttgccctggcagagcagtgaccaggatgtggccaggttttttaaaggcctgaatgtggcgagaggcggagtcgcgctgtgtctaaacgctcagggccgacgaaatggcgaggcactaattcgattcgtcgactcagagcaacgggacttggccttgcagaggcacaagcatcacatgggagtgagatatatagaagtgtataaggccaccggagaagagttcgtgaagatagccggaggaacttcgcttgaagtggctaggtttctttctcgcgaagaccaagtcattttgcgattgcggggtctccccttttcggccggacccacggatgtgctagggttcctgggtccagaatgccctgtcaccgggggaacagagggactcctgttcgtgagacatcctgacggacggccaaccggtgatgctttcgccctgttcgcctgcgaagagctggctcaggccgcactgaggagacacaagggtatgctggggaagagatacattgagcttttcagatcaacggccgcagaggtgcagcaggtgcttaataggtacgcctctgggccacttctgcccaccctgaccgcaccgctactgcctatccccttccccctagccccaggcacaggaagagattgcgtgcggctgcggggactgccttacacggcgaccatcgaggacattctgtctttcctgggagaggctgccgctgatattaggcctcatggtgtgcatatggttttgaaccagcaaggcaggccttccggcgatgctttcatccagatgaccagcgctgagcgcgcactggcggcagctcagaggtgccacaagaaagtgatgaaggaacgatatgtcgaggtggtgccttgttctacagaggaaatgagtcgagtgcttatggggggtaccctgggcagatcagggatgtctccccctccttgcaaattgccttgcctgtctccaccaacctatactacatttcaggccacaccaactcttatcccaacagaaacagctgccctctatccatctagcgctctgctgccagcagcaagggtgccagctgcaccgacgccggtagcgtactatccgggtcctgcaacccagctctatctcaactatactgcctattatccttctcccccagtctcacctaccacagtcgggtatctaaccactcccacagctgcgttggccagtgcccctacctctgtgctgtcacaaagcggagccttggttcgtatgcaaggtgttccttatacggccggaatgaaggaccttctctcagtgttccaagcatatcagctgcccgcagacgactacacctccctcatgccagtcggagatccgccaaggaccgttctgcaggcacccaaagaatgggtatgcctgtag

SEQ ID NO: 217471 - DNA, 2154 bp, Artificial Sequence
  derived and/or modified sequence
atgacccccccccccccccccccccccccccccggccccgaccccgccgccgaccccgccgccgacccctgcccctggcccggcagcctggtggtgctgttcggcgccaccgccggcgccctgggcagagacctgggcagcgacgagaccgacctgatcctgctggtgtggcaggtggtggagcccagaagcagacaggtgggcaccctgcacaagagcctggtgagagccgaggccgccgccctgagcacccagtgcagagaggccagcggcctgagcgccgacagcctggccagagccgagcccctggacaaggtgctgcagcagttcagccagctggtgaacggcgacgtggccctgctgggcggcggcccctacatgctgtgcaccgacggccagcagctgctgagacaggtgctgcaccccgaggccagcagaaagaacctggtgctgcccgacatgttcttcagcttctacgacctgagaagagagttccacatgcagcaccccagcacctgccccgccagagacctgaccgtggccaccatggcccagggcctgggcctggagaccgacgccaccgaggacgacttcggcgtgtgggaggtgaagaccatggtggccgtgatcctgcacctgctgaaggagcccagcagccagctgttcagcaagcccgaggtgatcaagcagaagtacgagaccggcccctgcagcaaggccgacgtggtggacagcgagaccgtggtgagagccagaggcctgccctggcagagcagcgaccaggacgtggccagattcttcaagggcctgaacgtggccagaggcggcgtggccctgtgcctgaacgcccagggcagaagaaacggcgaggccctgatcagattcgtggacagcgagcagagagacctggccctgcagagacacaagcaccacatgggcgtgagatacatcgaggtgtacaaggccaccggcgaggagttcgtgaagatcgccggcggcaccagcctggaggtggccagattcctgagcagagaggaccaggtgatcctgagactgagaggcctgcccttcagcgccggccccaccgacgtgctgggcttcctgggccccgagtgccccgtgaccggcggcaccgagggcctgctgttcgtgagacaccccgacggcagacccaccggcgacgccttcgccctgttcgcctgcgaggagctggcccaggccgccctgagaagacacaagggcatgctgggcaagagatacatcgagctgttcagaagcaccgccgccgaggtgcagcaggtgctgaacagatacgccagcggccccctgctgcccaccctgaccgcccccctgctgcccatccccttccccctggcccccggcaccggcagagactgcgtgagactgagaggcctgccctacaccgccaccatcgaggacatcctgagcttcctgggcgaggccgccgccgacatcagaccccacggcgtgcacatggtgctgaaccagcagggcagacccagcggcgacgccttcatccagatgaccagcgccgagagagccctggccgccgcccagagatgccacaagaaggtgatgaaggagagatacgtggaggtggtgccctgcagcaccgaggagatgagcagagtgctgatgggcggcaccctgggcagaagcggcatgagcccccccccctgcaagctgccctgcctgagcccccccacctacaccaccttccaggccacccccaccctgatccccaccgagaccgccgccctgtaccccagcagcgccctgctgcccgccgccagagtgcccgccgcccccacccccgtggcctactaccccggccccgccacccagctgtacctgaactacaccgcctactaccccagcccccccgtgagccccaccaccgtgggctacctgaccacccccaccgccgccctggccagcgcccccaccagcgtgctgagccagagcggcgccctggtgagaatgcagggcgtgccctacaccgccggcatgaaggacctgctgagcgtgttccaggcctaccagctgcccgccgacgactacaccagcctgatgcccgtgggcgacccccccagaaccgtgctgcaggcccccaaggagtgggtgtgcctgtag

SEQ ID NO: 217472 - DNA, 6951 bp, Artificial Sequence
  derived and/or modified sequence
cctttgacttccatcaaccccagacctgccgtgttgacccccacagcccctagactgcctcctggtgacttccatactggagaaggcctctgtcttgcacgctcctttgcagaggcctgacgacccctggggaagagtggggggagagcggaagaatgggttagcccccaaaatcaggcaggaccagccctggaagtaggaatccggatcctaagcgtgcgcccaggccgggagcgtgagctcttgcgtcctgggttgagttctggcggccctcccccaaggttcccggagccgccccggtcacgtggccggcggggccggcaggtaactcgcctggagagggcgtgggccggtagccgccccgccccgcggggcgccacgggcgggtcttggcagcgcccactgagccagccgggccgcaggtgccgcccccgatacacggtgtcccgcccaagctgatccgcgtctgcggtcggtcggtgcgtgcgtgcgcctcgtcggtccgcgtgtctggccgagagcccccttcctctgcggccatgactccgccgccgccgccgccccctcccccgggccctgaccccgcggccgaccccgccgcggacccctgcccctggcccggatcactggtcgtcctcttcggggctacggcgggtgcgctgggacgggacctgggctcggacgagaccgacttaatcctcctagtttggcaagtggttgagccgcggagccgccaggtggggacgctgcacaaatcgctggttcgtgccgaggcggccgcactgagtacgcagtgccgcgaggcgagcggcctgagcgccgacagcctggcgcgggcagagccgctggacaaggtgctgcagcagttctcacagctggtgaacggggatgtggctttgctgggcgggggcccctacatgctctgcactgatgggcagcagctattgcgacaggtcctgcaccccgaggcctccaggaagaacctggtgctccccgacatgttcttctccttctatgacctccgaagagaattccatatgcagcatccaagcacctgccctgccagggacctcactgtggccaccatggcacagggtttaggactggagacagatgccacagaggatgactttggggtctgggaagtcaagacaatggtagctgttatcctccatctactcaaagagcccagcagtcaattgttttcgaagcccgaggtgataaagcagaaatacgagacggggccttgcagcaaggctgatgtggtggacagtgagactgtggtacgggctcgtgggttgccgtggcagtcatcagaccaggacgtggctcgcttcttcaaagggctcaacgtggccaggggtggtgtagcactctgcctcaacgcccagggccgcagaaatggcgaggccctcatccgctttgtggacagcgagcagcgggacctagcgctgcagagacacaagcaccacatgggcgtccgctatattgaggtgtataaagcgacaggggaggagtttgtaaagattgcagggggcacatcactagaggtggctcgtttcttgtcacgggaagaccaagtgatcctgcggctgcggggactgcccttctcggctgggccaacggacgtgcttggcttcctggggccagagtgcccagtgactgggggtaccgaggggctgctctttgtgcgccatcctgatggccggccgactggtgatgccttcgccctctttgcttgtgaggagctggcacaggctgcactgcgcaggcacaagggcatgctgggtaagcgatacattgaactcttccggagcactgcagccgaagtgcagcaggtcttgaaccgctatgcatccggcccactccttcctacactgactgccccactgctgcccatccccttcccactggcacctgggactgggagggactgtgtacgcctccgaggcctgccctacacggccaccattgaagacatcctgagctttctgggggaggcagcagctgacattcggccccacggtgtacacatggtgctcaaccagcagggccggccatcgggcgatgccttcattcagatgacatcagcagagcgagccctagctgctgctcagcgttgccataagaaggtgatgaaggagcgctacgtggaggtggtcccctgttccacagaggagatgagccgagtgctgatggggggcaccttgggccgcagtggcatgtcccctccaccctgcaagctgccctgcctctcaccacctacctacaccaccttccaagccaccccaacgctcattcccacggagacggcagctctatacccctcttcagcactgctcccagctgccagggtgcctgctgcccccacccctgttgcctactatccagggccagccactcaactctacctgaactacacagcctactacccaagccccccagtctcccccaccactgtgggctacctcactacacccactgctgccctggcctctgctcccacctcagtgttgtcccagtcaggagccttggtccgcatgcagggtgtcccatacacggctggtatgaaggatctgctcagcgtcttccaggcctaccagctacccgctgatgactacaccagtctgatgcctgttggtgacccacctcgcactgtgttacaagcccccaaggaatgggtgtgtttgtaggagagaaagccaggaggtaagagccagctgatatcctcggcgaacatgtctctcctgagtccagaagaccagcaccctcaacctggtagcttctttctggcttgtcaaagctctcagaaggtacctagaggagcccaagccccagctccatcctccacttattctgcctgtttcccccaaagacaatggctggaccctgcatgcagggctgggggtggaatggggctaaccagctcctgatggcctgagccaggcatcttgactggcacctggagagcccttaagtctgtcctggctgtggcccatgccgacagatatcgtggggctgacaggtccacggcaggcttgctttcttttataaaatggaagctctggtaccttcaatgtatgactcctgggagaatcaagggtccatctgagcctctgagtaaagatcccaatgttctacctctccctgtccctcttgtaggggatagggaggcagagagagccagcccctaccctcagagtatctggacctcagagaccatgttgtgccaggggtggtcccacctaaagatgctagcccctctccaggtgggcataaggagtaacagatggcaaaaccacaaactattttgatggactgtgctgcagtatcaccagaagacattagggggcagtaggcccccacacaaaaccttcaggcttgaattttaaaggggaggactttctgccaacttttcttgtatgccttgggaaagccagttgccctgaacccagcagacaccatggaatgtcctttgcacgcattaaatggtacagaactgaagcctcggaagcaatttggaactcgatcttctcttccttaaatgaaaagttattgaccaaatggactttttaaaagacacaggacccttaactttgccccaaagtgaggggctccacaccaaccccaggcggaggaacactcagacagattaaggatactgttgacctgtcactgtttattatttcagcactaaaactgaggagcctcaactgctggctcttcttccctttgtatttgtgtaaggagcactgcactcccataaaaggttttaaaatacaaaatgtacaagaacacacaattccaagtgctgtaaacataactgagaaccagttcctttactaaacatccattttataaaacacaaggtttcaatttgagcccatctgagccttaaagatccattctgaataccaaaaacagggcttcacagccaggcccagaagaggtctggtgataatggctggccctgggtggggatagtttacacccgggcagcagcaccacacatgaacccaaagacatgttctttttaaagctgttttcagccatgtttctctgtgcatctccagtaagcagaaggctacccattccattcctcaacccaagagctagcacagttagagtaggagggggtgcgtactagcacgtgcccagttgctcagtgctgctagtagaaattgatttgcatagtccaatggatgtgtgctttaacaccactatgttgcacaaaaatttaagtctttatctacaaagccaaaaaatattgactcttaacaccaaagcttttacaaagctgatataaaactgcttacatagtatacaaagctctattttaaaatttaatgtttattttaaataggaaagcatttctagtgctacaggcatcaaggtatttagaaggcatcaaaatttggtgcatagcaactctggatcatagaggcttttaattcttgagggcacaaagggtattgcaaggggaactcttgcaataacctcatgtgaggcagctacaccaggggcaaaagggtaggggcaagtctggccatttctctggaatgtcaaccgagaggccaacttcttgcccctccaaaggaagctgtgggcgtccaaccacaggcccagaagcaaatctcactatccacattctgtgacacaactcacttttcaagaaaatttgaaaacacccagctccaagaggggccacagtgatctgctgaagaatagacctttttctctaactaactttaggggagaaatctaaaatatattttgttttttttaaagaccatacttcctcatcctgagtcaacagctcctaacctactgacaacaggtggtgggcaataggccagctccctttcccagacctgaactggccttagtagagagagtcctggcatcaagggcctgcagtctcctggaataacagcatcaggccttcaaccagcacactgtctcacatataggcactcaaaaaatctgcttcctgaatcaatggaagtatattatttcatttgaaagcatactgcaaacttcagaggctctgtaatgggcccaggaacaggtaaaaaaaatcccattagggagaggggtaagggcaggttttttttttttttaaagtacccaactcgggtacctcctttggtagacagcaggctgcagtttctgctgggccctgccttggacaccagtctcaccagcagcagcaccagggtgtctttggtgtggagggtcaggttatcacttctggatgtgctcagagccttctggggaaaaggctggtttttagatcatacagacaggacagggtaggccagaatcatttcaggctataaatagaatggcagataagccttccatgccagtgtgactcttaaaaccttcccatctggagtcctgtattttctctgcccatgctgatgtactgctcatttgtgctttagctctgcacacagcctggcctctagctagagttagaactgcaaagctgcctaaaccactgagactggcttcaaaggtcacagaacagccaaaggcagatgcttctgtttggaaaaggttctacgaccagatgacacaaacaggaagcgcactccacagcctactagtttttatgatggcaagaaatgaaagtgaccaagctagaaccccaccattcagagtcaccttaaatgtagccatcttacccagggtcctgagggaaaaagcaatttcaacatggagccagtatggagagattgcaagattacctagaaagttaccaaaaggctatgctctggaatgtctttttatattccaacacttcaatgatggaatggtctcttctcattttatctaacaacagtttagttttataaagaggtatgagctacatttggctttatttcctataaatctatgaacgtcttcaggacacatgctgactttctgaggcataggtgtgggcttgggatatttttttctttttctttttttcttttctttttttttcttttttttttttttttttttttttttgcttctagaaggtcttatcaaaagttcctattttaaaaattatcataaaaactaaagggcccttcaaatgaccataaagcagtacaaatcaccaatcctagctaagtaaccaggtcacctgcaaaagcagcacctcggaaacaagagagcctgctgcattcacactcaaagcacccatcatataaaagtatcctagttaaatataaaaagcaaagttcatttccccaaagctcaaacagcctatgctgctcctgttcttttgccaaatctacccaaggcctgaggtggaggaatgctactttccccacaaatggtgggtcccactcctggccccagacctgaaggctgcagagttggaaacccaaggtccaaggagagaaacatgctgagaagttggtggtggacacaaggctgcagtaagcactgttagagcccatcagatcttcctaaatccagggactcaggactcgggaggggagcctgcctgctcacccctgctccttgggaaacagaaatctgggacatgtctctcccaattatctcgttcactgaaaaacaagaaaagggagagtgattagtgacctctgagtgattagccatatgatgcccaacgctgagctctacctcagacatttcccttcccatggctttctgtaaagataaaggcagtgtctgaagcctgctcctgagctgagtggcattagagatggaaacatcgctccacaaactactctggacctctttttctctctcattcagttcattttgggttgggaagggggcttaccctcactctaaaggtatgtttaaataagtattcaccttactctaacttttctttaattcatatctctttgagaaagtttttattttctacaatgccacctcctatgtaaatggaatgaaaataaatgctttggtcagaataaa

SEQ ID NO: 217473 - protein, 1870 aa, Artificial Sequence
  derived and/or modified sequence
MARWIPTKRQKYGVAIYNYNASQDVELSLQIGDTVHILEMYEGWYRGYTLQNKSKKGIFPETYIHLKEATVEDLGQHETVIPGELPLVQELTSTLREWAVIWRKLYVNNKLTLFRQLQQMTYSLIEWRSQILSGTLPKDELAELKKKVTAKIDHGNRMLGLDLVVRDDNGNILDPDETSTIALFKAHEVASKRIEEKIQEEKSILQNLDLRGQSIFSTIHTYGLYVNFKNFVCNIGEDAELFMALYDPDQSTFISENYLIRWGSNGMPKEIEKLNNLQAVFTDLSSMDLIRPRVSLVCQIVRVGHMELKEGKKHTCGLRRPFGVAVMDITDIIHGKVDDEEKQHFIPFQQIAMETYIRQRQLIMSPLITSHVIGENEPLTSVLNKVIAAKEVNHKGQGLWVSLKLLPGDLTQVQKNFSHLVDRSTAIARKMGFPEIILPGDVRNDIYVTLIHGEFDKGKKKTPKNVEVTMSVHDEEGKLLEKAIHPGAGYEGISEYKSVVYYQVKQPCWYETVKVSIAIEEVTRCHIRFTFRHRSSQETRDKSERAFGVAFVKLMNPDGTTLQDGRHDLVVYKGDNKKMEDAKFYLTLPGTKMEMEEKELQASKNLVTFTPSKDSTKDSFQIATLICSTKLTQNVDLLGLLNWRSNSQNIKHNLKKLMEVDGGEIVKFLQDTLDALFNIMMEMSDSETYDFLVFDALVFIISLIGDIKFQHFNPVLETYIYKHFSATLAYVKLSKVLNFYVANADDSSKTELLFAALKALKYLFRFIIQSRVLYLRFYGQSKDGDEFNNSIRQLFLAFNMLMDRPLEEAVKIKGAALKYLPSIINDVKLVFDPVELSVLFCKFIQSIPDNQLVRQKLNCMTKIVESTLFRQSECREVLLPLLTDQLSGQLDDNSNKPDHEASSQLLSNILEVLDRKDVGATAVHIQLIMERLLRRINRTVIGMNRQSPHIGSFVACMIALLQQMDDSHYSHYISTFKTRQDIIDFLMETFIMFKDLIGKNVYAKDWMVMNMTQNRVFLRAINQFAEVLTRFFMDQASFELQLWNNYFHLAVAFLTHESLQLETFSQAKRNKIVKKYGDMRKEIGFRIRDMWYNLGPHKIKFIPSMVGPILEVTLTPEVELRKATIPIFFDMMQCEFNFSGNGNFHMFENELITKLDQEVEGGRGDEQYKVLLEKLLLEHCRKHKYLSSSGEVFALLVSSLLENLLDYRTIIMQDESKENRMSCTVNVLNFYKEKKREDIYIRYLYKLRDLHRDCENYTEAAYTLLLHAELLQWSDKPCVPHLLQKDSYYVYTQQELKEKLYQEIISYFDKGKMWEKAIKLSKELAETYESKVFDYEGLGNLLKKRASFYENIIKAMRPQPEYFAVGYYGQGFPSFLRNKIFIYRGKEYERREDFSLRLLTQFPNAEKMTSTTPPGEDIKSSPKQYMQCFTVKPVMSLPPSYKDKPVPEQILNYYRANEVQQFRYSRPFRKGEKDPDNEFATMWIERTTYTTAYTFPGILKWFEVKQISTEEISPLENAIETMELTNERISNCVQQHAWDRSLSVHPLSMLLSGIVDPAVMGGFSNYEKAFFTEKYLQEHPEDQEKVELLKRLIALQMPLLTEGIRIHGEKLTEQLKPLHERLSSCFRELKEKVEKHYGVITLPPNLTERKQSRTGSIVLPYIMSSTLRRLSITSVTSSVVSTSSNSSDNAPSRPGSDGSILEPLLERRASSGARVEDLSLREENSENRISKFKRKDWSLSKSQVIAEKAPEPDLMSPTRKAQRPKSLQLMDNRLSPFHGSSPPQSTPLSPPPLTPKATRTLSSPSLQTDGIAATPVPPPPPPKSKPYEGSQRNSTELAPPLPVRREAKAPPPPPPKARKSGIPTSEPGSQ

SEQ ID NO: 217474 - protein, 350 aa, Artificial Sequence
  derived and/or modified sequence
MARWIPTKRQKYGVAIYNYNASQDVELSLQIGDTVHILEMYEGWYRGYTLQNKSKKGIFPETYIHLKEATVEDLGQHETVIPGELPLVQELTSTLREWAVIWRKLYVNNKLTLFRQLQQMTYSLIEWRSQILSGTLPKDELAELKKKVTAKIDHGNRMLGLDLVVRDDNGNILDPDETSTIALFKAHEVASKRIEEKIQEEKSILQNLDLRGQSIFSTIHTYGLYVNFKNFVCNIGEDAELFMALYDPDQSTFISENYLIRWGSNGMPKEIEKLNNLQAVFTDLSSMDLIRPRVSLVCQIVRVGHMELKEGKKHTCGLRRPFGVAVMDITDIIHGKVDDEEKQHFIPFQQ

SEQ ID NO: 217475 - DNA, 5613 bp, Artificial Sequence
  derived and/or modified sequence
atggcacgctggattcctacgaaaaggcagaaatacggggtggccatctacaactataacgcgagccaggatgtggaactttctctgcagataggggacaccgtgcacatccttgagatgtacgagggttggtaccgggggtatactctccagaacaagagcaaaaaggggatctttcctgagacctacatacatctgaaggaagccaccgttgaggacctgggccaacacgaaactgtcatcccgggagaactgcccctggtgcaagaattaacaagtactctgagggaatgggccgtgatctggaggaaactttacgttaataataagttgactctgttccggcagctccagcagatgacgtattccctgatcgaatggcgaagccagatcttgagcggcactcttcccaaagacgagctggcagagctcaagaagaaggttaccgcaaaaattgaccacggtaatcggatgttaggcctggacctcgtcgtgagggacgataacggcaacattctggatcccgacgaaaccagcaccatcgcactgtttaaagcccacgaagtggcgtccaagcgaattgaggagaagatccaagaagagaaatcaatcctgcagaatttggacctcaggggccaatcaatcttttctaccattcacacgtatggtctgtacgttaacttcaagaacttcgtctgcaatatcggtgaggacgcagagctgttcatggccctgtatgatccagaccagagcacctttattagtgagaattacctgatcaggtggggttctaacggtatgcccaaagagatcgaaaagcttaacaatcttcaggctgtatttaccgacctgagctccatggacttaatacgccctcgggtttctctcgtgtgccaaattgttagagtcggtcatatggaacttaaggagggcaagaaacacacctgtggtctcagacggccttttggcgtcgccgtcatggatattaccgatattattcacggtaaggtagatgacgaggagaaacaacactttatccccttccagcagattgccatggaaacatacatccgtcagagacaacttattatgtctcctttaattacaagccatgtaatcggagaaaacgagccactgacttccgtgctgaacaaagtgatcgcggccaaggaggtgaaccataaggggcaggggctatgggtcagtctgaaactgctgccgggcgacctaactcaggtacagaaaaactttagccacttggtggataggagcaccgctattgccagaaagatgggattccctgagatcattctgccaggggatgttcgtaatgatatctacgtcacactgatccacggtgagtttgataaaggaaagaagaagacccctaaaaacgtcgaagtcactatgtcagtgcacgacgaggaagggaagctcctggagaaagctatccaccccggagctggttacgaaggcatcagtgaatacaagagcgtggtgtactaccaggtgaaacagccctgctggtatgaaacggttaaagtgagcatcgcaatcgaagaggtgacaaggtgccatattagattcaccttccgacaccgttcgtcacaggagacacgggataaaagcgagcgggcctttggcgtggcgtttgtcaagctgatgaacccagacggcaccaccctccaggatggcaggcacgatctggtagtgtacaagggagataataaaaagatggaggatgccaagttctacctaactctgcccgggaccaaaatggagatggaggaaaaggagttgcaggcttcaaagaacctcgtaacgttcacccctagtaaagactctacgaaagactcctttcagatagcgacactcatttgcagcactaagttgacccagaatgtggatctattaggcctactgaactggcgtagtaattcccagaatattaaacataatctcaaaaaattgatggaggtggatggcggcgagatcgtgaaattcctccaggatactttagatgctctgtttaacataatgatggaaatgtcggattccgaaacctatgatttcctggtcttcgacgctctggtgttcatcatttccttgataggagatataaagtttcaacacttcaacccggtcctggagacttacatatacaaacatttttctgctactctcgcgtatgtcaaactgagcaaggtgttaaatttctacgttgccaatgccgacgactcgtctaaaacagagctgttgttcgccgccctgaaggcccttaaataccttttccggtttataattcaaagcagggtgctgtatctgcgattctacggccagagcaaggacggagacgaatttaataattcaattcgccagttattcctggctttcaacatgctcatggataggccgctcgaggaggctgtgaaaatcaaaggagcagcactgaagtacctgccctcaattattaacgatgttaaactcgtgttcgatcctgtggagcttagcgttctgttctgcaaatttattcagtcgatccccgataaccagcttgttaggcagaagctgaactgcatgacaaagatcgtggagtctaccctcttccgccagagcgaatgcagggaagtactcctgccactactcaccgaccaactgagcggacaactcgatgacaattctaataagcctgatcacgaggcatctagccagctgctgagcaacattctcgaagtattggataggaaagacgtgggagccaccgccgtgcacatccagctgatcatggaaagactcttgcggaggattaatcgtacagtaatcgggatgaatagacagtccccccacatcgggtccttcgtggcatgtatgattgccctgctccagcagatggacgactcccattatagtcactatatctcaacgtttaagaccaggcaggatatcatagacttcctgatggaaacattcatcatgttcaaagatctgataggcaagaatgtttacgccaaggactggatggtgatgaacatgacgcagaacagggtgttccttagggcaataaaccagtttgcggaggttctgacccgcttctttatggaccaggcatcgtttgagttgcagctctggaacaactacttccaccttgccgtagcttttttgacccatgaatctctgcagctggagactttctctcaggccaagcggaataagatcgtgaagaagtacggcgatatgcgaaaggagataggcttccggattcgggacatgtggtacaatctcgggcctcataagataaaattcatcccctcaatggtgggccccatcctcgaggtcaccctgactcctgaggtcgagttgcgcaaggcaacaatccccatcttctttgacatgatgcagtgtgaattcaactttagtggcaatggaaacttccacatgtttgaaaacgaactgattacaaaactcgatcaagaggtggagggcggcaggggggatgagcagtacaaggtcttactggaaaagctcctgctggagcactgtcgcaagcataaatacctgagtagttccggtgaggtattcgcactgttggtctcaagcctcctagaaaacctgctggattaccggacaatcatcatgcaggatgagtctaaagagaatcggatgagttgcacagtgaacgtgttgaatttctacaaggagaagaaaagggaggatatttacatccgctatctttacaaattgcgggatctgcacagagactgcgaaaactatactgaagcggcctatacactccttctgcacgctgagcttctgcagtggagtgacaaaccttgtgtgccccatctattgcagaaagacagctactatgtgtacacccagcaggaactaaaagagaagctgtatcaggaaattatttcctacttcgacaagggcaagatgtgggagaaggcaatcaaacttagtaaagagctggccgagacatacgagtccaaggtgttcgactacgaaggattggggaacctcctgaaaaagcgggcaagcttttatgaaaatattattaaggctatgcggccccaaccagagtattttgccgttggatactatggccagggcttcccaagctttctacggaataagatctttatatacagagggaaggagtatgaaagaagggaggacttcagtctccgcctgttgacacagtttcccaatgcagaaaagatgacctcaaccacaccaccaggcgaagatataaaaagttcccctaagcaatatatgcagtgctttacagtgaaacctgttatgtccctccctccaagttataaggacaaacccgtgccggagcagattttaaactactaccgtgcaaacgaggttcaacaattcagatactcacgaccattccggaaaggggagaaggacccagacaatgagttcgctacaatgtggatcgagcgtacaacatacacaacggcctacactttcccaggaatcctgaagtggttcgaagtgaaacagatatctactgaggaaatctccccgctggagaatgccatcgagacaatggaactgaccaacgagcgtatctctaattgcgtccagcagcatgcctgggatcggtctctgtccgtgcatccactaagtatgttgctctcgggcattgtggatcccgccgtcatgggcggcttttctaactacgagaaggctttcttcactgaaaagtacctgcaagagcatcccgaagatcaagagaaagtcgagctgcttaaacgactgatcgccctgcaaatgcctctgctgacagaagggattcgcatacacggggaaaagctgaccgagcaactcaagcccttgcatgagcggctgagtagctgtttcagagagctcaaggagaaggtggaaaagcattatggcgttatcaccctgccacctaacttgaccgagagaaagcagtcccggactggatcaattgtcctgccctacattatgagctctaccctaaggagactgtccatcacaagcgtgacaagtagcgtggtttcgacttccagcaattccagtgataacgcaccatccaggcccggctcggatgggtctattctggaaccactgttggagcgcagagcttcaagcggtgctagggtcgaagaccttagccttcgggaagagaacagtgaaaatagaatctccaagttcaaaagaaaagactggtccttatccaagagccaggttatagcggagaaggcccctgagcccgacttgatgtcacccactagaaaggctcagcgacctaagtctctacaactgatggataaccgtttaagcccattccacggctcctctccaccacagtcaacaccgctcagccctccccctttgacaccaaaggctaccaggactttgtcttctccaagtctacaaaccgacggcattgccgccacccctgttcccccaccaccgccaccaaagtcaaaaccttatgagggttcccaaagaaattcaactgaactcgcccctcctctgcctgtgcgtcgggaagctaaagcgcctccccccccccccccaaaggcccgaaagtcaggcatccctacttcagagcctggcagtcagtag

SEQ ID NO: 217476 - DNA, 5613 bp, Artificial Sequence
  derived and/or modified sequence
atggcccgctggatccccaccaagaggcagaagtatggagtggccatctacaactacaatgccagccaggatgtggagctgagcctgcagattggagacacagtgcacatcctggagatgtatgagggctggtaccggggctacaccctgcagaacaagagcaagaagggcatcttccctgagacctacatccacctgaaggaggccaccgtggaggacctgggccagcatgaaacagtcatccctggagagctgcccctggtgcaggagctgaccagcaccctgcgggagtgggccgtcatctggaggaagctgtatgtgaacaacaagctgaccctcttccggcagctgcagcagatgacctacagcctgattgagtggaggagccagatcctgagcggcaccctgcccaaggatgagctggccgagctgaagaagaaggtgacagccaagattgaccacggcaacaggatgctgggcctggacctggtggtgagagatgacaatggaaacatcctggaccctgatgagaccagcaccatcgccctcttcaaggcccacgaggtggccagcaagagaattgaggagaagatccaggaggagaagagcatcctgcagaacctggacctgcggggccagagcatcttcagcaccatccacacctacggcctgtatgtgaacttcaagaactttgtgtgcaacattggagaagatgctgagctgttcatggccctgtatgaccctgaccagagcaccttcatcagcgagaactacctgatccgctggggcagcaatggcatgcccaaggagattgagaagctgaacaacctgcaggccgtgttcacagacctgagctccatggacctgatccggccccgggtgtccctggtgtgccagatcgtgcgggtgggccacatggagctgaaggagggcaagaagcacacctgtggcctgcggcggcccttcggcgtggccgtgatggacatcacagacatcatccacggcaaggtggatgatgaggagaagcagcacttcatccccttccagcagatcgccatggagacctacatccggcagaggcagctgatcatgagccccctcatcaccagccacgtgattggagaaaatgagcccctgacctctgtgctgaacaaggtgattgctgccaaggaggtgaaccacaagggccagggcctgtgggtgtccctgaagctgctgcccggggacctgacccaggtgcagaagaacttcagccacctggtggacaggagcacagccatcgccaggaagatgggcttccctgagatcatcctgcctggagatgtgagaaatgacatctacgtgaccctcatccacggggagtttgataaaggcaagaagaagacccccaagaatgtggaggtgaccatgtctgtgcatgatgaggagggcaagctgctggagaaggccatccaccctggggccggctatgagggcatcagcgagtacaagtctgtggtgtactaccaggtgaagcagccctgctggtatgagaccgtgaaggtgtccatcgccatcgaggaggtgacccgctgccacatccgcttcaccttccgccacaggagcagccaggagacccgggacaagtctgagcgggcctttggagtggcctttgtgaagctgatgaacccagatggcaccaccctgcaggacggcagacatgacctggtggtgtacaagggggacaacaagaagatggaggatgccaagttctacctgaccctgcccggcaccaagatggagatggaggagaaggagctgcaggccagcaagaacctggtgaccttcacccccagcaaggacagcaccaaggacagcttccagatcgccaccctcatctgcagcaccaagctgacccagaatgtggacctgctgggcctgctgaactggaggagcaacagccagaacatcaagcacaacctgaagaagctgatggaggtggatggaggagaaattgtgaagttcctgcaggacaccctggatgccctcttcaacatcatgatggagatgtctgacagcgagacctatgacttcctggtgtttgatgccctggtgttcatcatcagcctcatcggggacatcaagttccagcacttcaaccctgtgctggagacctacatctacaagcacttcagcgccaccctggcctacgtgaagctgagcaaggtgctgaacttctacgtggccaatgctgatgacagcagcaagacagagctgctgtttgctgccctgaaggccctgaagtacctgttccgcttcatcatccagagccgggtgctgtacctgcgcttctacggccagagcaaggatggagatgagttcaacaacagcatccggcagctgttcctggccttcaacatgctgatggaccggcccctggaggaggccgtgaagatcaagggagctgccctgaagtacctgcccagcatcatcaatgatgtgaagctggtgtttgatcctgtggagctgtctgtgctcttctgcaagttcatccagagcatcccagacaaccagctggtgcggcagaagctgaactgcatgaccaagatcgtggagagcaccctcttccggcagagtgaatgtcgggaggtgctgctgcccctgctgacagaccagctgagcggccagctggatgacaacagcaacaagccagaccacgaggccagcagccagctgctgagcaacatcctggaggtgctggacaggaaggatgtgggcgccacagctgtgcacatccagctgatcatggagcggctgctgcggcgcatcaacagaacagtgattggcatgaaccggcagagcccccacatcggcagctttgtggcctgcatgattgccctgctgcagcagatggatgacagccactacagccactacatcagcaccttcaagacccggcaggacatcatcgacttcctgatggagaccttcatcatgttcaaggacctgattggcaagaatgtgtatgccaaggactggatggtgatgaacatgacccagaacagagtcttcctgcgggccatcaaccagtttgctgaggtgctgacccgcttcttcatggaccaggccagctttgagctgcagctgtggaacaactacttccacctggccgtggccttcctgacccatgagagcctgcagctggagaccttcagccaggccaagaggaacaagatcgtgaagaagtacggggacatgaggaaggagatcggcttccgcatccgggacatgtggtacaacctgggcccccacaagatcaagttcatccccagcatggtgggccccatcctggaggtgaccctgaccccagaggtggagctgaggaaggccaccatccccatcttctttgacatgatgcagtgtgagttcaacttctctggaaatggaaacttccacatgtttgaaaatgaactcatcaccaagctggaccaggaggtggagggcggcagaggagatgagcagtacaaggtgctgctggagaagctgctgctggagcactgcaggaagcacaagtacctgagcagcagtggagaggtgtttgccctgctggtgagcagcctgctggagaacctgctggactaccgcaccatcatcatgcaggatgagagcaaggagaacaggatgagctgcaccgtgaatgtgctgaacttctacaaggagaagaagcgggaggacatctacatccgctacctgtacaagctgcgggacctgcaccgggactgtgagaactacacagaggccgcctacaccctgctgctgcacgccgagctgctgcagtggagcgacaagccctgtgtgccccacctgctgcagaaggacagctactacgtgtacacccagcaggagctgaaggagaagctgtaccaggagatcatctcctactttgacaagggcaagatgtgggagaaggccatcaagctgagcaaggagctggccgagacctatgagagcaaggtgtttgattatgagggcctgggcaacctgctgaagaagagggccagcttctatgagaacatcatcaaggccatgaggccccagcctgagtactttgctgtgggctactacggccagggcttccccagcttcctgaggaacaagatcttcatctaccggggcaaggagtatgaaagaagagaggacttcagcctgcggctgctgacccagttccccaatgctgagaagatgaccagcaccaccccacctggagaggacatcaagagcagccccaagcagtacatgcagtgcttcaccgtgaagcctgtgatgagcctgccccccagctacaaggacaagcctgtgcctgagcagatcctgaactactaccgggccaatgaggtgcagcagttccgctacagccggcccttcaggaagggggagaaggaccctgacaatgaatttgccaccatgtggattgaaagaaccacctacaccacagcctacaccttccctggcatcctgaagtggtttgaggtgaagcagatcagcacagaggagatcagccccctggagaatgccatcgagaccatggagctgaccaatgaaagaatcagcaactgtgtgcagcagcacgcctgggacaggagcctgtctgtgcaccccctgtccatgctgctgagcggcatcgtggaccctgctgtgatgggcggcttcagcaactatgagaaggccttcttcacagagaagtacctgcaggagcaccctgaggaccaggagaaggtggagctgctgaagaggctgattgccctgcagatgcccctgctgacagagggcatccgcatccatggagagaagctgacagagcagctgaagcccctgcacgagcggctgagcagctgcttccgggagctgaaggagaaggtggagaagcactatggagtcatcaccctgccccccaacctgacagagaggaagcagagcaggacaggcagcatcgtgctgccctacatcatgagcagcaccctgcggcggctgagcatcacctctgtgaccagctctgtggtgtccaccagcagcaacagcagtgacaatgcccccagccggcccggcagtgatggcagcatcctggagcccctgctggagcggcgggccagcagcggggcccgggtggaggacctgagcctgcgggaggagaacagcgagaaccgcatcagcaagttcaagaggaaggactggagcctgagcaagagccaggtgattgctgagaaggcccctgagccagacctgatgagccccaccaggaaggcccagaggcccaagagcctgcagctgatggacaaccggctgagccccttccacggcagcagccccccccagagcacccccctgagccccccacccctgacccccaaggccaccaggaccctgagcagccccagcctgcagacagatggcattgctgccacccctgtgcccccacctcctccacccaagagcaagccctatgagggcagccagaggaacagcacagagctggccccacccctgcctgtgcggcgggaggccaaggcccctcctcctcctccacccaaggccaggaagagcggcatccccaccagcgagcccggcagccagtag

SEQ ID NO: 217477 - DNA, 5613 bp, Artificial Sequence
  derived and/or modified sequence
atggcccggtggatccccaccaagcggcagaagtacggcgtggccatctataactacaacgcatcccaggatgtagaactttctcttcaaatcggtgacaccgtgcacattctcgaaatgtatgaaggatggtacagaggatacacactgcagaacaaatccaaaaagggaatttttcccgagacatacatccacctgaaggaggccactgttgaggatttgggtcaacacgagaccgtgatcccaggggagctgccattggtacaggagctgacttccacgctgagggaatgggcagtaatttggagaaagctttatgtaaacaacaagctgacactcttccggcagttgcagcaaatgacttatagcctcattgaatggcgctcccaaatactctcagggactttgcctaaagacgaactggccgagctcaagaaaaaagtgaccgccaagatcgatcacggtaatcgcatgctgggactcgatctcgttgtgcgcgacgacaacggaaatattctggacccagacgagacctccaccatagcgctttttaaggcacacgaagtggcaagcaaaaggatagaagagaaaatccaggaggaaaagtccatcttgcaaaaccttgatctgagagggcaatcaatcttttcaacgatccatacgtacggactgtacgtgaacttcaaaaattttgtatgtaacatcggggaggatgcagaactgttcatggctctctatgacccagaccagagcactttcatcagcgaaaactacctgatccgctggggtagcaacggcatgccaaaggagattgaaaagctcaataatcttcaagcggtgtttacagatctttctagcatggatctcattcgcccgcgggtcagcttggtgtgccagattgttagagttgggcatatggagcttaaggagggtaaaaagcacacctgtggcctccggaggccattcggtgttgcagttatggatatcaccgacattatacatggcaaagtggacgacgaggagaaacagcactttatccccttccagcagattgccatggagacctatataagacagagacagttaatcatgtccccccttataacctcacatgtgattggagaaaatgagccactaacaagcgtgctcaacaaggtgatagcagctaaggaggtcaaccataagggtcagggattgtgggtgagcctgaaactgctgccaggtgatctcacacaggtgcagaaaaacttttctcacttggtggatcggtcaacagccattgcaagaaaaatggggttccctgaaattatcctcccgggtgatgtgagaaacgatatttatgttaccttgattcacggggaatttgacaagggcaagaaaaaaaccccgaagaacgtggaggtgaccatgtcagtacacgatgaagaaggcaagctattagaaaaagctatacaccctggggcgggttacgaaggcatttctgaatacaaatccgtcgtctattaccaggtaaaacagccctgctggtacgagacagttaaggtgagtatcgccatcgaggaggtgacacgatgccacatccgcttcacatttaggcatcgtagctcccaagagacccgggacaaaagtgaacgcgctttcggagtggcattcgtgaagctaatgaaccctgacggcactacactgcaggacggccggcatgatctagtcgtgtacaagggcgataacaagaagatggaagacgctaagttctacctcactttgcctggcaccaaaatggaaatggaggagaaagagcttcaggcgtccaagaacttggttaccttcacaccctccaaggattccacaaaggactcgtttcagattgccacactgatttgttctaccaaactgacccagaacgtcgacttgctgggacttttgaattggagatcaaacagccagaatattaaacataacctcaaaaaactcatggaagtggacggaggggaaattgtgaaattcctgcaggacacactggacgctctgtttaacataatgatggaaatgagcgattccgaaacctacgacttcctcgtttttgacgctctggtctttatcatcagtctgatcggagacataaaattccagcacttcaacccagttcttgagacctatatttacaaacacttttccgccacactcgcctacgtaaagctgtccaaagttctgaacttctacgttgccaacgccgatgacagctcaaagaccgagttgctttttgctgctttgaaagccctcaaatatctatttaggtttattattcagtctcgagttctgtacctcaggttctatggccagtcgaaagacggcgacgagttcaacaattctatccgccagctttttctggcctttaatatgctcatggaccgcccactggaggaagctgtcaaaatcaagggagccgccctgaaatatctgccctcaatcatcaatgatgtcaagctggtgttcgatcctgtagaattgtctgtgctgttctgcaagttcatccagagtatccctgataaccagctggtcagacagaaactcaattgtatgactaagatcgttgagtccaccctattccggcaatcagagtgtagagaagtgctgttgccccttctcacagaccaattgtctggacagctggatgacaacagtaacaagcccgaccatgaggccagcagccagctgctgagtaacatactggaagtgctcgataggaaagacgtcggagctacagctgtccatatccagctcattatggagcgactgctgaggaggatcaacaggacagttatagggatgaataggcagagtccccatatcggcagctttgttgcctgcatgatcgccttgctgcaacagatggacgacagccattacagtcactatatctccacatttaagacgagacaagacataatcgattttctgatggagacatttattatgttcaaagacctgataggcaaaaatgtatatgcaaaagactggatggtaatgaatatgacgcagaaccgggtcttcctaagagctatcaaccagtttgctgaagtgttgacacgcttcttcatggaccaagcgagcttcgagctccagctgtggaataattacttccaccttgccgtcgccttcctgacccacgagtcactacagcttgagaccttctctcaggctaaacggaacaagatcgtcaagaagtatggcgacatgcgaaaagagatcggcttccgaatccgcgatatgtggtacaaccttggacctcacaaaatcaagtttatcccatccatggtcggcccaattctagaggtgacactcacaccggaagtcgagctgcgcaaggccacaatacccatcttttttgacatgatgcagtgcgagttcaattttagtggcaatggtaattttcatatgttcgaaaacgagctgatcactaagctcgaccaagaagtcgagggcggccggggggacgagcaatacaaggtgctgctggaaaagctcttactcgagcactgcagaaaacacaagtatctgtcttcatccggcgaggtgttcgccttgcttgttagctccctgctcgagaatctgctggattaccgcaccattattatgcaggacgagtcaaaggaaaacaggatgtcatgcaccgtgaacgtgctcaacttttataaagagaaaaagagagaagacatttatatcagatatctctacaagttgagagatctgcaccgggactgtgagaattacaccgaggctgcctatactttactgcttcacgccgagttgctacagtggagcgacaaaccctgtgtgccccaccttctgcagaaagattcatactacgtttacactcagcaggaactgaaagagaaactgtatcaggagattatctcttacttcgataaggggaagatgtgggaaaaggccatcaagctcagcaaagaactggccgagacttatgaatcaaaagtgttcgattacgagggactcgggaaccttctgaagaaaagagcctccttctacgagaacattatcaaagctatgcgaccccagcccgagtatttcgccgtcgggtactacggacaggggtttccgagctttctgagaaataagatttttatatatagggggaaggaatatgagcgccgcgaggactttagcctccggctgctgacacaattcccaaacgcagaaaaaatgactagtactacaccaccaggtgaggacattaagagttcccccaaacagtatatgcagtgctttacagtcaaaccagtcatgagccttccgccgtcctataaggataaacccgtgccagagcagatactgaattactatcgggcaaacgaagtccagcagtttaggtatagcagaccttttaggaagggcgagaaagatccagacaatgaattcgcaacgatgtggatcgagcgaaccacttacaccacagcctacaccttcccaggcatactgaaatggtttgaggtaaagcagatctctacagaagagatctctcccctggagaacgcaattgagacgatggagcttactaatgaaaggatatcgaattgtgtgcagcagcacgcatgggatcgaagcttgtcggtacatcccctcagcatgctgctgtccggtattgtggatcccgccgtgatgggagggttctctaactacgagaaggccttttttacggaaaagtacttacaagaacaccctgaggatcaggagaaggtcgaactcctgaaaaggctgattgctctgcagatgcctttgttgaccgaaggcattcgaatccacggtgagaagttgaccgagcaactgaaaccattacacgaacgtctgagtagttgtttccgggagctcaaggaaaaagtagaaaagcactacggtgtcatcacactgccccctaacctaacggaacgcaaacagagcagaaccggatcaatcgtcctcccttatatcatgtcaagcactctgcgaagactttctatcaccagtgtgaccagttccgtagtttccacatcctcaaattcctccgacaatgccccctcccgacccggctccgacggaagtattcttgagcctctgcttgagcggcgcgcctcttcgggcgccagggtagaggacctctcactgagggaggaaaactctgagaacagaatcagcaagtttaaaagaaaggactggagtctgtctaaaagccaggtgatagccgagaaagccccagagcctgacttaatgtctcccacacgcaaagcacagcgaccaaagtcactgcagttaatggacaacaggttaagccctttccacggtagctcacctccacagtcaacccccttgagtccgccccccctaacaccgaaagccaccagaacgctgagtagccccagtctgcagacagacggcatcgctgcaacccccgtgcctccacctccccccccaaagtctaaaccttatgagggctcccagagaaacagtaccgagctggccccccccttgcccgtgcgcagggaggcaaaagcgccgcctcccccccctcccaaagcaaggaagtcaggcatccccacatcagagcccgggtcccagtag

SEQ ID NO: 217478 - DNA, 5613 bp, Artificial Sequence
  derived and/or modified sequence
atggcgagatggattccaactaagcgacagaagtatggtgtggccatctataattataatgcatcccaggatgtggagctttcccttcagataggtgacacggtgcatatactggagatgtatgagggatggtacagaggatataccctgcagaataagtcaaagaagggcatcttccctgagacctatattcacctgaaagaggctacggtggaagacctcggtcagcacgagaccgtgatccctggggaactaccactcgttcaggagctgacctctaccctgcgggagtgggctgtcatatggcggaagttatacgtgaacaataagctaacattgttccgtcagttacagcagatgacctattccctcatcgaatggcggagccagatcttgagcggaactttgccgaaggacgaattagcggaacttaaaaaaaaggtcactgcaaaaattgatcacggaaatcgaatgctgggcctggatttagtggtgagagatgacaacgggaatattcttgatccagacgaaacatctacaatcgcattgtttaaagctcatgaagttgcctctaaacggattgaggagaagattcaggaagagaagtccatcctgcagaacttggatctgcgaggccagtcgatatttagcactattcacacctacggtctgtacgtcaacttcaagaatttcgtctgcaacatcggtgaagatgcggaacttttcatggccttatacgaccccgatcagagtacgttcatctctgaaaattatttaattcgctggggaagtaacggcatgcccaaggaaatcgagaaactcaacaacctgcaagcagtcttcactgatctctcctccatggatcttatccgacctcgtgtgagtctcgtctgtcaaatcgtaagggttggacatatggaattgaaggaagggaagaagcacacttgtggcctcaggcggccttttggggtggctgtgatggatattaccgatatcatccacgggaaggtcgacgacgaagaaaagcaacactttatcccctttcagcaaatcgccatggaaacctacattcggcaacggcaactgattatgtcccccctgattacctcccatgttattggagagaatgaaccactgaccagcgttttgaacaaggttattgcggctaaagaagtgaatcataaaggtcagggactgtgggtgtcccttaaacttctgcccggagatttgacacaagtacagaagaactttagccacctggtagaccggtcaactgccatcgctcggaagatgggcttcccagagatcatcttgccaggtgatgtgcgaaacgacatctacgtgacactgattcatggcgagtttgacaaagggaaaaaaaagacacccaagaatgtggaagtgaccatgtctgtacacgatgaggaaggtaagctgctcgaaaaggccattcatcccggagctggttacgagggtatctccgagtataagagtgtggtgtattatcaggtcaagcaaccatgctggtacgagaccgttaaggtttccatcgctattgaagaggttactcgctgtcacatccggttcacattccggcatagaagctcgcaggaaacaagagataaaagcgagcgggcttttggcgtagccttcgtcaagctaatgaatcctgatgggaccactcttcaggacgggagacatgatctcgtcgtgtataaaggggacaataaaaaaatggaagatgctaagttctacttaacattgcctggtactaaaatggagatggaagagaaggagctgcaagccagcaagaacctggtgacttttactccttcaaaggatagcacaaaagattccttccagattgctactttgatctgttcaaccaagctcacccagaacgtcgacctactcggcctgctcaactggcgttccaactctcagaacatcaagcataatctgaagaaactcatggaagttgatggcggagagatagttaagtttctgcaggacacactggacgctttatttaacatcatgatggagatgtcggactctgagacttacgactttctggtttttgacgctctggtcttcattatttccctcataggcgacatcaaatttcagcactttaatccggtcctcgagacctacatttacaagcacttctctgccactttagcctatgttaagctcagtaaggttctcaacttttacgtggcaaacgccgacgattcaagcaagacagaactactgttcgccgcacttaaggccctgaagtacttatttcgttttataattcagtcgcgcgttctgtatcttcgattctacggacagtctaaagacggagatgaattcaacaactccatccgccaactctttttggccttcaatatgcttatggacaggccgttagaagaagccgtcaaaatcaagggcgcagcactgaaatacttaccctccattataaacgatgtcaaactggtgtttgatcctgtagaactttccgttctattttgcaagttcattcagtccatcccagataaccaattggtacgtcagaagttgaactgtatgactaaaatagtcgagtcaactttgttcaggcagtcagagtgccgcgaggtgttgctgccactactcactgaccagctgtcgggccagctcgacgacaactccaacaaaccagatcacgaagcttcaagccagctgctctctaacatactggaggtgctggaccggaaagatgtaggagctactgccgttcatatccagctgatcatggaacgtttgctccggagaatcaacaggacagtgatcggtatgaatcgacagagcccacacatagggagttttgtcgcatgcatgatcgctctcctgcaacaaatggacgactcccactattcccactacattagcacatttaaaacaagacaagacattatcgattttctgatggaaacctttatcatgttcaaggacctgataggcaaaaacgtttatgccaaagactggatggtgatgaatatgacacagaaccgcgtgtttctacgcgcaattaatcagttcgcggaggtcctgacccggttctttatggaccaggcgagttttgaattgcagctgtggaacaactactttcatctagcagtcgcctttcttacgcatgaaagtctgcagttggagacctttagtcaggctaaacgtaacaagatcgtgaagaagtacggagacatgcgaaaagagattggtttcaggatccgggatatgtggtataatctgggaccacacaaaattaaattcatcccatcaatggtggggccaatactggaggtgacactgacgccagaggtggaattgcgtaaagctaccattccaattttctttgacatgatgcagtgtgagttcaatttcagtgggaatggcaactttcacatgttcgaaaatgagttgattacaaaacttgatcaggaagtcgaggggggaagaggggacgagcaatataaggttctccttgagaaactccttctcgagcattgtaggaaacacaagtacctgagcagttctggggaagtttttgctctgctcgtctcctccctgctggagaacctgctagattacagaacaattataatgcaggacgagtcaaaggagaatcgcatgtcatgcaccgtcaacgtgctcaatttttacaaggaaaagaaaagagaggatatttatatccgttatttgtacaaactgagggatctgcatagggactgtgaaaattatacggaggctgcctatacgctcctcctgcacgcagaattgctgcaatggtccgataaaccctgcgttccccatctcctccagaaggacagttactatgtctacactcagcaggaactaaaggaaaaactgtatcaagaaattatcagttactttgataaggggaagatgtgggagaaggccataaaactcagtaaagagctcgcagaaacctatgaaagcaaggtgtttgattatgagggactcggaaatttgctgaaaaagagggcctcattttacgagaacatcattaaggcgatgcggcctcagcccgaatacttcgcagtgggctactacggccaagggtttccctcttttcttcgcaataaaattttcatttacagggggaaagaatacgagcggagagaggacttctctctaaggctgctgacacagttccccaacgccgagaagatgactagtactactccacctggggaggacatcaaatcaagtccgaaacagtatatgcagtgcttcactgtgaagccagttatgtctttgccaccctcttataaggataaaccggtgcccgaacagattctgaattactatcgggcaaacgaggtgcagcagtttagatactctaggccatttcgaaagggagaaaaggatcctgataacgagtttgcgaccatgtggatagagcgtacgacctacaccaccgcttataccttccctggcattctgaagtggtttgaagtgaagcaaatttccaccgaggaaatttcacctctcgagaacgccatcgagaccatggaactcaccaatgagaggatctctaactgtgtacaacagcacgcctgggaccgctccctgtcggtgcatcccctgtctatgctgctctccggcatcgtggacccggctgtaatggggggattctcaaattatgaaaaagccttctttaccgagaagtatttacaggaacacccggaagatcaggaaaaggttgaacttctgaagaggctgatagcattgcagatgcccctcctaacagagggcattcgcatacatggggagaagctcaccgaacaactgaagccattacacgaacgcctgtcttcatgctttagggagctcaaggaaaaagtggaaaagcattacggggtgattactctaccccctaatcttaccgaacgtaagcagtcccgcaccggatcgatagtcctgccatacattatgagtagcacccttcggagactgtccataactagcgtgacatcttcagtggtcagcacttcaagcaactcttctgacaatgcgccatctaggcccggttctgatgggtctatactggagcctctgttggagagacgggcttccagcggggctagagtggaagacctcagtctgcgagaagagaactcagagaatcgaatttctaaattcaagcgcaaagactggagcctctcgaaatctcaggttatcgcagagaaagcgccagaacctgatttgatgtctccgaccagaaaagctcagcgcccaaagtctctgcagctgatggacaaccggctgtccccgttccatgggtcaagtccccctcaatctacacccttgagtcccccacccctcactccaaaggcaacgcggaccctttcatctcctagtctccaaactgatgggattgctgcaactcccgtcccaccgcctcctcctccaaaaagcaagccttacgagggctctcagcgaaatagtaccgaacttgcaccacctttgccggttcggagggaggcaaaggctccacctccccctccgccaaaggcaagaaaatccggaatcccaacaagcgagccaggctctcagtac

SEQ ID NO: 217479 - DNA, 10075 bp, Artificial Sequence
  derived and/or modified sequence
tgtagcagccttagtcgccgccgccgcggggcgaggtcgccgccatggcccgctggatcccgaccaagaggcagaagtacggggttgcgatctataactacaatgcttctcaagatgtggagctctccttgcagatcggtgacacagttcacatcctggagatgtacgagggttggtacagaggatataccctccaaaataaatctaaaaagggcattttccctgaaacatatatccatttgaaagaggcaactgtggaagacctggggcagcatgaaaccgtgattcctggcgagctccccctggtgcaggagctcacgtccactctgcgagaatgggctgtcatctggcgaaagctctacgtgaacaacaagctcaccctcttccgccagctgcagcagatgacgtacagcctgatcgagtggcggtcccagatcctgtctgggacgctccccaaggatgaactggcagagctcaagaagaaagtcacagccaaaattgatcatgggaacagaatgctggggttagatctggtggtgcgagatgacaatgggaacatcctagaccctgacgaaaccagcaccattgccctcttcaaggcccatgaggtggcctccaaaaggattgaggaaaagatccaagaagagaagtcaatcctgcagaacctcgatttgcggggccagtccatcttcagtaccatccacacctatggcctctatgtgaacttcaagaactttgtctgcaacatcggggaagatgcagagttgtttatggccctctacgacccagaccagtccacttttatcagtgagaactatctaattcgttggggcagtaacgggatgcccaaggaaatagagaagctcaataacctccaagcagtgtttacagaccttagcagcatggacctcatccggccccgcgtcagccttgtgtgccagattgtccgcgtgggccatatggagctgaaggaaggcaagaagcacacctgtggactccgaagaccttttggagtggcagtgatggatattactgatatcatacatgggaaggtggatgatgaagaaaagcagcattttattccctttcagcaaattgcgatggaaacctacatccgccagaggcagctcatcatgtcgcctttgataacatcacacgtgattggggagaatgagccactcacttcagtcttgaataaagtgattgcagcaaaggaagtgaatcacaaagggcaaggcctttgggtatccttgaagctcttgcccggtgacctcacccaggttcagaagaatttttcacacttggttgatagatcaacagcaatagcccggaagatgggctttcctgaaatcatactgccaggagatgttcggaatgacatttatgtcaccctgatccacggtgagtttgacaaagggaagaagaagacgccaaagaatgtggaggtgacgatgtctgtgcacgatgaggagggcaagctcttggagaaagcaattcaccctggtgctggatatgaaggcatttcagaatacaaatcagtagtctattaccaagtcaagcagccctgttggtatgagactgtcaaggtatccattgctatagaagaagtcacacgctgtcatataagatttaccttccgacacaggtcatctcaggaaaccagagataaatcggagcgagcatttggggtggccttcgtgaagctgatgaacccggatggcaccactctgcaggatgggaggcacgatctggtggtttataagggtgacaacaaaaaaatggaagatgctaaattctacctgaccctgcctggaaccaagatggagatggaagaaaaagagcttcaagcatccaaaaacctggtcaccttcaccccaagcaaggatagcactaaagacagctttcagattgccaccctcatctgctccacaaagctcacccagaatgttgacctgttaggcttgttaaattggcgttccaactcccagaacattaaacacaacctaaagaagttaatggaagtggatggaggagagattgttaagtttttgcaagatacactagatgcactctttaacataatgatggaaatgtcagacagtgaaacctatgacttccttgtgtttgacgcactggtatttattatttcactgataggagacatcaagttccagcattttaatcctgtacttgaaacctacatttacaagcacttcagcgccactttggcatatgtgaaactctccaaggtactgaacttctatgtggctaatgcagatgactccagcaagactgaactgctttttgctgcgttgaaagccttgaagtacttgtttagattcatcatccaatcccgagtgctctacttgagattttatgggcagagcaaagatggagatgagtttaataattcaattcgccagttatttcttgctttcaatatgctgatggacaggcctctggaggaagccgtcaagatcaagggggcagctttgaagtaccttcctagcataattaatgatgtcaaacttgtatttgatcctgttgagctcagcgtgctcttctgcaaattcattcaaagcattcctgacaaccagctggttcggcagaaacttaactgcatgaccaagatagtagagagcactctttttcgacagtcagagtgcagagaagtgctgctgccactgctgacagaccagctcagcggccagttagatgacaactccaacaagcctgaccacgaggcaagctcgcagcttctgagcaacatcctggaggtgctggacaggaaggatgtgggtgccactgcggtgcacattcagcttataatggaacggctgctgagaaggatcaaccggacagtgattgggatgaaccggcagtctccccacatcgggagttttgtggcttgcatgattgccctgctgcagcaaatggacgacagccactatagccactacatcagcactttcaaaaccagacaagacatcatcgacttcctcatggaaacttttatcatgttcaaggacctgattggaaagaatgtctatgccaaagattggatggtgatgaatatgactcaaaacagggtttttctccgtgctataaatcagtttgctgaagttctcacaagattcttcatggatcaggcaagctttgaacttcagctctggaacaattacttccatttggcagttgcatttctcacccatgagtcccttcagcttgaaaccttctcacaagccaagcgcaacaaaattgttaaaaaatatggggacatgagaaaggaaatcggctttagaatccgggacatgtggtataacctgggtccccacaaaatcaaattcatcccatccatggtgggtcccattctggaggtcactctgacccctgaagtagagctccggaaagccacaatccccattttctttgatatgatgcagtgtgagttcaatttcagtggaaatggcaatttccatatgtttgagaatgagctgatcacaaagctggaccaggaggtagaagggggcagaggagacgaacaatacaaggttcttctggaaaaactgctcctagaacattgccggaaacacaaatacctctccagctctggggaggtcttcgccctcctggtcagcagcctcttagagaacctgctggactatagaaccatcatcatgcaagatgagagcaaggagaaccgtatgagctgcactgtgaacgtgctgaacttttataaagaaaagaagagagaggacatatacataagatatctgtacaagcttcgagatttgcaccgagactgtgagaactacacagaagctgcctacacgcttctcttgcacgctgagcttctgcagtggtctgacaagccctgtgtgcctcatttgcttcagaaggacagttactatgtttatacccagcaagagcttaaagagaagctgtatcaagaaatcatatcatatttcgacaaaggcaaaatgtgggagaaggccatcaagctgagcaaagagttggctgagacttacgaaagcaaagtatttgactacgagggccttggcaacctcctgaaaaaaagggcctcattttatgagaacatcattaaggcaatgaggcctcagcctgaatactttgctgttggatactatggacagggctttccttctttcctacggaataaaatcttcatctatcggggaaaggagtatgagaggcgagaggacttcagcctgaggttgttaacccagttccccaatgcggagaagatgaccagtaccacgcctcctggggaagacatcaagtcgtcccccaagcagtacatgcagtgcttcactgtaaagccagtgatgagcttgccgcccagctacaaggataaacctgttccagagcagatcttaaactactacagagccaatgaagtgcagcagttcagatactcccggccgttccggaaaggagaaaaggatccagacaatgaatttgctacgatgtggattgaacggaccacgtatacgactgcatatacctttcctgggattctcaagtggtttgaagtcaaacagatttcaacagaagagatcagtcctctggagaatgccatcgaaaccatggagctgaccaacgagaggatcagcaactgtgttcagcagcatgcctgggaccggtccctctctgtgcaccctctctccatgctgctcagtggcatcgtggacccggccgtcatggggggcttctccaactatgaaaaggctttttttacagaaaagtacttgcaggagcatcctgaagaccaggagaaggttgagctgctaaagcgactaatagcattacagatgcccctgctaacagaagggatccgcatccatggggagaaactcacagagcagctgaagccgctgcatgagcggttgtcttcttgcttccgggaactcaaggagaaagtagaaaagcactatggggttataacactgccacccaacttgacggagaggaagcaaagccgcacggggtctattgtgctcccctacatcatgtcttccactctgcggaggttgtccatcacctcagtcacttcctctgtggtttccacctcttcaaactcgtctgacaatgctccttccagaccgggatctgatggctcaatcttggagccacttttggagcgcagggcctcgtcaggtgccagagttgaagatctgtcccttagagaggagaacagcgagaaccggatcagcaagtttaagagaaaagactggagtctgagcaagtcccaggtcattgcagagaaagcaccagaacccgatttgatgagcccaaccagaaaagcacaaaggccaaagagtctccagttgatggataatcggctatcaccatttcacggttcttcacctcctcagtcaacacccttgagcccacctccactcactcccaaagccaccaggaccctaagctccccatcgttgcagacagatggaatcgcggccactcctgtcccacctccacctccccccaaaagcaagccctatgaaggcagccagaggaactccactgagctcgctcccccactgcctgtccgaagagaagccaaagcaccaccccctccacctccaaaggctcggaagtctggcatccctacttccgagcctggatcccagtaaggatcttgccctccctgcaacaccgagtgccttagacagctgctgcctgagaactggcctccagccggtgtcctcattccatggggctccctgctgactgcatttcctgatctgggatgatgtttaccagcccaaaaccagtcatgttcttccaaaagcttctctttgatagaattttgaggccatgccacctcccttccagtccacatggaattccagaatcagtcacagcctctgattttttccaagaagagattgccttcaccattgttaaatgtcagcctgtacggcagagacatggtggtctgcacaagcctggacaagttcttccatattgatggtggagcaacccctgtaatctactccttggaaggattttttgctttgcttatgaaaagctgtgcttgagacttaggtacttttctcacgtggacacactgatcccatcccatattgcatcttggaagagatggatatcaagtacactttggtagctgaaataatcatatctttctgatgtctattgtatctcctttgaggaaaagaacacacatttttaatggagattggctgctttcaggtatgtgtgtctatcattgaaagagcatggactcaaacatcagccctgagttcttgagtccacccaactcccatcttcttgtggcacaggaaagctgccctctccctctcccaccacactcctgactaatggccttcactgcgtcgcagtcactccttccctacggacttctttgaagctcttccttttgcacatacggctttttttttttttttttttttttgtcctattacctcctctgagcgcaaatcactggctacaagggacttaccagtctggattcagcagtttcttttctaaaacccatttgggtgactcagcagccgcatctgctacctgattttatcctggagaatacagtgcaatatttctctttgattatttattcctcttgattgtggaattaatttgattgcttgctaatggtactagtagtactcctttcagaagaaaaaatggagcgatttaggtgaccaaatattacatacataaatagccacatgaagttttagacgtttggacttgaagcctcaaagatcaaccaaccagtccccttatttagtaaataaggaaattgaggctacacacagaaaattgtgctacagattattactaataacccagcttgctaaattaggctatacctaggtaatctctagaagacaactctgacagactctttaatatttacccctggttggaacaatatttgaaatgtcccagatatttctatgctacttagatatttgtggcaaagcagaaagctttttgactgtgaaggcagaggtcagcactgggggaaacttgctggtggtctctcccacaaccttgcccagagtcctttccactaaggaggtgaagagaacagagaaagagatttccatttctgctgccagagctggtatttgcctgcctgattctctgtgtttcctgtttcaccgccaccctttcaggagagaactacaccagttcatcatgagggtcagggaagcaaaagctctcagatgtgtccagggcgttacttaagaaatgagtatgcagattctggaaggggtgtggaaaaggtgatcctttacccccacccaggaaaacctgcattgtgctagcatggaagaatcatgggctttggaattaaacccatttggtggaattaaacccatttggtttcaaatcccagttatgacatctgttaactttgcaaactcacaaaaattatttgaaattatctgagttttcattttctcaccttccagaatggggataatgcctcctgcatcggttgttgtgaggtttcaatgagatgaaatatgggaaagaagaggtactcacctgatggtccctgctttcctctgctaggcctgagtaggaactggaactctctaagagcattactcatactttttttttcttccaaggtagtttggaatgtgagtgcaagttagttctgcacatacagcccttctccaaatggtggtttcctttgaggtcttttacatgattatttatgactagagacaaacttaataagaactcaagaggattttaaatggagagaactcaagctgtagagaaaggaggaggcaacagacaggatatgtaggggcttacctagagcctggcacgacttctgagaagtcacccagcagaccggctagaggggatttgtgtgccacactctacttgccgggctgccattaaaatagaaagatataaaactgggtcaccaaaaaaaccaaacctcaaggctatccttccagagcagtagaaatgagtcccacagcctggtctttgagcagaggctgggaagataggatacatcactgtctggataccttctctttttaatagaatatattccgtatgattccctttccaccttaatggaaataatagctctctcctgcctgaacaaaagggattccaggtagtattgtggctaagagattacagcggacgatggaaggttcattttttagggaaggtgttgggtaggaagagtcacatttgacagaattcataaataatgtgtcctgaagtcagaggatgactgcaaagaaacacctcatgattccattaaatataaagagataaggagcaaggaggaaaaaagagaaagaattggtctttatttttcttgctaagaactctctggagtattgaaagacattgaaattatccctaaaattgtcacaacttttgtgaatactggtatacggttggaggtgtttttaaatctttatttcctctctttctttgttctagtgacttgtcttgctttaagattttttttaaaggattgttttattcaacatatatcaagttcttatggaatgccagtcatggtactagccccttgggatgtagtggttgagtgtgttcaatggaaacagccccagtatacaaagacagttcactctggtgtgctgtaggattggaaagggagtggtaccagatgaaaatgaaaccctaaagaagactgctgggccatgagttgcttcctcctcctccaccttaaccctctgattccagaattgcagtcattttcttctgccaaggaaatccattaaaaactgcagccacactgcaatttcctaatgtagaacaagatataaagcaggctttgagacaacaacctacctttgtttactctttccaagctggaagagtccttctcctctagttgcccctaggtcactggctaatttattttaaaatttagatggaactcatgtatagttaagtgcacaaatcttagccgtgcagatgggtaattttcacatagctatttgcccacatccgtgcctctaagatagagacatacactgttttcagcaccccagaaagttcccacatgcccatggtgccattttgtgaaaggtatttataaggcccttcaaatttgtggcttcctttctcatacttctcaggtataatgaaagggggagaaaaaccccaccatcaacacaaaacaaggctataaagactgtgcaccttttaacaagtcaatttgtagtcagtccctgggcctgtctttttttttttttaattttgaagctacctgaggtttagaattccttcagccctagctgcttttattctgctttttatttaaacaaaaagagggggaggatctgaaggaaactagttttctgtacaaaggctttgaggtccatggactatacttgtcccatttatcatcccaggtggtgctttgaccctgccataccctggctattaagataaaaagatttgtggacattaaaattatgaatatgtcagtaataatccagcacacattgaaatattgacacagattaccataatttgtgcaacatcttataaacaatgtcatttccatagtagtctaaggcttcaccagcctggcccactgtatctagactttaggttcattttaataattatgctttccttctctgtatcatttgggaagttgataaatatcacttccttagataccttcattcagtgatatatctggcttttacaattaaattggaaaaggtaagtttctctttggtgggttgagagttggaccatcaattctaatctacaaaaggaaattcatgatttcactctgacgcctaggatctagccaaggctggtctgcagtatcagatgtccaaactcatctactattagccatattttgtgagtcgtttgtctaaactttgtcaaaaatgcctttgccatgattttgttgctatctggatttcaaacatggacagttaggaagatgtgcattgaagtaggaaaattttgttcagatttgctgttatttattttttaaattaaaaatggaaatgtattttaaagttta

SEQ ID NO: 217480 - DNA, 5613 bp, Artificial Sequence
  derived and/or modified sequence
atggccagatggatccccaccaagagacagaagtacggcgtggccatctacaactacaacgccagccaggacgtggagctgagcctgcagatcggcgacaccgtgcacatcctggagatgtacgagggctggtacagaggctacaccctgcagaacaagagcaagaagggcatcttccccgagacctacatccacctgaaggaggccaccgtggaggacctgggccagcacgagaccgtgatccccggcgagctgcccctggtgcaggagctgaccagcaccctgagagagtgggccgtgatctggagaaagctgtacgtgaacaacaagctgaccctgttcagacagctgcagcagatgacctacagcctgatcgagtggagaagccagatcctgagcggcaccctgcccaaggacgagctggccgagctgaagaagaaggtgaccgccaagatcgaccacggcaacagaatgctgggcctggacctggtggtgagagacgacaacggcaacatcctggaccccgacgagaccagcaccatcgccctgttcaaggcccacgaggtggccagcaagagaatcgaggagaagatccaggaggagaagagcatcctgcagaacctggacctgagaggccagagcatcttcagcaccatccacacctacggcctgtacgtgaacttcaagaacttcgtgtgcaacatcggcgaggacgccgagctgttcatggccctgtacgaccccgaccagagcaccttcatcagcgagaactacctgatcagatggggcagcaacggcatgcccaaggagatcgagaagctgaacaacctgcaggccgtgttcaccgacctgagcagcatggacctgatcagacccagagtgagcctggtgtgccagatcgtgagagtgggccacatggagctgaaggagggcaagaagcacacctgcggcctgagaagacccttcggcgtggccgtgatggacatcaccgacatcatccacggcaaggtggacgacgaggagaagcagcacttcatccccttccagcagatcgccatggagacctacatcagacagagacagctgatcatgagccccctgatcaccagccacgtgatcggcgagaacgagcccctgaccagcgtgctgaacaaggtgatcgccgccaaggaggtgaaccacaagggccagggcctgtgggtgagcctgaagctgctgcccggcgacctgacccaggtgcagaagaacttcagccacctggtggacagaagcaccgccatcgccagaaagatgggcttccccgagatcatcctgcccggcgacgtgagaaacgacatctacgtgaccctgatccacggcgagttcgacaagggcaagaagaagacccccaagaacgtggaggtgaccatgagcgtgcacgacgaggagggcaagctgctggagaaggccatccaccccggcgccggctacgagggcatcagcgagtacaagagcgtggtgtactaccaggtgaagcagccctgctggtacgagaccgtgaaggtgagcatcgccatcgaggaggtgaccagatgccacatcagattcaccttcagacacagaagcagccaggagaccagagacaagagcgagagagccttcggcgtggccttcgtgaagctgatgaaccccgacggcaccaccctgcaggacggcagacacgacctggtggtgtacaagggcgacaacaagaagatggaggacgccaagttctacctgaccctgcccggcaccaagatggagatggaggagaaggagctgcaggccagcaagaacctggtgaccttcacccccagcaaggacagcaccaaggacagcttccagatcgccaccctgatctgcagcaccaagctgacccagaacgtggacctgctgggcctgctgaactggagaagcaacagccagaacatcaagcacaacctgaagaagctgatggaggtggacggcggcgagatcgtgaagttcctgcaggacaccctggacgccctgttcaacatcatgatggagatgagcgacagcgagacctacgacttcctggtgttcgacgccctggtgttcatcatcagcctgatcggcgacatcaagttccagcacttcaaccccgtgctggagacctacatctacaagcacttcagcgccaccctggcctacgtgaagctgagcaaggtgctgaacttctacgtggccaacgccgacgacagcagcaagaccgagctgctgttcgccgccctgaaggccctgaagtacctgttcagattcatcatccagagcagagtgctgtacctgagattctacggccagagcaaggacggcgacgagttcaacaacagcatcagacagctgttcctggccttcaacatgctgatggacagacccctggaggaggccgtgaagatcaagggcgccgccctgaagtacctgcccagcatcatcaacgacgtgaagctggtgttcgaccccgtggagctgagcgtgctgttctgcaagttcatccagagcatccccgacaaccagctggtgagacagaagctgaactgcatgaccaagatcgtggagagcaccctgttcagacagagcgagtgcagagaggtgctgctgcccctgctgaccgaccagctgagcggccagctggacgacaacagcaacaagcccgaccacgaggccagcagccagctgctgagcaacatcctggaggtgctggacagaaaggacgtgggcgccaccgccgtgcacatccagctgatcatggagagactgctgagaagaatcaacagaaccgtgatcggcatgaacagacagagcccccacatcggcagcttcgtggcctgcatgatcgccctgctgcagcagatggacgacagccactacagccactacatcagcaccttcaagaccagacaggacatcatcgacttcctgatggagaccttcatcatgttcaaggacctgatcggcaagaacgtgtacgccaaggactggatggtgatgaacatgacccagaacagagtgttcctgagagccatcaaccagttcgccgaggtgctgaccagattcttcatggaccaggccagcttcgagctgcagctgtggaacaactacttccacctggccgtggccttcctgacccacgagagcctgcagctggagaccttcagccaggccaagagaaacaagatcgtgaagaagtacggcgacatgagaaaggagatcggcttcagaatcagagacatgtggtacaacctgggcccccacaagatcaagttcatccccagcatggtgggccccatcctggaggtgaccctgacccccgaggtggagctgagaaaggccaccatccccatcttcttcgacatgatgcagtgcgagttcaacttcagcggcaacggcaacttccacatgttcgagaacgagctgatcaccaagctggaccaggaggtggagggcggcagaggcgacgagcagtacaaggtgctgctggagaagctgctgctggagcactgcagaaagcacaagtacctgagcagcagcggcgaggtgttcgccctgctggtgagcagcctgctggagaacctgctggactacagaaccatcatcatgcaggacgagagcaaggagaacagaatgagctgcaccgtgaacgtgctgaacttctacaaggagaagaagagagaggacatctacatcagatacctgtacaagctgagagacctgcacagagactgcgagaactacaccgaggccgcctacaccctgctgctgcacgccgagctgctgcagtggagcgacaagccctgcgtgccccacctgctgcagaaggacagctactacgtgtacacccagcaggagctgaaggagaagctgtaccaggagatcatcagctacttcgacaagggcaagatgtgggagaaggccatcaagctgagcaaggagctggccgagacctacgagagcaaggtgttcgactacgagggcctgggcaacctgctgaagaagagagccagcttctacgagaacatcatcaaggccatgagaccccagcccgagtacttcgccgtgggctactacggccagggcttccccagcttcctgagaaacaagatcttcatctacagaggcaaggagtacgagagaagagaggacttcagcctgagactgctgacccagttccccaacgccgagaagatgaccagcaccaccccccccggcgaggacatcaagagcagccccaagcagtacatgcagtgcttcaccgtgaagcccgtgatgagcctgccccccagctacaaggacaagcccgtgcccgagcagatcctgaactactacagagccaacgaggtgcagcagttcagatacagcagacccttcagaaagggcgagaaggaccccgacaacgagttcgccaccatgtggatcgagagaaccacctacaccaccgcctacaccttccccggcatcctgaagtggttcgaggtgaagcagatcagcaccgaggagatcagccccctggagaacgccatcgagaccatggagctgaccaacgagagaatcagcaactgcgtgcagcagcacgcctgggacagaagcctgagcgtgcaccccctgagcatgctgctgagcggcatcgtggaccccgccgtgatgggcggcttcagcaactacgagaaggccttcttcaccgagaagtacctgcaggagcaccccgaggaccaggagaaggtggagctgctgaagagactgatcgccctgcagatgcccctgctgaccgagggcatcagaatccacggcgagaagctgaccgagcagctgaagcccctgcacgagagactgagcagctgcttcagagagctgaaggagaaggtggagaagcactacggcgtgatcaccctgccccccaacctgaccgagagaaagcagagcagaaccggcagcatcgtgctgccctacatcatgagcagcaccctgagaagactgagcatcaccagcgtgaccagcagcgtggtgagcaccagcagcaacagcagcgacaacgcccccagcagacccggcagcgacggcagcatcctggagcccctgctggagagaagagccagcagcggcgccagagtggaggacctgagcctgagagaggagaacagcgagaacagaatcagcaagttcaagagaaaggactggagcctgagcaagagccaggtgatcgccgagaaggcccccgagcccgacctgatgagccccaccagaaaggcccagagacccaagagcctgcagctgatggacaacagactgagccccttccacggcagcagccccccccagagcacccccctgagccccccccccctgacccccaaggccaccagaaccctgagcagccccagcctgcagaccgacggcatcgccgccacccccgtgccccccccccccccccccaagagcaagccctacgagggcagccagagaaacagcaccgagctggccccccccctgcccgtgagaagagaggccaaggccccccccccccccccccccaaggccagaaagagcggcatccccaccagcgagcccggcagccagtag

SEQ ID NO: 217481 - protein, 445 aa, Artificial Sequence
  derived and/or modified sequence
METRTEDGGLTRRPTLASSWDVAGGALTHSLLLTRAGLGPGDFDWEELLAPPAPGQDLVILKRNHNNKDENPCFLYLRCGPDGGEEIASIGILSSARNMEVYLGEEYCGTSRGKNVCTVLDDSEHEKIILYKKNLKLESSTHACKIKLLSFGERQCVFISKVVVHMRSVFANSSTSSPALGSRIDLDKVQTIMESMGSKLSPGAQQLMDMVRCQQRNCIPIGEQLQSVLGNSGYKHMIGLQSSSTLGTLNKSSSTPFPFRTGLTSGNVTENLQTYIDKSTQLPGGENSTKLDECKVMPQNHSFLENDLKNAMASFLPKKVSDNSNIPNSELLPFLQNLCSQVNHLHVGNKTECQENITKHGERILGVGMEEQSICSYLEKILSKNMELMEKKLMDYIDQRIHELQEHIDDKIALLLDLLQNPNSPPTGIPLRHYDSGERLSNGER

SEQ ID NO: 217482 - DNA, 2482 bp, Artificial Sequence
  derived and/or modified sequence
cgacctcctccccgcacactttgaacgccgcgcctgaggccagctggcacatgcgcatgcgtgtctctggtgcctgctctccccaccaaagcaagaagcggcgggtacttgaagcggagtgagccggaagtcgctttgcctgcccatttccacgctgtaccggcggaaattcaagcactggaagagaggttccggggctgggctggcctgactgaaggcggcggaatggagacgcggaccgaggacgggggcctcacccgccgccccacgctggcctcttcttgggatgttgcaggcggggccctgacccacagcctcctcctcacccgggccggtctcggccccggtgacttcgactgggaggagctgctggcaccgcctgctccaggtcaggatctggtgattttgaagagaaaccacaacaacaaagatgaaaacccctgcttcctttacctgaggtgtggccctgatggaggtgaagaaatcgcttctattggcattttaagttcagcaagaaatatggaagtgtacttaggagaggagtactgtggaaccagtaggggcaagaatgtttgtactgtcctggatgacagtgaacatgaaaagatcattttgtataaaaaaaatctaaaattggagtcctccacacatgcttgtaaaataaagttgctctcctttggcgaaaggcagtgtgtgttcatcagtaaagttgtggtacacatgagatcagtttttgcaaattcttcaacaagctctcctgctctaggatcaaggatagaccttgacaaggtccaaaccataatggagtccatggggtcaaagttatctcctggagctcagcagttgatggatatggttaggtgtcagcagcggaattgtattcccattggagagcagcttcagtcggtgttgggcaattctggatacaagcatatgattggactacaatcctcatctaccttaggaaccttaaacaagtcgtcctccacaccttttccttttagaactggattgacatctgggaacgtgactgaaaacttacaaacttacattgataaaagtacacaactgcctggtggagagaattctaccaagcttgatgagtgtaaagttatgcctcaaaaccattcctttcttgaaaatgatcttaaaaatgcaatggcctctttcttaccaaagaaagtaagtgacaactcaaatatacccaactccgagttgctgccttttctccagaatttatgtagtcaagttaatcatctccatgtgggaaataagaccgagtgtcaggaaaacatcaccaagcatggtgaacgcattcttggtgttggaatggaagagcaatctatttgctcctacttggaaaagattctttctaaaaatatggaactgatggaaaagaaacttatggattacattgatcagcgaatacatgaactccaggagcacattgatgataagattgctttgttactggatttgctgcaaaatcctaactccccgcccactgggatacctctaagacattatgactctggagaaagactttcaaatggagaaagataagctctcaacataaacagtgtactgcagatatttattacatatttattacaaagccaaaacccaaaaatatttataaaaagcaagtatttaatgtcctttgagggatcattgtcttacacaaagtgacctcagttttcgtttttactacacttgttattttaaatccagtactgtacactgagttaatatgatacagtcaaattatttttgctcacgatatttttcagtcttacagaaatgtatgtatatttgtgttaagagtttaaaatgcttgaggatttctaatacagttcattagtttgtattgtatatgtgtttaagtataatttttatttatacaaagatcttatagtcttagaagtatgaaaaataatgcttaagagtatttgatttttttctttttctaattatcttggaaaattggatacttaagacttggagcctttacttcagattaccagtttacattttgtattgcttgtgtgagataatgaataagatgtgatatttggcatgtgtaaacttagttcactctggggttgttaatattatttgtttcattacagagtagctgtaggtaggaaagtaaacatcagaactagcctagtccttgttacgattagtactttggatttgatttttcctgtaaaacagatgcagtcatcttgtttgacctcagtaaccccagacagtttaagaaaacctctccttttgagctgatacaggttttttccccagaatccttttctggcatgtttattgtatgaaataatgaggctctccatggaaggatgaacacatatgagtcaagggattgcaattctctctgatagacttagttttcagaccttataactattgtatatgcattgaagggtgatatatttgcatataaaaataaatgcacctgctctgggaa

SEQ ID NO: 217483 - DNA, 1338 bp, Artificial Sequence
  derived and/or modified sequence
atggagaccagaaccgaggacggcggcctgaccagaagacccaccctggccagcagctgggacgtggccggcggcgccctgacccacagcctgctgctgaccagagccggcctgggccccggcgacttcgactgggaggagctgctggccccccccgcccccggccaggacctggtgatcctgaagagaaaccacaacaacaaggacgagaacccctgcttcctgtacctgagatgcggccccgacggcggcgaggagatcgccagcatcggcatcctgagcagcgccagaaacatggaggtgtacctgggcgaggagtactgcggcaccagcagaggcaagaacgtgtgcaccgtgctggacgacagcgagcacgagaagatcatcctgtacaagaagaacctgaagctggagagcagcacccacgcctgcaagatcaagctgctgagcttcggcgagagacagtgcgtgttcatcagcaaggtggtggtgcacatgagaagcgtgttcgccaacagcagcaccagcagccccgccctgggcagcagaatcgacctggacaaggtgcagaccatcatggagagcatgggcagcaagctgagccccggcgcccagcagctgatggacatggtgagatgccagcagagaaactgcatccccatcggcgagcagctgcagagcgtgctgggcaacagcggctacaagcacatgatcggcctgcagagcagcagcaccctgggcaccctgaacaagagcagcagcacccccttccccttcagaaccggcctgaccagcggcaacgtgaccgagaacctgcagacctacatcgacaagagcacccagctgcccggcggcgagaacagcaccaagctggacgagtgcaaggtgatgccccagaaccacagcttcctggagaacgacctgaagaacgccatggccagcttcctgcccaagaaggtgagcgacaacagcaacatccccaacagcgagctgctgcccttcctgcagaacctgtgcagccaggtgaaccacctgcacgtgggcaacaagaccgagtgccaggagaacatcaccaagcacggcgagagaatcctgggcgtgggcatggaggagcagagcatctgcagctacctggagaagatcctgagcaagaacatggagctgatggagaagaagctgatggactacatcgaccagagaatccacgagctgcaggagcacatcgacgacaagatcgccctgctgctggacctgctgcagaaccccaacagcccccccaccggcatccccctgagacactacgacagcggcgagagactgagcaacggcgagagatag

SEQ ID NO: 217484 - DNA, 1338 bp, Artificial Sequence
  derived and/or modified sequence
atggaaactcgtactgaggacgggggactgacgaggcggcctactttggctagttcctgggatgttgctggaggcgcccttacccactccctgctgttaacgcgcgcaggcttagggcccggcgactttgactgggaggagttattggctcctccggcccccggacaggacctcgtcatcctgaagcgcaatcacaataataaagatgagaacccttgcttcctttacctccggtgtgggccggacggtggcgaggagatagcatcaatcggcatcctcagtagtgcccggaatatggaggtgtatctgggcgaggaatactgcgggaccagcaggggaaagaatgtctgcaccgttttagatgatagtgaacacgaaaagatcattttgtacaagaaaaatctgaagcttgagtccagtactcacgcgtgcaaaatcaagcttctgtcattcggggaacgacagtgcgtgttcatctctaaggtggtggtccatatgaggagcgtgttcgccaattcttcgacatcttcccccgcgcttggttcacgcatcgacctggacaaagtacagacaatcatggagtcaatgggcagcaagctgtctcccggagctcagcagctcatggacatggtgcgatgccagcagagaaattgcattccgataggggaacagctccagtccgtgctcggtaatagtggatataagcacatgatagggctgcagtcaagtagcacacttgggacactgaacaaaagctctagtactccttttccattccggacaggactcacctctggaaatgtgacagagaacttgcaaacatacattgacaagtccacccagttgccgggtggggaaaacagcacaaagctggacgaatgtaaggtgatgccccagaatcatagtttcttggagaatgacctcaaaaatgcaatggcttctttcctgccgaaaaaggtctccgacaactctaacattccgaattctgaactcctccctttcttacagaacttatgttctcaggttaatcaccttcatgtgggcaataagactgaatgtcaggagaatataaccaagcatggggagaggatcctgggggtaggaatggaagagcagtcaatttgctcttatcttgaaaagatactgtccaaaaatatggagttgatggagaagaagctgatggattatattgaccagagaatccatgaattgcaggagcatatagatgacaagatcgcactgcttctggacttattgcaaaacccaaattctcccccgaccggaatcccactgagacactacgattcgggagaacgcttgagtaacggagaaaggtag

SEQ ID NO: 217485 - DNA, 1338 bp, Artificial Sequence
  derived and/or modified sequence
atggagaccaggacagaagatggcggcctgacccggcggcccaccctggccagctcctgggatgtggccggcggggccctgacccacagcctgctgctgacccgggccggcctgggccctggggactttgactgggaggagctgctggcccccccagcccctggccaggacctggtgatcctgaagaggaaccacaacaacaaggatgagaacccctgcttcctgtacctgcgctgtggcccagatggaggagaggagatcgccagcatcggcatcctgagcagcgccaggaacatggaggtgtacctgggggaggagtactgcggcaccagccggggcaagaatgtgtgcaccgtgctggatgattctgaacatgagaagatcatcctgtacaagaagaacctgaagctggagagcagcacccacgcctgcaagatcaagctgctgagctttggagagcggcagtgtgtgttcatcagcaaggtggtggtgcacatgaggtctgtgtttgccaacagcagcaccagcagccctgccctgggcagcagaattgacctggacaaggtgcagaccatcatggagagcatgggcagcaagctgagccctggggcccagcagctgatggacatggtgcgctgccagcagaggaactgcatccccatcggggagcagctgcagagcgtgctgggcaacagcggctacaagcacatgattggcctgcagagcagcagcaccctgggcaccctgaacaagagcagcagcacccccttccccttcagaacaggcctgaccagcggaaatgtgacagagaacctgcagacctacatcgacaagagcacccagctgcctggaggagagaacagcaccaagctggatgagtgcaaggtgatgccccagaaccacagcttcctggagaatgacctgaagaatgccatggccagcttcctgcccaagaaggtgtctgacaacagcaacatccccaacagcgagctgctgcccttcctgcagaacctgtgcagccaggtgaaccacctgcacgtgggcaacaagacagagtgccaggagaacatcaccaagcacggggagcgcatcctgggcgtgggcatggaggagcagagcatctgcagctacctggagaagatcctgagcaagaacatggagctgatggagaagaagctgatggactacatcgaccagaggatccacgagctgcaggagcacattgatgacaagatcgccctgctgctggacctgctgcagaaccccaacagccccccaacaggcatccccctgcggcactatgacagcggggagcggctgagcaatggagagaggtag

SEQ ID NO: 217486 - DNA, 1338 bp, Artificial Sequence
  derived and/or modified sequence
atggagacccggaccgaggacggcggcctgacccggcggcccaccctggcttcatcatgggatgtggccggcggggccttgacacacagcctgctgcttacccgcgccggcctggggccgggcgattttgattgggaggaacttcttgctccgccagccccaggccaagacttggtaatccttaaacggaaccacaacaacaaggatgaaaatccttgcttcctttatctacgctgtggccccgacgggggcgaagagattgcctcgatcgggattctctcaagtgccaggaatatggaggtctatctgggggaagagtattgtggcaccagtcgaggtaagaatgtctgcacagtcctggacgacagtgaacatgagaaaatcattctgtacaagaagaaccttaagcttgagtcttctacacatgcatgtaagattaaactattgagctttggcgaacgccagtgtgtatttatatccaaggtcgtcgtccatatgagatccgtgtttgctaacagctccacctcctctccggcgttggggagtagaatcgacctggataaggtgcagacaatcatggagagtatgggctctaagttgagcccaggagcccagcagttgatggacatggtgcgttgccaacagcggaactgtatcccaatcggagagcagttgcagtccgtgctggggaatagcgggtacaaacacatgattggacttcagtcatcgagcaccctcggaaccctgaataaaagctcttctacacccttccctttccgcaccggactgacgtcgggaaacgtgaccgagaatctgcagacctacatcgacaagtccactcagcttccaggaggcgagaattccaccaagctggatgaatgcaaggtgatgcctcagaaccatagttttttggagaacgacctgaaaaatgcaatggcgtcttttctcccaaaaaaggtaagcgacaacagtaatatccccaatagtgagcttctgccttttcttcaaaatctgtgctcccaggtgaaccacttacacgtgggaaacaagactgagtgccaagaaaacataaccaaacacggggagaggatacttggtgttggcatggaggaacagagtatctgcagctatctcgagaagattctgtctaaaaacatggaactgatggaaaagaagttaatggactatattgaccagaggattcatgagctacaggagcatatcgatgacaaaattgcgctgttgttggacctcctgcagaatcctaactctccgccaaccggaatcccactgcgccattatgactctggcgagcggctgtctaatggcgagaggtag

SEQ ID NO: 217487 - DNA, 1338 bp, Artificial Sequence
  derived and/or modified sequence
atggaaacccggacggaggacggcggactgactaggcgcccaaccttagcaagtagctgggacgttgccggaggagctctcacacattcactgcttttgacccgggctggcttgggtcccggagattttgactgggaagaactgttggctccacccgctccgggtcaagatctggtgatcctgaagcggaatcacaacaacaaggacgaaaacccttgtttcctctacttacggtgtggaccagatgggggagaggaaatcgccagcattggcatcctgtcatccgccagaaacatggaagtgtatcttggggaggagtattgtggcacctctagaggaaaaaacgtgtgcacagtgctcgacgatagcgaacacgagaaaattatcctctataagaagaacctgaagttagagagttccacacacgcatgtaaaattaagctgctgtcctttggagaaagacagtgtgtgtttattagcaaggtcgttgtgcacatgcgcagcgtgttcgcaaactcctccacctccagcccagctctaggctctcgcatcgatctggataaggtccaaactatcatggagagtatggggagcaaactgtcccccggagctcagcagctaatggacatggtgcgctgtcagcagaggaattgtataccaataggagagcagctacagtcggtgctggggaactcgggctataagcatatgattggcctacagtcatcaagtaccttagggactctgaacaagagctcttctactccgtttccatttcgaaccggcctgaccagcggaaatgtgaccgagaatctgcagacctacatcgataagtctacgcagttgccaggtggagaaaatagtactaaactggacgagtgtaaagtgatgccccagaaccacagcttcctcgagaatgacttaaagaatgcaatggcctctttcttaccaaagaaagtgagcgataactcgaacattcctaattctgagttacttcccttcctgcagaatctatgcagtcaggtaaatcatctccatgtgggaaacaaaaccgaatgccaagaaaacatcactaagcacggggagaggattttaggagttgggatggaggagcagtctatatgtagttacctcgagaagatcctgagtaagaacatggagctcatggaaaagaaactcatggattacattgaccagaggattcacgaactccaggaacatatcgatgacaaaattgccctccttcttgatctcttacaaaaccctaacagccctccgacgggcatcccacttaggcattacgactcaggagaacggctgagtaacggcgaacggtag

SEQ ID NO: 217488 - protein, 273 aa, Artificial Sequence
  derived and/or modified sequence
MSRVVSLLLGAALLCGHGAFCRRVVSGQKVCFADFKHPCYKMAYFHELSSRVSFQEARLACESEGGVLLSLENEAEQKLIESMLQNLTKPGTGISDGDFWIGLWRNGDGQTSGACPDLYQWSDGSNSQYRNWYTDEPSCGSEKCVVMYHQPTANPGLGGPYLYQWNDDRCNMKHNYICKYEPEINPTAPVEKPYLTNQPGDTHQNVVVTEAGIIPNLIYVVIPTIPLLLLILVAFGTCCFQMLHKSKGRTKTSPNQSTLWISKSTRKESGMEV

SEQ ID NO: 217489 - protein, 232 aa, Artificial Sequence
  derived and/or modified sequence
MAYFHELSSRVSFQEARLACESEGGVLLSLENEAEQKLIESMLQNLTKPGTGISDGDFWIGLWRNGDGQTSGACPDLYQWSDGSNSQYRNWYTDEPSCGSEKCVVMYHQPTANPGLGGPYLYQWNDDRCNMKHNYICKYEPEINPTAPVEKPYLTNQPGDTHQNVVVTEAGIIPNLIYVVIPTIPLLLLILVAFGTCCFQMLHKSKGRTKTSPNQSTLWISKSTRKESGMEV

SEQ ID NO: 217490 - DNA, 2548 bp, Artificial Sequence
  derived and/or modified sequence
gctgctgctgtgatccaggaccagggcgcaccggctcagcctctcacttgtcagaggccggggaagagaagcaaagcgcaacggtgtggtccaagccggggcttctgcttcgcctctaggacatacacgggaccccctaacttcagtcccccaaacgcgcaccctcgaagtcttgaactccagccccgcacatccacgcgcggcacaggcgcggcaggcggcaggtcccggccgaaggcgatgcgcgcagggggtcgggcagctgggctcgggcggcgggagtagggcccggcagggaggcagggaggctgcagagtcagagtcgcgggctgcgccctgggcagaggccgccctcgctccacgcaacacctgctgctgccaccgcgccgcgatgagccgcgtggtctcgctgctgctgggcgccgcgctgctctgcggccacggagccttctgccgccgcgtggtcagcggccaaaaggtgtgttttgctgacttcaagcatccctgctacaaaatggcctacttccatgaactgtccagccgagtgagctttcaggaggcacgcctggcttgtgagagtgagggaggagtcctcctcagccttgagaatgaagcagaacagaagttaatagagagcatgttgcaaaacctgacaaaacccgggacagggatttctgatggtgatttctggatagggctttggaggaatggagatgggcaaacatctggtgcctgcccagatctctaccagtggtctgatggaagcaattcccagtaccgaaactggtacacagatgaaccttcctgcggaagtgaaaagtgtgttgtgatgtatcaccaaccaactgccaatcctggccttgggggtccctacctttaccagtggaatgatgacaggtgtaacatgaagcacaattatatttgcaagtatgaaccagagattaatccaacagcccctgtagaaaagccttatcttacaaatcaaccaggagacacccatcagaatgtggttgttactgaagcaggtataattcccaatctaatttatgttgttataccaacaatacccctgctcttactgatactggttgcttttggaacctgttgtttccagatgctgcataaaagtaaaggaagaacaaaaactagtccaaaccagtctacactgtggatttcaaagagtaccagaaaagaaagtggcatggaagtataataactcattgacttggttccagaattttgtaattctggatctgtataaggaatggcatcagaacaatagcttggaatggcttgaaatcacaaaggatctgcaagatgaactgtaagctcccccttgaggcaaatattaaagtaatttttatatgtctattatttcatttaaagaatatgctgtgctaataatggagtgagacatgcttattttgctaaaggatgcacccaaacttcaaacttcaagcaaatgaaatggacaatgcagataaagttgttatcaacacgtcgggagtatgtgtgttagaagcaattccttttatttctttcacctttcataagttgttatctagtcaatgtaatgtatattgtattgaaatttacagtgtgcaaaagtattttacctttgcataagtgtttgataaaaatgaactgttctaatatttatttttatggcatctcatttttcaatacatgctcttttgattaaagaaacttattactgttgtcaactgaattcacacacacacaaatatagtaccatagaaaaagtttgttttctcgaaataattcatctttcagcttctctgcttttggtcaatgtctaggaaatctcttcagaaataagaagctatttcattaagtgtgatataaacctcctcaaacattttacttagaggcaaggattgtctaatttcaattgtgcaagacatgtgccttataattatttttagcttaaaattaaacagattttgtaataatgtaactttgttaataggtgcataaacactaatgcagtcaatttgaacaaaagaagtgacatacacaatataaatcatatgtcttcacacgttgcctatataatgagaagcagctctctgagggttctgaaatcaatgtggtccctctcttgcccactaaacaaagatggttgttcggggtttgggattgacactggaggcagatagttgcaaagttagtctaaggtttccctagctgtatttagcctctgactatattagtatacaaagaggtcatgtggttgagaccaggtgaatagtcactatcagtgtggagacaagcacagcacacagacattttaggaaggaaaggaactacgaaatcgtgtgaaaatgggttggaacccatcagtgatcgcatattcattgatgagggtttgcttgagatagaaaatggtggctcctttctgtcttatctcctagtttcttcaatgcttacgccttgttcttctcaagagaaagttgtaactctctggtcttcatatgtccctgtgctccttttaaccaaataaagagttcttgtttctgaagaatga

SEQ ID NO: 217491 - DNA, 2421 bp, Artificial Sequence
  derived and/or modified sequence
ctgtggtgtttttcccccgctcctctggctgccttcctgatggatctctgtggtcccaggcaggaatggcctgcttggggacccagcgagctcccaaggcctttcctgctgcttcctctatccctgtgttttgcttggctctctaaattgactcagctccaggacatcaggaccccaggttctctggtcttgggactctgagacttgcaccaggaatcctgcccaggctctcaggcctttggactcagactgagctacttcactggctttcctggttctccagcttgaagatggcagatcgtgggacttctcagcctccataattgagtgagccaattccctggccaaaaggtgtgttttgctgacttcaagcatccctgctacaaaatggcctacttccatgaactgtccagccgagtgagctttcaggaggcacgcctggcttgtgagagtgagggaggagtcctcctcagccttgagaatgaagcagaacagaagttaatagagagcatgttgcaaaacctgacaaaacccgggacagggatttctgatggtgatttctggatagggctttggaggaatggagatgggcaaacatctggtgcctgcccagatctctaccagtggtctgatggaagcaattcccagtaccgaaactggtacacagatgaaccttcctgcggaagtgaaaagtgtgttgtgatgtatcaccaaccaactgccaatcctggccttgggggtccctacctttaccagtggaatgatgacaggtgtaacatgaagcacaattatatttgcaagtatgaaccagagattaatccaacagcccctgtagaaaagccttatcttacaaatcaaccaggagacacccatcagaatgtggttgttactgaagcaggtataattcccaatctaatttatgttgttataccaacaatacccctgctcttactgatactggttgcttttggaacctgttgtttccagatgctgcataaaagtaaaggaagaacaaaaactagtccaaaccagtctacactgtggatttcaaagagtaccagaaaagaaagtggcatggaagtataataactcattgacttggttccagaattttgtaattctggatctgtataaggaatggcatcagaacaatagcttggaatggcttgaaatcacaaaggatctgcaagatgaactgtaagctcccccttgaggcaaatattaaagtaatttttatatgtctattatttcatttaaagaatatgctgtgctaataatggagtgagacatgcttattttgctaaaggatgcacccaaacttcaaacttcaagcaaatgaaatggacaatgcagataaagttgttatcaacacgtcgggagtatgtgtgttagaagcaattccttttatttctttcacctttcataagttgttatctagtcaatgtaatgtatattgtattgaaatttacagtgtgcaaaagtattttacctttgcataagtgtttgataaaaatgaactgttctaatatttatttttatggcatctcatttttcaatacatgctcttttgattaaagaaacttattactgttgtcaactgaattcacacacacacaaatatagtaccatagaaaaagtttgttttctcgaaataattcatctttcagcttctctgcttttggtcaatgtctaggaaatctcttcagaaataagaagctatttcattaagtgtgatataaacctcctcaaacattttacttagaggcaaggattgtctaatttcaattgtgcaagacatgtgccttataattatttttagcttaaaattaaacagattttgtaataatgtaactttgttaataggtgcataaacactaatgcagtcaatttgaacaaaagaagtgacatacacaatataaatcatatgtcttcacacgttgcctatataatgagaagcagctctctgagggttctgaaatcaatgtggtccctctcttgcccactaaacaaagatggttgttcggggtttgggattgacactggaggcagatagttgcaaagttagtctaaggtttccctagctgtatttagcctctgactatattagtatacaaagaggtcatgtggttgagaccaggtgaatagtcactatcagtgtggagacaagcacagcacacagacattttaggaaggaaaggaactacgaaatcgtgtgaaaatgggttggaacccatcagtgatcgcatattcattgatgagggtttgcttgagatagaaaatggtggctcctttctgtcttatctcctagtttcttcaatgcttacgccttgttcttctcaagagaaagttgtaactctctggtcttcatatgtccctgtgctccttttaaccaaataaagagttcttgtttctgaagaatga

SEQ ID NO: 217492 - DNA, 822 bp, Artificial Sequence
  derived and/or modified sequence
atgagcagagtggtgagcctgctgctgggcgccgccctgctgtgcggccacggcgccttctgcagaagagtggtgagcggccagaaggtgtgcttcgccgacttcaagcacccctgctacaagatggcctacttccacgagctgagcagcagagtgagcttccaggaggccagactggcctgcgagagcgagggcggcgtgctgctgagcctggagaacgaggccgagcagaagctgatcgagagcatgctgcagaacctgaccaagcccggcaccggcatcagcgacggcgacttctggatcggcctgtggagaaacggcgacggccagaccagcggcgcctgccccgacctgtaccagtggagcgacggcagcaacagccagtacagaaactggtacaccgacgagcccagctgcggcagcgagaagtgcgtggtgatgtaccaccagcccaccgccaaccccggcctgggcggcccctacctgtaccagtggaacgacgacagatgcaacatgaagcacaactacatctgcaagtacgagcccgagatcaaccccaccgcccccgtggagaagccctacctgaccaaccagcccggcgacacccaccagaacgtggtggtgaccgaggccggcatcatccccaacctgatctacgtggtgatccccaccatccccctgctgctgctgatcctggtggccttcggcacctgctgcttccagatgctgcacaagagcaagggcagaaccaagaccagccccaaccagagcaccctgtggatcagcaagagcaccagaaaggagagcggcatggaggtgtag

SEQ ID NO: 217493 - DNA, 822 bp, Artificial Sequence
  derived and/or modified sequence
atgtctcgagtggtgtccctgcttttaggcgccgccctgctctgtggccacggagccttttgtcggcgggtggtttctggtcagaaagtctgcttcgcagacttcaaacacccttgctacaaaatggcatatttccatgaactgtccagtcgagtctctttccaggaggcaaggctcgcttgcgagagcgagggcggagttctgctctcactggaaaacgaggccgaacagaagctgattgagtctatgctacagaacctcactaagcctggaactggtatctccgatggcgacttctggattggactctggcggaacggcgatggccaaacaagcggagcctgtcccgacctctaccagtggtcagatggcagtaatagtcagtaccggaactggtacaccgatgagccatcctgtggcagtgagaaatgcgtggtcatgtaccaccagccaaccgccaaccccgggctgggtggaccatatctgtatcagtggaacgatgatcgctgcaatatgaagcataactatatctgcaagtacgaacctgaaatcaatcccaccgctcctgtggagaaaccttatttgacaaatcagcctggggatacccatcagaatgtagtggtgaccgaggccggcattattcccaacttaatttacgttgtgataccaaccattcctctgctgttactgatacttgtcgctttcggcacctgctgcttccaaatgctgcacaagtcaaaagggcgaacaaagaccagtccgaatcagtcaacactctggatctccaagtcgactcgcaaggaatctggcatggaggtgtag

SEQ ID NO: 217494 - DNA, 822 bp, Artificial Sequence
  derived and/or modified sequence
atgagccgggtggtgtccctgctgctgggcgccgccctgctgtgtggccatggagccttctgccggcgggtggtgtctggccagaaggtgtgctttgctgacttcaagcacccctgctacaagatggcctacttccacgagctgagcagccgggtgtccttccaggaggcccggctggcctgtgagagcgagggcggcgtgctgctgagcctggagaatgaagctgagcagaagctgattgagagcatgctgcagaacctgaccaagccaggcaccggcatcagtgatggagacttctggattggcctgtggagaaatggagatggccagaccagcggggcctgcccagacctgtaccagtggagcgatggcagcaacagccagtacagaaactggtacacagatgagcccagctgtggcagcgagaagtgtgtggtgatgtaccaccagcccacagccaaccctggcctgggcggcccctacctgtaccagtggaatgatgaccgctgcaacatgaagcacaactacatctgcaagtatgagcctgagatcaaccccacagcccctgtggagaagccctacctgaccaaccagcccggggacacccaccagaatgtggtggtgacagaagctggcatcatccccaacctgatctacgtggtgatccccaccatccccctgctgctgctgatcctggtggccttcggcacctgctgcttccagatgctgcacaagagcaaaggaagaaccaagaccagccccaaccagagcaccctgtggatcagcaagagcaccaggaaggagagcggcatggaggtgtag

SEQ ID NO: 217495 - DNA, 822 bp, Artificial Sequence
  derived and/or modified sequence
atgagccgggtggtgagcctgctgctgggcgccgccctgctgtgcggacatggagccttttgtcgccgggtggtgagtggacagaaagtgtgctttgccgatttcaaacacccttgctacaagatggcctatttccacgagctctcttccagagtctcctttcaagaagcaagactagcatgcgaaagcgaaggtggcgtcctgttgtccctggagaatgaagctgagcagaaactgatagagtcaatgttgcagaatctgactaagccagggaccggaatcagcgacggggatttctggatcggcctgtggagaaacggcgatggtcagacaagtggcgcgtgccctgacctttaccagtggtctgacggaagcaattctcaataccgcaactggtacactgacgagccgagctgcggcagtgagaaatgtgtggtgatgtaccatcagcccaccgccaaccccgggctgggcggtccctatctataccagtggaacgacgaccggtgtaacatgaagcacaactacatctgtaaatacgagcccgagattaatcccaccgctcccgttgagaaaccctatctgacaaatcaaccaggtgatacacaccagaacgtggtggtcactgaagcagggataattccgaatcttatctacgtggtcatccctactattccactcctcctactgatcctggtcgcatttggaacctgttgcttccaaatgctgcacaagtccaagggacggactaaaacctcacctaatcagagtaccctgtggatctcaaagtcgacaagaaaggagagcgggatggaagtatag

SEQ ID NO: 217496 - DNA, 822 bp, Artificial Sequence
  derived and/or modified sequence
atgtccagagtcgtgagtctgctcctgggggctgcccttctctgtggccacggagctttctgcagacgcgtcgtatctggccaaaaggtttgtttcgcagactttaaacacccctgctacaaaatggcttattttcacgagttatccagtcgggtatcctttcaggaggctcgcctggcgtgcgaatctgagggaggggtgcttttgtcattagagaacgaagcagaacagaagctgatcgaaagcatgctgcagaacttgacaaagcccggaacggggattagcgacggagatttttggattgggctgtggcgaaatggagatgggcaaacgagcggagcatgtcctgacttgtaccagtggtccgacggttccaacagccaatatagaaactggtatactgacgagccatcatgcgggtccgagaagtgcgttgtcatgtaccaccagcctacagctaaccctggccttgggggtccttacctgtaccagtggaatgatgaccgttgcaacatgaagcacaactacatttgcaagtacgagccagagattaacccaactgcccctgttgagaagccctacttgaccaatcagccaggggacactcaccagaatgtggttgtgactgaggccggtattatccctaacctcatctatgtcgtgatcccaaccatccctctccttctgctgattctggtggctttcggaacatgttgtttccagatgttacataaaagtaagggccgtactaagacttctcccaaccagagcacactctggatatccaaaagcaccagaaaagagagcggaatggaggtatag

SEQ ID NO: 217497 - protein, 247 aa, Artificial Sequence
  derived and/or modified sequence
MAEAEFKDHSTAMDTEPNPGTSSVSTTTSSTTTTTITTSSSRMQQPQISVYSGSDRHAVQVIQQALHRPPSSAAQYLQQMYAAQQQHLMLHTAALQQQHLSSSQLQSLAAVQASLSSGRPSTSPTGSVTQQSSMSQTSINLSTSPTPAQLISRSQASSSTSGSITQQTMLLGSTSPTLTASQAQMYLRAQMLIFTPATTVAAVQSDIPVVSSSSSSSCQSAATQVQNLTLRSQKLGVLSSSQNGPPK

SEQ ID NO: 217498 - protein, 161 aa, Artificial Sequence
  derived and/or modified sequence
  misc_feature (1)..(1): Xaa can be any naturally occurring amino acid
XRWNRKPDNQSLGHRGRRPSGPDGAAREHILRQLPITYPSAEEDLASHEDSVPSAMTTRLRRQSERERERELRDVRIRKMPENSDLLPVAQTEPSIWTVDDVWAFIHSLPGCQDIADEFRAQEIDGQALLLLKEDHLMSAMNIKLGPALKICARINSLKES

SEQ ID NO: 217499 - protein, 983 aa, Artificial Sequence
  derived and/or modified sequence
MDTEPNPGTSSVSTTTSSTTTTTITTSSSRMQQPQISVYSGSDRHAVQVIQQALHRPPSSAAQYLQQMYAAQQQHLMLHTAALQQQHLSSSQLQSLAAVQASLSSGRPSTSPTGSVTQQSSMSQTSINLSTSPTPAQLISRSQASSSTSGSITQQTMLLGSTSPTLTASQAQMYLRAQMLIFTPATTVAAVQSDIPVVSSSSSSSCQSAATQVQNLTLRSQKLGVLSSSQNGPPKSTSQTQSLTICHNKTTVTSSKISQRDPSPESNKKGESPSLESRSTAVTRTSSIHQLIAPASYSPIQPHSLIKHQQIPLHSPPSKVSHHQLILQQQQQQIQPITLQNSTQDPPPSQHCIPLQNHGLPPAPSNAQSQHCSPIQSHPSPLTVSPNQSQSAQQSVVVSPPPPHSPSQSPTIIIHPQALIQPHPLVSSALQPGPNLQQSTANQVQATAQLNLPSHLPLPASPVVHIGPVQQSALVSPGQQIVSPSHQQYSSLQSSPIPIASPPQMSTSPPAQIPPLPLQSMQSLQVQPEILSQGQVLVQNALVSEEELPAAEALVQLPFQTLPPPQTVAVNLQVQPPAPVDPPVVYQVEDVCEEEMPEESDECVRMDRTPPPPTLSPAAITVGRGEDLTSEHPLLEQVELPAVASVSASVIKSPSDPSHVSVPPPPLLLPAATTRSNSTSMHSSIPSIENKPPQAIVKPQILTHVIEGFVIQEGLEPFPVSRSSLLIEQPVKKRPLLDNQVINSVCVQPELQNNTKHADNSSDTEMEDMIAEETLEEMDSELLKCEFCGKMGYANEFLRSKRFCTMSCAKRYNVSCSKKFALSRWNRKPDNQSLGHRGRRPSGPDGAAREHILRQLPITYPSAEEDLASHEDSVPSAMTTRLRRQSERERERELRDVRIRKMPENSDLLPVAQTEPSIWTVDDVWAFIHSLPGCQDIADEFRAQEIDGQALLLLKEDHLMSAMNIKLGPALKICARINSLKES

SEQ ID NO: 217500 - protein, 995 aa, Artificial Sequence
  derived and/or modified sequence
MAEAEFKDHSTAMDTEPNPGTSSVSTTTSSTTTTTITTSSSRMQQPQISVYSGSDRHAVQVIQQALHRPPSSAAQYLQQMYAAQQQHLMLHTAALQQQHLSSSQLQSLAAVQASLSSGRPSTSPTGSVTQQSSMSQTSINLSTSPTPAQLISRSQASSSTSGSITQQTMLLGSTSPTLTASQAQMYLRAQMLIFTPATTVAAVQSDIPVVSSSSSSSCQSAATQVQNLTLRSQKLGVLSSSQNGPPKSTSQTQSLTICHNKTTVTSSKISQRDPSPESNKKGESPSLESRSTAVTRTSSIHQLIAPASYSPIQPHSLIKHQQIPLHSPPSKVSHHQLILQQQQQQIQPITLQNSTQDPPPSQHCIPLQNHGLPPAPSNAQSQHCSPIQSHPSPLTVSPNQSQSAQQSVVVSPPPPHSPSQSPTIIIHPQALIQPHPLVSSALQPGPNLQQSTANQVQATAQLNLPSHLPLPASPVVHIGPVQQSALVSPGQQIVSPSHQQYSSLQSSPIPIASPPQMSTSPPAQIPPLPLQSMQSLQVQPEILSQGQVLVQNALVSEEELPAAEALVQLPFQTLPPPQTVAVNLQVQPPAPVDPPVVYQVEDVCEEEMPEESDECVRMDRTPPPPTLSPAAITVGRGEDLTSEHPLLEQVELPAVASVSASVIKSPSDPSHVSVPPPPLLLPAATTRSNSTSMHSSIPSIENKPPQAIVKPQILTHVIEGFVIQEGLEPFPVSRSSLLIEQPVKKRPLLDNQVINSVCVQPELQNNTKHADNSSDTEMEDMIAEETLEEMDSELLKCEFCGKMGYANEFLRSKRFCTMSCAKRYNVSCSKKFALSRWNRKPDNQSLGHRGRRPSGPDGAAREHILRQLPITYPSAEEDLASHEDSVPSAMTTRLRRQSERERERELRDVRIRKMPENSDLLPVAQTEPSIWTVDDVWAFIHSLPGCQDIADEFRAQEIDGQALLLLKEDHLMSAMNIKLGPALKICARINSLKES

SEQ ID NO: 217501 - DNA, 2952 bp, Artificial Sequence
  derived and/or modified sequence
atggatacagagccaaatcctggtacttctagtgtgtcaaccaccacctctagtactactaccacaactattactacctcctcatcaagaatgcagcagccacagatttcagtctacagcggaagcgatagacacgctgtacaagtgatccagcaggcgctgcataggccgccatctagtgccgcacagtacctccagcagatgtacgcagcccagcagcagcaccttatgctccataccgccgccttgcagcagcagcacctgtcatcctctcaattgcaaagcctggcagctgtgcaggcctccctgtcatctggcagaccctcaacctcgccaaccggctcagtcacccagcagtcctctatgagtcaaacgtccatcaacctttctacctcccccactccagcccagctcattagcagaagtcaggcaagctcttccaccagtggttcgattacacagcaaaccatgctcctgggcagcactagcccgaccctgacagcctcacaggctcagatgtacctgagagcacagatgctgattttcacccccgcgaccactgtggctgctgtgcagtcagacattcctgtggtttctagtagctctagctcttcttgtcagagtgccgcaacacaggtgcagaatctgacgctgcgaagtcagaaactgggtgtcctctcctcctcccagaacggtccacctaagtcaacatcccagacccaatcactgacaatctgccacaataagacaactgtcacaagtagtaaaatttcacagcgcgacccatcacctgagagcaacaaaaaaggcgagtctccttccctggagtctaggtctactgccgtgacaagaacctcctcaattcatcagctcattgcacccgccagctacagccccattcagccccattctctcataaagcaccagcagattcccctccattccccacccagtaaggtgtcccaccatcaacttatcctgcagcagcagcagcagcagatacaaccaatcacactgcagaatagtacgcaggaccccccccccagtcagcactgtatccccctgcagaaccatggcctaccccccgctccctcaaacgcgcaaagtcaacactgttcccccatccaaagccacccttcccccctaacagtcagtcccaatcagagtcagagcgcccaacagtctgtggtcgtctcacccccacccccacactcacctagccaatcccctactatcatcatccacccacaagcactgattcagccccatcctttggtctctagtgcgttgcaacctgggcctaacctgcagcagtcgacagctaatcaggtgcaagctaccgcacagctcaacctgccttcacacctgccgcttccggcatctcctgttgtacacatcggtcccgtgcagcagtctgccctggtcagcccgggccagcagatcgtctcaccttcacaccagcaatattcctccctgcagtctagtccgataccgattgcatcgcccccacagatgtctacaagtccccccgctcaaatccctcccctcccacttcagagcatgcagtctctacaagtgcaacccgagatcttaagtcaggggcaggtgctggtccagaatgctctggtttcggaggaggaattgcccgctgccgaagccttggtacaactacctttccagacactgcccccgccccagacggtggcggtgaatctccaggtgcagccccccgcccctgtcgatcccccagtggtgtaccaggtggaggatgtctgtgaagaggaaatgccagaggagtcagacgaatgtgtaagaatggatcgcacgcccccacctccaacgttgagtcctgcagccatcaccgtgggacgtggagaggatctgacaagtgaacaccccctgctggaacaggttgagcttccagctgttgctagcgtttctgcaagcgtgattaagtccccttctgatcctagccacgtttctgtccccccaccgccccttctgttgcccgcagcaacaacgaggagtaacagcacatccatgcacagctccattccttctatcgaaaacaagccgcctcaggctatcgtcaagccacagatcctgacacacgtgatcgaggggttcgtcattcaggagggcctggagccctttccggtaagccgatccagccttctaatcgagcagccagtgaagaagaggcctctgctcgataaccaggtgataaactccgtctgtgtccagcctgagctacagaataacacgaagcatgccgacaattcttcagataccgaaatggaggatatgattgctgaggagactctggaggagatggacagcgagttgctgaagtgcgagttttgcggcaagatgggctacgccaacgaatttttgaggagtaagagattctgtaccatgagctgtgctaaacgctacaacgtgtcctgttccaagaaattcgccttaagccgatggaatcgcaagccagacaaccagtcactgggacacaggggcaggaggccttcaggacctgatggagctgcgagggaacatattctcagacagctccctatcacttaccctagcgcagaggaggacctggcatcacatgaggacagtgtgccgtctgccatgactactaggctccggcgtcagagcgaaagggaacgtgagcgagaattgagagatgtgagaattaggaagatgcccgaaaactcagatcttctgccagtggcccagacagaaccttctatttggacagtagatgacgtctgggcttttattcacagcctgcctgggtgccaggacatcgctgacgagttcagagcccaggagatcgatgggcaggccctcctgctgctgaaggaggaccatctgatgtctgcaatgaacatcaagctcggtccagctctgaaaatttgtgcgaggatcaattctcttaaagaatcttag

SEQ ID NO: 217502 - DNA, 2988 bp, Artificial Sequence
  derived and/or modified sequence
atggcggaagccgaatttaaggaccatagtaccgcgatggatactgagccaaaccctggaacctctagtgtgagcaccacaacctcatccacaactacaactacgatcacgacttcgtcttccaggatgcagcaaccgcagatcagcgtctactctggatctgaccgacatgctgtgcaggtgattcagcaagcattacatagaccgccaagctccgcagcgcagtacctgcaacagatgtatgctgcccagcaacaacacctaatgctgcacactgctgctctgcagcagcagcacctgtcctcaagccaactgcagtctctggccgccgtgcaggctagtctgagtagcgggaggccatccacctccccaaccgggtcagtgacccaacaaagcagcatgagccagaccagtattaatctttcaacctctcccacccctgcacagcttattagtaggtctcaggcaagttcgagtacatccggttcgatcacgcagcagactatgttgttgggatctaccagccctaccctgacagcttcgcaggcccagatgtaccttcgtgctcagatgctgatcttcaccccggcgacaacagtcgccgccgtgcagagtgacattccagtggtgtcaagtagctctagtagcagttgccagtccgccgccacacaagtacagaatctgacgctcagatctcaaaaactcggcgttttgagctctagccaaaatgggccaccgaaaagtacaagccagactcagagcttgaccatttgccataacaagaccacggtgacatctagtaagatctctcagagggatccatcaccagaaagcaataagaaaggcgagtctccaagtctagagtcaaggagtaccgccgtaaccaggaccagtagtatacatcagttaatcgcaccagctagctacagtcccatccaaccacactccctcatcaagcatcaacaaattccgctacatagtccacctagcaaggtgtcccaccaccagcttatactgcaacaacagcaacagcagatacagccaatcaccttgcaaaattccacacaggatccacctccatcccaacactgcatccctctacagaaccacggactccctcccgcaccatcaaatgcacagagccagcactgctctcctatccaatcgcacccctccccgcttactgtttctcctaaccagagccaaagtgctcagcagtcagtggtggtgagcccccccccaccacatagccccagccagtctccgacaatcatcatacatcctcaggctctgatccagcctcatcccctcgtgtcctcagccctccagcccggacctaacttacagcagtcaacagccaatcaggtgcaggccaccgcacagttgaaccttccctcccacctgcctttgcccgcttccccagtggtgcacatcggccccgtacagcagtccgcattagtgagtccaggccaacagatcgtctctccttctcatcagcagtacagctctcttcagtctagtcccatccctatcgcttctccgccccagatgagcacatctccaccggcccagatcccccctcttcccctgcagagcatgcaatctttacaagtacaacccgaaatcctgtcccagggccaggtccttgtgcaaaacgccctcgtatccgaggaggaattgcccgctgcagaggcgctagtgcaactgcctttccaaacattgccccccccccagacggtggctgtcaacctgcaggtgcagcccccggcgcccgttgacccccccgtggtctatcaggtggaggacgtctgcgaggaagagatgccagaggagtcagacgaatgtgtccggatggacaggacccctcctccccccaccctgtcacctgctgctatcaccgtgggacggggcgaggatttgacaagcgaacacccactactggaacaggttgaactgcccgcagtggcctccgtttcggcttctgttatcaagtcgccatcggatccaagtcacgtgagtgtgccacctccacctttgctgctccccgcagctactacccgctcgaattccaccagcatgcattcctctatcccgtcaattgagaacaaaccacctcaagcaatcgtgaagccgcagattcttacccacgtgatcgagggattcgtgattcaagaagggcttgagccatttcccgtgagcaggagctctcttctgatcgagcagccggtgaagaagcggcccctgcttgacaatcaggtgattaactcagtctgtgtgcaaccagaactgcaaaacaatactaagcatgccgacaacagctctgacaccgagatggaggatatgatcgctgaagagacactcgaggagatggactctgaactgctgaagtgcgaattctgtggaaagatgggctatgccaatgagtttctgaggtctaaacgtttctgtaccatgtcatgtgccaagcgatacaatgttagctgttctaagaagtttgcgctatcccggtggaacaggaagccagataatcagtctctcgggcatagagggaggcggccatcaggacccgatggcgctgcccgcgagcacatcctcagacagcttcctataacttacccttcggccgaggaggatttggcttcacacgaagacagtgtcccgtctgctatgacaaccaggctgagaagacagagtgaacgagagagagagagggagctcagggatgtgcgcattcggaagatgcccgaaaactccgacctgcttcccgttgctcagacagagcccagcatttggacggtggacgatgtctgggccttcatccactcccttcccgggtgtcaggatatagccgacgaatttcgggcccaggagattgatggccaggctttgctgctgctgaaagaggatcatttgatgtcagcgatgaacattaagttaggacctgcgctaaagatctgtgcacgcatcaatagtttgaaggagtcatag

SEQ ID NO: 217503 - DNA, 2952 bp, Artificial Sequence
  derived and/or modified sequence
atggacacagagcccaaccctggcaccagctctgtgtccaccaccaccagcagcaccaccaccaccaccatcaccaccagcagcagcaggatgcagcagccccagatctctgtgtacagcggcagtgacagacatgctgtgcaggtgatccagcaggccctgcacaggcctcccagcagcgctgcccagtacctgcagcagatgtatgctgcccagcagcagcacctgatgctgcacacagctgccctgcagcagcagcacctgagcagcagccagctgcagagcctggccgctgtgcaggccagcctgagcagcggccggcccagcaccagccccactggatctgtgacccagcagagctccatgagccagaccagcatcaacctgagcaccagccccaccccagcccagctgatcagccgcagccaggccagcagcagcaccagcggcagcatcacccagcagaccatgctgctgggcagcaccagccccaccctgacagccagccaggcccagatgtacctgcgggcccagatgctgatcttcaccccagccaccaccgtggccgctgtgcagagcgacatccctgtggtgagcagcagcagcagcagcagctgccagagcgctgccacccaggtgcagaacctgaccctgcggagccagaagctgggcgtgctgagcagcagccagaatggaccacccaagagcaccagccagacccagagcctgaccatctgccacaacaagaccaccgtgaccagcagcaagatcagccagagggaccccagccctgagagcaacaagaagggggagagccccagcctggagagccgcagcacagctgtgaccaggaccagcagcatccaccagctgattgccccagccagctacagccccatccagccccacagcctcatcaagcaccagcagatccccctgcacagcccccccagcaaggtgagccaccaccagctgatcctgcagcagcagcagcagcagatccagcccatcaccctgcagaacagcacccaggaccccccacccagccagcactgcatccccctgcagaaccacggcctgcccccagcccccagcaatgcccagagccagcactgcagccccatccagagccaccccagccccctgactgtgagccccaaccagagccagagcgcccagcagagcgtggtggtgagccccccaccaccccacagccccagccagagccccaccatcatcatccacccccaggccctgatccagccccaccccctggtgagcagcgccctgcagcccggccccaacctgcagcagagcacagccaaccaggtgcaggccacagcccagctgaacctgcccagccacctgcccctgcctgccagccctgtggtgcacatcggccctgtgcagcagagcgccctggtgtccccaggccagcagatcgtgagccccagccaccagcagtacagcagcctgcagagcagccccatccccatcgccagccccccccagatgagcaccagccccccagcccagatcccccccctgcccctgcagagcatgcagagcctgcaggtgcagcctgagatcctgagccagggccaggtgctggtgcagaatgccctggtgtctgaggaggagctgcctgctgctgaggccctggtgcagctgcccttccagaccctgcccccaccccagacagtggccgtgaacctgcaggtgcagcccccagcccctgtggacccccctgtggtgtaccaggtggaggatgtgtgtgaggaggagatgcctgaggagagtgatgaatgtgtgaggatggacaggaccccacctccacccaccctgagccctgctgccatcaccgtgggccgcggggaggacctgaccagcgagcaccccctgctggagcaggtggagctgcctgctgtggcctctgtgtctgccagcgtcatcaagagccccagcgaccccagccacgtgtctgtgcccccaccacccctgctgctgcctgctgccaccaccaggagcaacagcacctccatgcacagcagcatccccagcattgagaacaagccaccccaggccatcgtgaagccccagatcctgacccacgtgattgagggctttgtgatccaggagggcctggagcccttccctgtgagccgcagcagcctgctgattgagcagcctgtgaagaagaggcccctgctggacaaccaggtgatcaacagcgtgtgtgtgcagcctgagctgcagaacaacaccaagcacgccgacaacagcagtgacacagagatggaggacatgattgctgaggagaccctggaggagatggacagcgagctgctgaagtgtgagttctgtgggaagatgggctacgccaatgagttcctgcggagcaagcgcttctgcaccatgagctgtgccaagcgctacaacgtgtcctgcagcaagaagtttgccctgagccgctggaacaggaagccagacaaccagagcctgggccaccggggcagaagacccagcggcccagatggagctgcccgggagcacatcctgcggcagctgcccatcacctaccccagcgctgaggaggacctggccagccatgaagattctgtgcccagcgccatgaccacccggctgcggcggcagagcgagcgggagcgggagcgggagctgagagatgtgcgcatcaggaagatgcctgagaacagcgacctgctgcctgtggcccagacagagcccagcatctggacagtggatgatgtgtgggccttcatccacagcctgcccggctgccaggacattgctgatgagttccgggcccaggagattgatggccaggccctgctgctgctgaaggaggaccacctgatgtctgccatgaacatcaagctgggccctgccctgaagatctgtgcccgcatcaacagcctgaaggagagctag

SEQ ID NO: 217504 - DNA, 2988 bp, Artificial Sequence
  derived and/or modified sequence
atggccgaggccgagttcaaggaccacagcacagccatggacacagagcccaaccctggcaccagctctgtgtccaccaccaccagcagcaccaccaccaccaccatcaccaccagcagcagcaggatgcagcagccccagatctctgtgtacagcggcagtgacagacatgctgtgcaggtgatccagcaggccctgcacaggcctcccagcagcgctgcccagtacctgcagcagatgtatgctgcccagcagcagcacctgatgctgcacacagctgccctgcagcagcagcacctgagcagcagccagctgcagagcctggccgctgtgcaggccagcctgagcagcggccggcccagcaccagccccactggatctgtgacccagcagagctccatgagccagaccagcatcaacctgagcaccagccccaccccagcccagctgatcagccgcagccaggccagcagcagcaccagcggcagcatcacccagcagaccatgctgctgggcagcaccagccccaccctgacagccagccaggcccagatgtacctgcgggcccagatgctgatcttcaccccagccaccaccgtggccgctgtgcagagcgacatccctgtggtgagcagcagcagcagcagcagctgccagagcgctgccacccaggtgcagaacctgaccctgcggagccagaagctgggcgtgctgagcagcagccagaatggaccacccaagagcaccagccagacccagagcctgaccatctgccacaacaagaccaccgtgaccagcagcaagatcagccagagggaccccagccctgagagcaacaagaagggggagagccccagcctggagagccgcagcacagctgtgaccaggaccagcagcatccaccagctgattgccccagccagctacagccccatccagccccacagcctcatcaagcaccagcagatccccctgcacagcccccccagcaaggtgagccaccaccagctgatcctgcagcagcagcagcagcagatccagcccatcaccctgcagaacagcacccaggaccccccacccagccagcactgcatccccctgcagaaccacggcctgcccccagcccccagcaatgcccagagccagcactgcagccccatccagagccaccccagccccctgactgtgagccccaaccagagccagagcgcccagcagagcgtggtggtgagccccccaccaccccacagccccagccagagccccaccatcatcatccacccccaggccctgatccagccccaccccctggtgagcagcgccctgcagcccggccccaacctgcagcagagcacagccaaccaggtgcaggccacagcccagctgaacctgcccagccacctgcccctgcctgccagccctgtggtgcacatcggccctgtgcagcagagcgccctggtgtccccaggccagcagatcgtgagccccagccaccagcagtacagcagcctgcagagcagccccatccccatcgccagccccccccagatgagcaccagccccccagcccagatcccccccctgcccctgcagagcatgcagagcctgcaggtgcagcctgagatcctgagccagggccaggtgctggtgcagaatgccctggtgtctgaggaggagctgcctgctgctgaggccctggtgcagctgcccttccagaccctgcccccaccccagacagtggccgtgaacctgcaggtgcagcccccagcccctgtggacccccctgtggtgtaccaggtggaggatgtgtgtgaggaggagatgcctgaggagagtgatgaatgtgtgaggatggacaggaccccacctccacccaccctgagccctgctgccatcaccgtgggccgcggggaggacctgaccagcgagcaccccctgctggagcaggtggagctgcctgctgtggcctctgtgtctgccagcgtcatcaagagccccagcgaccccagccacgtgtctgtgcccccaccacccctgctgctgcctgctgccaccaccaggagcaacagcacctccatgcacagcagcatccccagcattgagaacaagccaccccaggccatcgtgaagccccagatcctgacccacgtgattgagggctttgtgatccaggagggcctggagcccttccctgtgagccgcagcagcctgctgattgagcagcctgtgaagaagaggcccctgctggacaaccaggtgatcaacagcgtgtgtgtgcagcctgagctgcagaacaacaccaagcacgccgacaacagcagtgacacagagatggaggacatgattgctgaggagaccctggaggagatggacagcgagctgctgaagtgtgagttctgtgggaagatgggctacgccaatgagttcctgcggagcaagcgcttctgcaccatgagctgtgccaagcgctacaacgtgtcctgcagcaagaagtttgccctgagccgctggaacaggaagccagacaaccagagcctgggccaccggggcagaagacccagcggcccagatggagctgcccgggagcacatcctgcggcagctgcccatcacctaccccagcgctgaggaggacctggccagccatgaagattctgtgcccagcgccatgaccacccggctgcggcggcagagcgagcgggagcgggagcgggagctgagagatgtgcgcatcaggaagatgcctgagaacagcgacctgctgcctgtggcccagacagagcccagcatctggacagtggatgatgtgtgggccttcatccacagcctgcccggctgccaggacattgctgatgagttccgggcccaggagattgatggccaggccctgctgctgctgaaggaggaccacctgatgtctgccatgaacatcaagctgggccctgccctgaagatctgtgcccgcatcaacagcctgaaggagagctag

SEQ ID NO: 217505 - DNA, 5030 bp, Artificial Sequence
  derived and/or modified sequence
agtgatggaggagagaagatggcggaagcggagtgagtgactagatgatttaaggaccatagtacagctatggatactgaaccaaacccgggaacatcttctgtgtcaacaacaaccagcagtaccaccaccaccaccatcaccacttcctcctctcgaatgcagcagccacagatctctgtctacagtggttcagaccgacatgctgtacaggtaattcaacaggcattgcatcggccccccagctcagctgctcagtaccttcagcaaatgtatgcagcccaacaacagcacttgatgctgcatactgcagctcttcagcagcagcatttaagcagctcccagcttcagagccttgctgctgttcaggcaagtttgtccagtggaagaccatctacatctcccacaggaagtgtcacacagcagtcaagtatgtcccaaacgtctatcaacctctccacttctcctacacctgcacagttaataagccgttcccaggcttccagttctaccagcggcagtattacccaacagactatgttactagggagtacttcccctaccctaacggcaagccaagctcaaatgtatctccgagctcaaatgctgattttcacacccgctaccactgtggctgctgtacagtctgacattcctgttgtctcgtcgtcatcgtcatcttcctgtcagtctgcagctactcaggttcagaatttaacattacgcagccagaagttgggtgtattatctagctcacagaatggtccaccaaaaagcactagtcaaactcagtcattgacaatttgtcataacaaaacaacagtgaccagttctaaaatcagccaacgagatccttctccagaaagtaataagaaaggagagagcccaagcctggaatcacgaagcacagctgtcacccggacatcaagtattcaccagttaatagcaccagcttcatattctccaattcagcctcattctctaataaaacatcagcagattcctcttcattcaccaccttccaaagtttcccatcatcagctgatattacaacagcagcaacagcaaattcagccaatcacacttcagaattcaactcaagacccacccccatcccagcactgtataccactccagaaccatggccttcctccagctcccagtaatgcccagtcacagcattgttcaccgattcagagtcatccctctcctttaacagtgtctcctaatcagtcacagtcagcacagcagtctgtagtggtgtctcctccaccacctcattcaccaagtcagtctcctactataattattcatccacaagcacttattcagccacaccctcttgtgtcatcagctctccagccagggccaaatttgcagcagtccactgctaatcaggtgcaagctacagcacagttgaatcttccatcccatcttccacttccagcttcccctgttgtacacattggcccagttcagcagtctgccttggtatccccaggccagcagattgtctctccatcacaccagcaatattcatccctgcagtcctctccaatcccaattgcaagtcctccacagatgtcgacatctcctccagctcagattccaccactgcccttgcagtctatgcagtctttacaagtgcagcctgaaattctgtcccagggccaggttttggtgcagaatgctttggtgtcagaagaggaacttccagctgcagaagctttggtccagttgccatttcagactcttcctcctccacagactgttgcggtaaacctacaagtgcaaccaccagcacctgttgatccaccagtggtttatcaggtagaagatgtgtgtgaagaagaaatgccagaagagtcagatgaatgtgtccggatggatagaaccccaccaccacccactttgtctccagcagctataacagtggggagaggagaagatttgacttctgaacatcctttgttagagcaagtggaattacctgctgtggcatcagtcagtgcttcagtaattaaatctccatcagatccctcacatgtttctgttccaccacctccattgttacttccagctgccaccacaaggagtaacagtacatctatgcacagtagcattcccagtatagagaacaaacctccacaggctattgttaaaccacagatcctaacccatgttattgaaggctttgtgattcaggagggattggagccatttcctgtgagtcgttcctctttgctaatagaacagcctgtgaaaaaacggcctcttttggataatcaggtgataaattcagtgtgtgttcagccagagctacagaataatacaaaacatgcggataattcatctgacacagagatggaagacatgattgctgaagagacattagaagaaatggacagtgagttgctcaagtgtgaattctgtgggaaaatgggatatgctaatgaatttttgcggtcaaaacgattctgcactatgtcatgtgccaaaaggtacaatgttagctgttctaaaaaatttgcacttagtcgttggaatcgtaagcctgataatcaaagtcttgggcatcgtggccgtcgtccaagtggccctgatggggcagcgagagaacatatccttaggcagcttccaattacttatccatctgcagaagaagacttggcttctcatgaagattctgtgccatctgctatgacaactcgtctgcgcaggcagagcgagcgggaaagagaacgtgagcttcgggatgtgagaattcggaaaatgcctgagaacagtgacttgctaccagttgcacaaacagagccatctatatggacagttgatgatgtctgggccttcatccattctttgcctggctgccaggatatcgcagatgaattcagagcacaggagattgatggacaggcccttctcttgctgaaagaagaccatctcatgagtgcaatgaatatcaagctaggcccagccctgaagatctgtgcacgcatcaactctctgaaggaatcttaacaggaacatgaagccttgataaaacagcagttttacttttctcacaaaaacttgtaaggtaaaggcctaacttggtctagaatatgacacttattgtggtggatagccaagcacattgggatctccacatcaaatactgacatttcttctacaggtataataattcatcatgcattttcataattaataaacattggtaaaattaattttacaggttacatgaaacattgaaagacttgttacagagggccatgatatttttcaaagaaatgtgttatactagataatttttttaaaggtgatgtttatcattaatataaagaatccttttaaaagtaatttaatgatttacatttctcctcttttgattcaattttcttatacattttttctaccctattagttttctaaaggttgtcatgagaggtatattatggaataatttagtagtccagtgacagaatcgtatgaaatcagtgtacattttaaaaaacatgtcttttagacatatgctttatctataaaaaaggaattgtgttctagtatgaacaatactgatctggaagtgagaagagttagtttctattccaaacttgaccaagaatttggtttgactgagaacgttttcctctcagtttttgtacatttatttagagcagtggttctcagtggaggtcagttttgatcgccaggggacatctggcaatgttgagacattttggttgtcacagcttgggggtgggttcaggggagggttgctactggtgtctagtagttagaagccagagatgtttctaaacatcttataatgcacaggacagcacccctccactgtaaagaattattggttcaaaaatatcggtactgccaaggttgagaaactctgatatagaaggagtgataaatattgttttcacccaaaggaatacttttaaaggatgaagcttactaaacatatatgatggaagtattattcagataacattaatattctgctgaataattttttctagtttaatcatactagaaaaagaaaaaaaatctacaaattgtcctataaaataaggacaaacatgcaaataatttaactctcagaaagtactaattcattctgattatctttcatacctctgtgctcctctgcactgacgaagacataatatgattatacctatgaactagtgcacagccttttctggcaagaaaatagtttgtagcagatacgtggttgctctttggatttttttctattgttgaacatgctgggactagctagaatgcacattcctacttcctttaccaaacgtttgcatgcttcctgcaaagcacttaccaagtgatttctcttgaaccatcggatataattttgtatgtacatgtttgaggaaaaaaatgtaaagcaaaaccttttactgaacagtgttctatagaattatgacactaaaacaaaattgtttgtggaagccctgaaagctttatagtcctggacatcaaaaattttatttgagatgatgaatgttttgttttcatcttttcttatattaccacaattgagatattttagtaattgaaggaacatacacagatatttggcagaagtcgagtaaggaggggaaaaaaagagtccgtgagtttcagtcattttcactgctcttttcaaaaagattgtgttgagctggtagaagactaaagatgtcactgaagacatcacagatactatatttatcttttggctttgtgtacattagagaatgttgattatttttatacaaaaatacagcgggtaatttttttaatctttagatgcctcttgtttgaatgtatgctttgtggaattctttgtgtagtaatgttttaaaaaaagatgtttactgatagttacatgtaggattagaatatgtaatataatataaggctcatgttccagacctacgatagcttgtagtctatgttacgtatttctttatatcacatttttaatcattggattaaagtatcaaggaaagcta

SEQ ID NO: 217506 - DNA, 3359 bp, Artificial Sequence
  derived and/or modified sequence
gcgcagcccatgttagtgatggaggagagaagatggcggaagcggaatttaaggaccatagtacagctatggatactgaaccaaacccgggaacatcttctgtgtcaacaacaaccagcagtaccaccaccaccaccatcaccacttcctcctctcgaatgcagcagccacagatctctgtctacagtggttcagaccgacatgctgtacaggtaattcaacaggcattgcatcggccccccagctcagctgctcagtaccttcagcaaatgtatgcagcccaacaacagcacttgatgctgcatactgcagctcttcagcagcagcatttaagcagctcccagcttcagagccttgctgctgttcaggcaagtttgtccagtggaagaccatctacatctcccacaggaagtgtcacacagcagtcaagtatgtcccaaacgtctatcaacctctccacttctcctacacctgcacagttaataagccgttcccaggcttccagttctaccagcggcagtattacccaacagactatgttactagggagtacttcccctaccctaacggcaagccaagctcaaatgtatctccgagctcaaatgctgattttcacacccgctaccactgtggctgctgtacagtctgacattcctgttgtctcgtcgtcatcgtcatcttcctgtcagtctgcagctactcaggttcagaatttaacattacgcagccagaagttgggtgtattatctagctcacagaatggtccaccaaaaagcactagtcaaactcagtcattgacaatttgtcataacaaaacaacagtgaccagttctaaaatcagccaacgagatccttctccagaaagtaataagaaaggagagagcccaagcctggaatcacgaagcacagctgtcacccggacatcaagtattcaccagttaatagcaccagcttcatattctccaattcagcctcattctctaataaaacatcagcagattcctcttcattcaccaccttccaaagtttcccatcatcagctgatattacaacagcagcaacagcaaattcagccaatcacacttcagaattcaactcaagacccacccccatcccagcactgtataccactccagaaccatggccttcctccagctcccagtaatgcccagtcacagcattgttcaccgattcagagtcatccctctcctttaacagtgtctcctaatcagtcacagtcagcacagcagtctgtagtggtgtctcctccaccacctcattcaccaagtcagtctcctactataattattcatccacaagcacttattcagccacaccctcttgtgtcatcagctctccagccagggccaaatttgcagcagtccactgctaatcaggtgcaagctacagcacagttgaatcttccatcccatcttccacttccagcttcccctgttgtacacattggcccagttcagcagtctgccttggtatccccaggccagcagattgtctctccatcacaccagcaatattcatccctgcagtcctctccaatcccaattgcaagtcctccacagatgtcgacatctcctccagctcagattccaccactgcccttgcagtctatgcagtctttacaagtgcagcctgaaattctgtcccagggccaggttttggtgcagaatgctttggtgtcagaagaggaacttccagctgcagaagctttggtccagttgccatttcagactcttcctcctccacagactgttgcggtaaacctacaagtgcaaccaccagcacctgttgatccaccagtggtttatcaggtagaagatgtgtgtgaagaagaaatgccagaagagtcagatgaatgtgtccggatggatagaaccccaccaccacccactttgtctccagcagctataacagtggggagaggagaagatttgacttctgaacatcctttgttagagcaagtggaattacctgctgtggcatcagtcagtgcttcagtaattaaatctccatcagatccctcacatgtttctgttccaccacctccattgttacttccagctgccaccacaaggagtaacagtacatctatgcacagtagcattcccagtatagagaacaaacctccacaggctattgttaaaccacagatcctaacccatgttattgaaggctttgtgattcaggagggattggagccatttcctgtgagtcgttcctctttgctaatagaacagcctgtgaaaaaacggcctcttttggataatcaggtgataaattcagtgtgtgttcagccagagctacagaataatacaaaacatgcggataattcatctgacacagagatggaagacatgattgctgaagagacattagaagaaatggacagtgagttgctcaagtgtgaattctgtgggaaaatgggatatgctaatgaatttttgcggtcaaaacgattctgcactatgtcatgtgccaaaaggtacaatgttagctgttctaaaaaatttgcacttagtcgttggaatcgtaagcctgataatcaaagtcttgggcatcgtggccgtcgtccaagtggccctgatggggcagcgagagaacatatccttaggcagcttccaattacttatccatctgcagaagaagacttggcttctcatgaagattctgtgccatctgctatgacaactcgtctgcgcaggcagagcgagcgggaaagagaacgtgagcttcgggatgtgagaattcggaaaatgcctgagaacagtgacttgctaccagttgcacaaacagagccatctatatggacagttgatgatgtctgggccttcatccattctttgcctggctgccaggatatcgcagatgaattcagagcacaggagattgatggacaggcccttctcttgctgaaagaagaccatctcatgagtgcaatgaatatcaagctaggcccagccctgaagatctgtgcacgcatcaactctctgaaggaatcttaacaggaacatgaagccttgataaaacagcagttttacttttctcacaaaaacttgtaaggtaaaggcctaacttggtctagaatatgacacttattgtggtggatagccaagcacattgggatctccacatcaaatactgacatttcttctacaggtataataattcatcatgcattttcataattaataaacattggtaaaattaattttacaggttacatgaaacattgaaagacttgttacagagggccatgatatttttcaaagaaatgtgttatactagataatttttttaaaggtgatgtttatcattaatataaagaatccttttaaaagtaa

SEQ ID NO: 217507 - DNA, 2952 bp, Artificial Sequence
  derived and/or modified sequence
atggacaccgagcccaaccccggcaccagcagcgtgagcaccaccacgtcctctaccactactaccacaatcacgacctcttcaagccggatgcaacaaccccaaatcagtgtctattctggcagcgatcggcacgccgtgcaggtcatccagcaggccttgcatagaccgccgtcatcggctgcacagtacttacagcagatgtatgcggcacagcagcagcatctgatgctccacaccgccgccctgcagcagcagcatctgagcagctcacagctgcagtcccttgccgcggtacaagcaagcctgagctccggacgaccttctacttcacccactggcagcgtaacccagcagtctagtatgtctcagacaagcattaatttgtcaacctctccgactccggctcaactcattagtcgcagtcaagcctccagttccacctcaggcagtattacacagcagactatgctcttgggctcaacctcccctacgctcaccgcaagccaagcacaaatgtatttgagagctcaaatgctgatttttacgcctgcaactaccgtggcggctgtgcagagcgatattccagttgtgtcgagctcctcgtccagtagttgccagtcggcagcaacccaggtgcagaatttgaccctaagatcgcaaaagctaggagtgctgtcttcctcacagaatggtcctcccaaatccactagtcaaactcagtctctgactatttgtcacaacaaaacaacggttacttcgagcaagatatctcagcgggacccaagccccgaatctaacaaaaaaggtgaatccccgagcttggagtcaagatccacggcagtcaccagaaccagctctatccaccaactgatcgcccctgcatcctattctcccatccaaccccactcccttattaaacatcagcaaatccctcttcacagtccccctagtaaagtgagtcaccaccaactcattctgcaacagcagcaacagcaaattcagcctattacgctacagaattctacccaagatccacctccatcccagcactgcattcctctgcagaaccacggactgcccccagccccctctaacgcacagtcacagcactgctcccccatccagtcccatccttcccccctcaccgtttctccaaaccagagccagagtgcccaacaaagtgttgtggtctctcctcccccaccacactcaccatcacagtcacctacaatcatcattcacccacaggcgcttatccaaccacatccattagtgtcttccgccctccaaccaggaccaaatctgcagcagagcactgcaaaccaggtacaggccaccgcgcagctaaacctccccagccatctcccactgccagcatcacctgtggttcatatagggcccgtccaacaatccgcgctggtgagcccaggccaacagatagtctctcctagccaccagcaatatagcagcttgcagtccagtcctattcctatagcaagtccacctcagatgtcgacttcgccccctgcccaaatcccccctcttccactccagtctatgcagagtctgcaagtgcaacctgaaattctcagccagggtcaggtgttggtacagaatgccctcgtttctgaggaggaattgccagccgccgaggcattggttcaactgcctttccagaccctccctccccctcaaacagttgcggtgaatcttcaagtgcaacctcctgctccggtggacccaccagttgtgtaccaggttgaagacgtttgcgaggaagaaatgcccgaggagagcgacgaatgcgtgcgaatggaccggacacccccaccgcctactctcagccctgccgcgattaccgtgggtcgtggcgaggatttgactagtgagcaccctcttctagagcaggtggagctgccagcagtggcttctgtgtccgccagcgtgattaagagtcccagtgacccaagtcacgttagcgtcccaccaccccctctcctgctccccgctgccacaactcggagcaactctacaagcatgcatagttctatccccagcatcgagaacaagcctccgcaagctatcgtgaagccccaaattctcacccacgtgatcgagggtttcgttatccaggagggtctggagccctttccagtaagccggtctagcctgctgatagaacagccagttaaaaaacgacccctactcgacaatcaggtgattaatagtgtatgcgtccaacctgagctacagaacaataccaaacacgcagacaactcgtcagataccgaaatggaagacatgatcgccgaggaaaccctggaagaaatggatagcgagctgctgaagtgcgaattttgcggaaaaatggggtacgcaaatgagttcctgcgcagcaagcgcttctgtacaatgtcatgcgctaaacgctacaacgtttcctgttcgaaaaagttcgctctctcaagatggaaccggaagcctgacaatcagtccctgggccacaggggccgacgtcccagcggcccagacggtgcggcccgggaacacatcttgaggcagttacccatcacgtacccgagcgcagaggaagacctggcttcacatgaagattccgtcccctccgctatgaccacccgactccgccggcaaagtgaacgtgagagagaaagagagctgcgggacgttaggatccgaaagatgccagaaaattcagacctcctgcccgtcgcccagactgagcccagcatctggacagttgacgacgtgtgggcctttatccactccctgcctggttgtcaggacattgccgacgaattccgggctcaagaaattgacggccaggccttactgttgcttaaagaggaccacttgatgtctgcgatgaatatcaagctgggacccgccctaaaaatttgcgcaagaattaactctctgaaagagagctag

SEQ ID NO: 217508 - DNA, 2988 bp, Artificial Sequence
  derived and/or modified sequence
atggccgaggccgagttcaaggaccacagcaccgccatggacaccgagcccaatcctgggacctcgagtgtttctaccaccacgtcatcaacaacaacaaccacaatcaccacgtcctcaagtcgcatgcagcagcctcagatctcagtttattctggatcagaccggcacgccgtgcaagtgatacaacaggcgttgcaccgcccgcctagttctgccgcccagtatctacaacaaatgtacgcagcccagcagcagcatttgatgctgcacacggccgcactgcagcagcagcacttgtccagcagtcagctccagtccttggctgcagtccaagcctccctttcaagcggaagaccatccacctccccaacaggctctgtgacccagcagagctccatgtcccaaaccagtatcaacctgtccacaagtcctacacccgcccagttgattagtcgcagtcaagcatctagttcaaccagcggaagtattacccagcaaacgatgctgttaggcagcacctcccctacgctgacagcatcacaggcccagatgtacctgcgggcacagatgctgattttcacaccagcaaccactgtggctgccgtgcagagcgatattcccgtggtcagtagctccagttctagctcatgccagtctgctgccacacaagtgcagaatctcactctccggagccagaaattgggcgtgctcagttcatcccagaacggcccacctaagagcactagccagacgcaatctttaaccatctgtcacaacaaaacaaccgttacaagtagtaagatctcacagagggatccatcaccagagagcaacaaaaaaggggagtcaccgtccctcgaatcacggtcaaccgctgtgaccaggactagctccattcatcagctgatcgcacccgcttcatattcacctatacagccccactcactgatcaaacaccagcagatccctctgcatagccccccgagtaaggtcagccaccaccaactgattctccagcagcagcaacaacagattcagcctataaccctgcagaactccacccaagaccctcctccttctcagcactgcatccctttacagaatcacgggctcccccctgctcctagcaacgcgcagtcccaacactgctctccgatccagtcccacccgtctcctttgactgtctctcctaatcagagccagagcgcccagcagtctgtagtcgtctcaccacctccacctcactcgccatcacagtcacctaccattatcatccacccacaagccctgattcagcctcatccactggtgagtagcgcactgcagcccggacccaaccttcagcagtccacagccaatcaagtgcaggcaaccgctcagctcaacctaccatcacacctccctttgccagccagtcccgttgtacacattgggcccgttcagcaatccgccctggtgtcgccgggccagcagatcgtgagtccaagccaccagcagtactcaagcctccagtcaagtcctatacccatcgcctcccccccacaaatgagtacctcgcccccagcccagattccccctctccctttacagtctatgcagtcacttcaggtgcagcccgaaatcctgagccaaggacaggtgctggttcagaacgctctcgtgagcgaagaagaactacctgcagctgaagccctggttcagctgcccttccagactctgcccccaccccagaccgtggcagtgaacctgcaagtccaaccaccagcacctgtcgacccgccagtggtctatcaggtggaggacgtatgtgaggaggagatgccagaagagtctgatgaatgtgtaagaatggacaggacaccgcctcccccaactctgagcccggccgctatcaccgtcggaagaggggaagatctgacgagtgaacatcccctgctggagcaggtcgaactccctgccgtggcaagcgtatccgccagcgttattaagagcccatcggacccatcgcatgtgagcgtgcctccaccaccattgctgttgccagccgctacaaccaggtcaaatagtacctcgatgcactcgtctattccttcgattgagaacaagccgcctcaagccatcgtgaaaccacagatcctcacacacgtgattgagggttttgtgattcaagagggtttagaaccatttcctgtgtcccggtcctccctcctgatcgaacagcctgtcaagaagaggcctttgttagataatcaagtgatcaatagcgtgtgcgtgcaacccgagctacagaataatactaaacatgccgataactcatccgatacagagatggaagacatgatcgctgaggagaccctcgaagagatggattcagagctgctgaagtgtgaattttgcggcaagatgggttatgctaacgagttcctccgcagtaagcggttctgcaccatgtcctgcgccaaacggtataatgtctcttgctcaaagaaatttgccctctctcggtggaatcgcaagcctgacaaccagagcttaggccacagaggccgaagacccagtggccctgacggagcagcaagagagcatatccttcgccagcttccgattacttacccttcagctgaagaagacctggcctcacacgaagattctgtcccaagcgcgatgaccacccggttgcgtagacagtcagagcgtgaaagggaaagggagctgcgtgatgtgcgcattcgtaagatgccagagaactccgacctcctgccagtggcccagacagaaccttcaatctggacagtcgatgacgtctgggcttttattcacagtctgcctgggtgccaggacattgcagacgaattccgggcgcaagaaatagatggccaggcattactgttactgaaagaagatcacctgatgtccgccatgaacataaagcttggccccgctcttaagatctgtgctcgtattaattccttgaaggagtcctag

SEQ ID NO: 217509 - DNA, 2952 bp, Artificial Sequence
  derived and/or modified sequence
atggataccgagcctaacccaggcacaagttcagtgtcaacaacgactagttcgaccaccaccactaccatcaccacatcctccagtaggatgcaacagccccaaatctccgtttactcagggtccgaccgccacgccgtgcaggtgatccaacaggccttacaccgccctccttccagcgctgctcagtacttacagcagatgtacgcggctcagcagcaacacctgatgctgcacacggccgctctgcagcagcagcacctatccagctctcaattgcagtctctagcagctgttcaagccagtctgtcctccggcagaccttcgacgtcacctactgggtctgtaacacagcagtcaagcatgagccagacatccatcaatctgagtacgtcgccaacccctgcccagctcataagtcgctcacaggcaagttcttcaacctcgggaagtatcacccagcagaccatgttactcggctcaacttcccccacgttaaccgccagccaggctcaaatgtacttaagagcccagatgctgatctttacccccgctacaactgtcgctgccgtgcagagcgatatccccgtcgtgtcttcttcctcgagctcttcatgccagtccgctgccacccaggttcaaaatctcaccctgcgctctcagaaacttggggttttgagctcctcccagaatggtcccccaaaatccacgtcccagacccagagcctgacaatctgccataataagaccacggttacgagcagcaagatctctcagagggacccctctcctgagtcaaacaaaaagggagagagcccatccttggaatcgcgctctaccgcagtgaccaggacctccagcattcatcagctgatcgcgccagcctcatatagccctatccagcctcactccctgattaaacaccagcagatcccgctgcactcacccccatcaaaagtctcccaccaccaacttatcttgcagcagcagcagcagcagatccaacccatcacgcttcagaactccacacaagacccccctccgagccaacactgcattccgctacagaaccatgggctccctccagcaccaagcaacgcgcagagtcagcattgcagccccatccagtcccatccaagccctcttactgtttcgcctaaccaatctcaatcagctcaacaaagcgtcgttgtgagcccaccgcctccccactcaccatcccagtcacctaccataattatccacccccaagctctgattcagccccatcctctggtgtctagcgccctgcagccgggaccaaacctccagcagagcaccgctaatcaagtgcaggccactgcacaactcaacctcccttctcacctgcctctgccagctagtcccgtcgtgcacatcggccctgtgcagcagtctgcgctggtgagccccggtcaacagatcgtctctccttcacaccagcagtactcctcactgcaaagctccccaatccctatcgcctccccaccacagatgtccactagccctcccgcacaaattcccccattgcctctccagagcatgcagagcttgcaggtccagcctgaaatcctgagccagggacaagtgctcgtgcaaaatgccttggtctccgaagaggagttgcccgctgcagaggctctcgtccagctacctttccagacactcccgcctccgcaaacagttgccgtgaacctccaggtgcagcctcctgcccctgtagatcctccagtggtttatcaggtagaggatgtctgtgaggaggaaatgcctgaagagagtgatgagtgtgtgagaatggacagaaccccacctccccctacgctcagtccagcagcaatcacagtgggacgaggtgaggatctgacatccgaacaccctctcttggagcaggtggaattacctgctgtggcttccgtatccgcctcagtcattaaaagtccatccgatccttcccacgtgagcgtcccgccacccccacttctgctccctgctgccaccactcgatccaactctacttccatgcactcaagtattccaagtatagagaacaaaccacctcaggccatagttaagcctcagattcttacacatgtaatcgaagggttcgttattcaggagggactggaacctttccctgtgtctcgtagttccctgttgatagaacaacccgtcaagaagaggccactgcttgacaaccaggttatcaacagcgtgtgcgtgcagcctgaactgcagaacaataccaagcatgctgataacagctctgatactgagatggaggacatgatcgctgaggaaaccctggaggagatggattccgagcttctaaagtgcgagttttgcgggaaaatgggatacgcaaacgagtttttacgctcgaaacgattttgtacaatgtcctgtgctaagagatacaatgtctcctgctcaaaaaagtttgcactaagcaggtggaaccgcaaaccagacaaccagtccctggggcacagaggacgaagacctagcggtcctgatggagcagcacgcgagcacattcttcgccagttacctatcacttaccccagtgccgaagaagatttggcaagtcacgaagactcagtgccttcagcgatgacgaccagattgcgccgacagagcgaacgggaacgggagcgtgaactaagagatgtgagaattcgtaaaatgccagagaatagcgacctgctgcccgtggcgcagaccgaacctagcatctggaccgtcgatgacgtgtgggcattcatccactctctaccaggttgtcaagatatcgctgacgaattccgagcacaggagatcgatggacaggcgctgctcttactgaaagaggaccacctgatgtcggctatgaacatcaaattggggccagcacttaagatttgtgctagaatcaattctctaaaggagtcttag

SEQ ID NO: 217510 - DNA, 2988 bp, Artificial Sequence
  derived and/or modified sequence
atggctgaagcggaatttaaggatcattccacagccatggatacagaaccaaacccaggcacatcatccgtttctacgactactagctcaacaaccaccactaccatcactacatcttcttctcggatgcagcaacctcagatttccgtgtattcagggagcgatcggcacgcagtgcaggtcattcagcaggcccttcaccgccctccctcctcagcagcccagtatttacagcaaatgtacgccgcacagcagcagcatctgatgctgcacacagcggctctccagcagcagcatctgtcctcatcccaattgcagagcctggcagccgtccaggcaagcttgtcttcagggaggcccagtacctccccgactgggagtgtaactcagcagagctcaatgagtcaaacaagcatcaacctgtcgacgtcacccacaccggcacagctaatttctcgaagtcaggcgagcagttccaccagcgggtccatcacacagcaaaccatgttgttgggcagtactagtcccaccctcacagcatcccaagctcagatgtacctccgagcccagatgcttatcttcacacctgccacaaccgtagccgcagtgcagagcgacattcctgttgtatcaagtagttccagtagcagctgccagagtgccgctacccaggtccagaatctgacgctgaggtcacagaagctgggggttctgtcgtcgagccagaacggcccacccaaatcaacatctcaaactcagagcctcaccatctgccacaacaaaacaaccgtgactagtagcaagatttcccagcgggacccgtccccagagtcaaacaagaagggcgagtcaccttccttagagagtaggagcaccgccgtcaccagaacctccagtatccaccaattgatagccccagcttcttattcccctattcaaccccatagtctcattaaacaccagcagatccccctgcatagtcccccatccaaggtgtcccatcaccagctcatactgcagcaacagcaacaacaaattcaacccattacactgcaaaatagtacccaggatccgccaccgagtcagcattgtatcccacttcaaaaccacggattgcctcccgctccctcaaacgctcagagccagcattgttcacccatccaatcccacccttcaccgttgaccgtcagtcccaaccagtcccagtcggcccagcagtcagtcgttgtgtctcctccccctcctcacagtcctagccagtcgcccacaataatcatccacccccaggctctgatccagcctcaccctcttgtgtcttcagcattgcaaccgggacccaatctccaacagagcacagctaaccaggtccaagccacggctcagctgaatctcccaagtcacctgcctctgcctgcatcacccgtcgtccacattggtccagtgcagcaatctgctctcgtctcacccggacagcaaatcgtgtcaccgagccaccagcaatattcatctctgcagagcagtccaatccccatagcgtccccccctcagatgtcaacctcccccccagctcagattccaccccttccactgcagagcatgcagtctcttcaggtgcagccagaaatcttgtctcagggtcaggtgctcgtacagaacgcactggtgtccgaggaagagctccccgcagccgaggcactagtccagcttccatttcagaccctgcccccaccacaaacggtggccgtgaatcttcaggtccagcctcccgctcccgtggatcctcctgtggtgtatcaagtcgaggacgtgtgtgaagaagaaatgcccgaagaatctgacgaatgcgttagaatggataggacaccgccaccccctaccctctccccagccgcaatcaccgtgggtcgcggtgaagacctgacttccgaacatccgttgctggaacaagtggaattgcccgctgtggccagcgtgtctgcaagcgtgataaagagcccctcggaccccagtcacgtttctgtgcctccacccccactgttgctgcccgcagccacaaccagaagtaactctaccagtatgcatagcagtattcctagtattgagaacaagccaccccaagctattgtcaaaccccaaattctgacccacgtgattgaaggctttgttattcaagagggccttgagccctttcctgtgtccagatccagtttgctgatagaacagccagtgaagaagcggcctctgttagataatcaggtgattaatagcgtctgtgtacaaccagagctgcagaataataccaaacatgccgataactcttcagatactgagatggaagacatgattgccgaggaaaccctcgaagaaatggacagtgaattgttgaagtgcgaattctgtgggaagatgggctatgccaatgagttcttgaggtcaaaaagattttgcaccatgagctgcgccaaacgctacaatgtttcatgtagtaagaaatttgcactatctaggtggaatcgtaagccagataatcaatctttgggtcataggggaagacggcctagcggccctgacggagccgctcgtgagcacattcttcggcagttaccaatcacctatcccagtgccgaggaagacctggcatctcacgaagactccgtccctagcgcgatgacaactaggctccgtcggcagagtgagcgagagagggagagggagctccgcgacgtgcgcatccggaagatgccagagaactcggacttgctgccagtcgcccaaaccgagccctccatttggactgttgacgacgtttgggccttcatacactctctccctgggtgtcaggacattgcagacgagtttcgggctcaagagattgacggtcaggcactcctcttactcaaggaagatcatcttatgagcgccatgaatataaagctgggccctgcactgaagatatgcgctcgcattaattccttaaaagagagctag

SEQ ID NO: 217511 - DNA, 2952 bp, Artificial Sequence
  derived and/or modified sequence
atggacaccgagcccaaccccggcaccagcagcgtgagcaccaccaccagcagcaccaccaccaccaccatcaccaccagcagcagcagaatgcagcagccccagatcagcgtgtacagcggcagcgacagacacgccgtgcaggtgatccagcaggccctgcacagaccccccagcagcgccgcccagtacctgcagcagatgtacgccgcccagcagcagcacctgatgctgcacaccgccgccctgcagcagcagcacctgagcagcagccagctgcagagcctggccgccgtgcaggccagcctgagcagcggcagacccagcaccagccccaccggcagcgtgacccagcagagcagcatgagccagaccagcatcaacctgagcaccagccccacccccgcccagctgatcagcagaagccaggccagcagcagcaccagcggcagcatcacccagcagaccatgctgctgggcagcaccagccccaccctgaccgccagccaggcccagatgtacctgagagcccagatgctgatcttcacccccgccaccaccgtggccgccgtgcagagcgacatccccgtggtgagcagcagcagcagcagcagctgccagagcgccgccacccaggtgcagaacctgaccctgagaagccagaagctgggcgtgctgagcagcagccagaacggcccccccaagagcaccagccagacccagagcctgaccatctgccacaacaagaccaccgtgaccagcagcaagatcagccagagagaccccagccccgagagcaacaagaagggcgagagccccagcctggagagcagaagcaccgccgtgaccagaaccagcagcatccaccagctgatcgcccccgccagctacagccccatccagccccacagcctgatcaagcaccagcagatccccctgcacagcccccccagcaaggtgagccaccaccagctgatcctgcagcagcagcagcagcagatccagcccatcaccctgcagaacagcacccaggaccccccccccagccagcactgcatccccctgcagaaccacggcctgccccccgcccccagcaacgcccagagccagcactgcagccccatccagagccaccccagccccctgaccgtgagccccaaccagagccagagcgcccagcagagcgtggtggtgagccccccccccccccacagccccagccagagccccaccatcatcatccacccccaggccctgatccagccccaccccctggtgagcagcgccctgcagcccggccccaacctgcagcagagcaccgccaaccaggtgcaggccaccgcccagctgaacctgcccagccacctgcccctgcccgccagccccgtggtgcacatcggccccgtgcagcagagcgccctggtgagccccggccagcagatcgtgagccccagccaccagcagtacagcagcctgcagagcagccccatccccatcgccagccccccccagatgagcaccagcccccccgcccagatcccccccctgcccctgcagagcatgcagagcctgcaggtgcagcccgagatcctgagccagggccaggtgctggtgcagaacgccctggtgagcgaggaggagctgcccgccgccgaggccctggtgcagctgcccttccagaccctgccccccccccagaccgtggccgtgaacctgcaggtgcagccccccgcccccgtggacccccccgtggtgtaccaggtggaggacgtgtgcgaggaggagatgcccgaggagagcgacgagtgcgtgagaatggacagaaccccccccccccccaccctgagccccgccgccatcaccgtgggcagaggcgaggacctgaccagcgagcaccccctgctggagcaggtggagctgcccgccgtggccagcgtgagcgccagcgtgatcaagagccccagcgaccccagccacgtgagcgtgccccccccccccctgctgctgcccgccgccaccaccagaagcaacagcaccagcatgcacagcagcatccccagcatcgagaacaagcccccccaggccatcgtgaagccccagatcctgacccacgtgatcgagggcttcgtgatccaggagggcctggagcccttccccgtgagcagaagcagcctgctgatcgagcagcccgtgaagaagagacccctgctggacaaccaggtgatcaacagcgtgtgcgtgcagcccgagctgcagaacaacaccaagcacgccgacaacagcagcgacaccgagatggaggacatgatcgccgaggagaccctggaggagatggacagcgagctgctgaagtgcgagttctgcggcaagatgggctacgccaacgagttcctgagaagcaagagattctgcaccatgagctgcgccaagagatacaacgtgagctgcagcaagaagttcgccctgagcagatggaacagaaagcccgacaaccagagcctgggccacagaggcagaagacccagcggccccgacggcgccgccagagagcacatcctgagacagctgcccatcacctaccccagcgccgaggaggacctggccagccacgaggacagcgtgcccagcgccatgaccaccagactgagaagacagagcgagagagagagagagagagagctgagagacgtgagaatcagaaagatgcccgagaacagcgacctgctgcccgtggcccagaccgagcccagcatctggaccgtggacgacgtgtgggccttcatccacagcctgcccggctgccaggacatcgccgacgagttcagagcccaggagatcgacggccaggccctgctgctgctgaaggaggaccacctgatgagcgccatgaacatcaagctgggccccgccctgaagatctgcgccagaatcaacagcctgaaggagagctag

SEQ ID NO: 217512 - DNA, 2988 bp, Artificial Sequence
  derived and/or modified sequence
atggccgaggccgagttcaaggaccacagcaccgccatggacaccgagcccaaccccggcaccagcagcgtgagcaccaccaccagcagcaccaccaccaccaccatcaccaccagcagcagcagaatgcagcagccccagatcagcgtgtacagcggcagcgacagacacgccgtgcaggtgatccagcaggccctgcacagaccccccagcagcgccgcccagtacctgcagcagatgtacgccgcccagcagcagcacctgatgctgcacaccgccgccctgcagcagcagcacctgagcagcagccagctgcagagcctggccgccgtgcaggccagcctgagcagcggcagacccagcaccagccccaccggcagcgtgacccagcagagcagcatgagccagaccagcatcaacctgagcaccagccccacccccgcccagctgatcagcagaagccaggccagcagcagcaccagcggcagcatcacccagcagaccatgctgctgggcagcaccagccccaccctgaccgccagccaggcccagatgtacctgagagcccagatgctgatcttcacccccgccaccaccgtggccgccgtgcagagcgacatccccgtggtgagcagcagcagcagcagcagctgccagagcgccgccacccaggtgcagaacctgaccctgagaagccagaagctgggcgtgctgagcagcagccagaacggcccccccaagagcaccagccagacccagagcctgaccatctgccacaacaagaccaccgtgaccagcagcaagatcagccagagagaccccagccccgagagcaacaagaagggcgagagccccagcctggagagcagaagcaccgccgtgaccagaaccagcagcatccaccagctgatcgcccccgccagctacagccccatccagccccacagcctgatcaagcaccagcagatccccctgcacagcccccccagcaaggtgagccaccaccagctgatcctgcagcagcagcagcagcagatccagcccatcaccctgcagaacagcacccaggaccccccccccagccagcactgcatccccctgcagaaccacggcctgccccccgcccccagcaacgcccagagccagcactgcagccccatccagagccaccccagccccctgaccgtgagccccaaccagagccagagcgcccagcagagcgtggtggtgagccccccccccccccacagccccagccagagccccaccatcatcatccacccccaggccctgatccagccccaccccctggtgagcagcgccctgcagcccggccccaacctgcagcagagcaccgccaaccaggtgcaggccaccgcccagctgaacctgcccagccacctgcccctgcccgccagccccgtggtgcacatcggccccgtgcagcagagcgccctggtgagccccggccagcagatcgtgagccccagccaccagcagtacagcagcctgcagagcagccccatccccatcgccagccccccccagatgagcaccagcccccccgcccagatcccccccctgcccctgcagagcatgcagagcctgcaggtgcagcccgagatcctgagccagggccaggtgctggtgcagaacgccctggtgagcgaggaggagctgcccgccgccgaggccctggtgcagctgcccttccagaccctgccccccccccagaccgtggccgtgaacctgcaggtgcagccccccgcccccgtggacccccccgtggtgtaccaggtggaggacgtgtgcgaggaggagatgcccgaggagagcgacgagtgcgtgagaatggacagaaccccccccccccccaccctgagccccgccgccatcaccgtgggcagaggcgaggacctgaccagcgagcaccccctgctggagcaggtggagctgcccgccgtggccagcgtgagcgccagcgtgatcaagagccccagcgaccccagccacgtgagcgtgccccccccccccctgctgctgcccgccgccaccaccagaagcaacagcaccagcatgcacagcagcatccccagcatcgagaacaagcccccccaggccatcgtgaagccccagatcctgacccacgtgatcgagggcttcgtgatccaggagggcctggagcccttccccgtgagcagaagcagcctgctgatcgagcagcccgtgaagaagagacccctgctggacaaccaggtgatcaacagcgtgtgcgtgcagcccgagctgcagaacaacaccaagcacgccgacaacagcagcgacaccgagatggaggacatgatcgccgaggagaccctggaggagatggacagcgagctgctgaagtgcgagttctgcggcaagatgggctacgccaacgagttcctgagaagcaagagattctgcaccatgagctgcgccaagagatacaacgtgagctgcagcaagaagttcgccctgagcagatggaacagaaagcccgacaaccagagcctgggccacagaggcagaagacccagcggccccgacggcgccgccagagagcacatcctgagacagctgcccatcacctaccccagcgccgaggaggacctggccagccacgaggacagcgtgcccagcgccatgaccaccagactgagaagacagagcgagagagagagagagagagagctgagagacgtgagaatcagaaagatgcccgagaacagcgacctgctgcccgtggcccagaccgagcccagcatctggaccgtggacgacgtgtgggccttcatccacagcctgcccggctgccaggacatcgccgacgagttcagagcccaggagatcgacggccaggccctgctgctgctgaaggaggaccacctgatgagcgccatgaacatcaagctgggccccgccctgaagatctgcgccagaatcaacagcctgaaggagagctag

SEQ ID NO: 217513 - protein, 445 aa, Artificial Sequence
  derived and/or modified sequence
MSELTKELMELVWGTKSSPGLSDTIFCRWTQGFVFSESEGSALEQFEGGPCAVIAPVQAFLLKKLLFSSEKSSWRDCSEEEQKELLCHTLCDILESACCDHSGSYCLVSWLRGKTTEETASISGSPAESSCQVEHSSALAVEELGFERFHALIQKRSFRSLPELKDAVLDQYSMWGNKFGVLLFLYSVLLTKGIENIKNEIEDASEPLIDPVYGHGSQSLINLLLTGHAVSNVWDGDRECSGMKLLGIHEQAAVGFLTLMEALRYCKVGSYLKSPKFPIWIVGSETHLTVFFAKDMALVAPEAPSEQARRVFQTYDPEDNGFIPDSLLEDVMKALDLVSDPEYINLMKNKLDPEGLGIILLGPFLQEFFPDQGSSGPESFTVYHYNGLKQSNYNEKVMYVEGTAVVMGFEDPMLQTDDTPIKRCLQTKWPYIELLWTTDRSPSLN

SEQ ID NO: 217514 - DNA, 1338 bp, Artificial Sequence
  derived and/or modified sequence
atgtcggagctcactaaagagctgatggagctcgtgtggggcaccaagagtagccccggcctctcagataccatattttgccgctggactcagggtttcgtgttctctgagtccgagggctccgctctcgaacagttcgagggcggcccttgtgcggtgattgcaccggtgcaggcctttctgcttaagaagcttctgttctcaagtgagaagtcctcgtggcgcgattgtagcgaagaagagcagaaagaactcctgtgccataccctgtgcgacattctggagagcgcctgctgcgaccacagcggaagttattgcctagtgagctggctgcggggaaagactaccgaggagacagccagtattagcgggagccctgccgagagttcctgtcaggtggagcatagtagcgcactcgccgttgaagaactcggatttgaacgcttccatgccttaatccagaagagatccttcaggtctctgccagagctcaaggacgccgtcttggaccagtatagtatgtggggtaacaagttcggcgtattgctcttcctgtacagtgtattgctgactaagggtatagagaacatcaagaatgaaatcgaagacgcctccgaacctttgattgatcccgtgtacggccatgggtctcagtccttgatcaaccttttgctgaccggtcatgccgtgtcaaacgtctgggacggtgacagggagtgctcaggcatgaagcttctcgggattcacgaacaggccgctgtaggctttctgactctcatggaggccctcagatactgtaaggtggggtcataccttaagtcgccaaagttcccaatctggatcgtcggaagcgaaactcacctgactgtgttttttgccaaagatatggcattagttgctcctgaggccccatccgagcaagcccggagagtattccagacctacgatccagaagataacggtttcatccctgacagcttgctcgaagacgtcatgaaggcgctggacttggtgagtgatcccgagtatatcaatcttatgaagaataagttggacccagagggcctggggataatcctgctggggccatttctccaggagttcttccccgaccaaggtagctcaggcccagaatcattcaccgtatatcactacaatggtctgaagcagagtaactataatgaaaaggttatgtacgtcgagggaaccgccgtcgttatgggattcgaggatccgatgctgcagaccgacgatactccaataaaacgatgcctgcagactaagtggccttatattgagctgctgtggaccaccgatcgcagcccaagcttgaactag

SEQ ID NO: 217515 - DNA, 1338 bp, Artificial Sequence
  derived and/or modified sequence
atgtctgagctgaccaaggagctgatggagctggtgtggggcaccaagagcagccctggcctgagtgacaccatcttctgccgctggacccagggctttgtgttcagcgagagcgagggcagcgccctggagcagtttgagggcggcccctgtgccgtcatcgcccctgtgcaggccttcctgctgaagaagctgctcttcagcagcgagaagagctcctggagggactgcagcgaggaggagcagaaggagctgctgtgccacaccctgtgtgacatcctggagagcgcctgctgtgaccacagcggcagctactgcctggtgtcctggctgcggggcaagaccacagaggagacagccagcatcagcggcagccctgctgagagcagctgccaggtggagcacagcagcgccctggccgtggaggagctgggctttgagcgcttccacgccctgatccagaagaggagcttccgcagcctgcctgagctgaaggatgctgtgctggaccagtacagcatgtggggcaacaagtttggagtgctgctcttcctgtacagcgtgctgctgaccaagggcatcgagaacatcaagaatgaaattgaagatgccagcgagcccctgattgatcctgtgtatggccacggcagccagagcctcatcaacctgctgctgaccggccatgctgtgtccaatgtgtgggatggagacagagaatgttctggcatgaagctgctgggcatccacgagcaggccgctgtgggcttcctgaccctgatggaggccctgcgctactgcaaggtgggcagctacctgaagagccccaagttccccatctggatcgtgggcagcgagacccacctgactgtgttctttgccaaggacatggccctggtggcccctgaggcccccagcgagcaggcccggcgggtcttccagacctatgaccctgaggacaatggcttcatcccagacagcctgctggaggatgtgatgaaggccctggacctggtgtctgaccctgagtacatcaacctgatgaagaacaagctggaccctgagggcctgggcatcatcctgctgggccccttcctgcaggagttcttcccagaccagggcagcagcggccctgagagcttcaccgtgtaccactacaacggcctgaagcagagcaactacaatgagaaggtgatgtatgtggagggcacagctgtggtgatgggctttgaggaccccatgctgcagacagatgacacccccatcaagcgctgcctgcagaccaagtggccctacatcgagctgctgtggaccacagacaggagccccagcctgaactag

SEQ ID NO: 217516 - DNA, 1338 bp, Artificial Sequence
  derived and/or modified sequence
atgagcgagctgaccaaggagctgatggagctggtgtggggcaccaaatcttcgccgggcctaagtgacacaatcttttgtagatggacacagggcttcgtattttcagagagtgagggatctgccttggaacagtttgagggtgggccatgcgctgtgatagcgcccgtgcaggcattcttgctgaagaagctcctgttcagtagcgaaaaaagttcctggcgcgactgctccgaggaagaacagaaagagttactttgtcacacgctgtgcgatatactcgagtctgcatgttgtgaccattccggtagttattgccttgtttcctggttaaggggcaaaacgaccgaagagacagcgagcatcagtggctcacctgcagagtcttcgtgccaagttgaacattcttccgcccttgcggtcgaagaactaggcttcgaaaggttccacgccctaattcagaaacggagttttaggtcactcccggagttgaaggatgcagttctggatcaatactccatgtggggcaataaattcggggttctccttttcctgtattctgtgcttcttactaaaggcatcgaaaatattaaaaacgaaatcgaagacgccagcgagcctttgattgacccggtgtacggacacggtagtcagtccctgatcaacctcctgttgactggacatgctgtgagtaacgtgtgggacggagatcgcgaatgctcaggtatgaagctcctggggattcatgagcaggccgccgtcggctttctcactttaatggaagccctgagatactgcaaagtcggctcttacctcaagtcgccaaagttccccatatggattgtagggtctgagacacatctgaccgtattttttgccaaagatatggccctggtggcaccggaggccccctccgagcaagcccggcgagtgtttcagacatacgaccccgaagacaatgggtttatcccagactccctgctggaagatgtcatgaaagcactggatttagtcagcgatcccgagtatattaacctgatgaaaaacaaactggatcctgaaggtctaggaattatcctcctgggaccttttttgcaggagttcttccctgaccaggggtccagcgggccagagagcttcaccgtctatcattacaacgggctcaaacagagtaactacaatgagaaagtgatgtatgtggagggtacggctgttgtcatggggttcgaggatccaatgctccagaccgatgacacacctataaagcgctgtttgcagacaaagtggccctacatcgaattactttggacaacagataggtctccgagcttaaactag

SEQ ID NO: 217517 - DNA, 1338 bp, Artificial Sequence
  derived and/or modified sequence
atgtctgaattgaccaaggagctgatggagttagtgtgggggaccaagagttcgccaggtctctctgacacaattttctgtcggtggactcaaggatttgtctttagcgaaagtgaaggtagtgcccttgaacagttcgaaggaggcccatgcgccgtcatcgctcccgtccaggcttttttacttaagaaacttttgttctcttccgagaaatcaagctggagagattgcagcgaagaggaacagaaggaactgctctgtcacactctgtgtgatattttggagtctgcttgctgcgatcactccggcagctactgcctggtctcatggcttcggggaaaaaccaccgaagaaactgccagcatttcagggagccccgctgaatcttcctgccaggtggagcattccagcgctttggcagtagaggaactagggttcgagagattccatgcattgattcagaaaagaagttttagaagtctacctgagctgaaagacgctgttctggaccagtattctatgtgggggaacaaattcggggtgctgttgtttctttattctgtgcttctgacaaaaggtatcgagaacatcaaaaatgaaattgaggacgcctcagagcctcttatcgatccagtatatggacatggctcccagtctctcatcaatctcttattaaccggccacgctgttagtaatgtgtgggatggggaccgcgagtgttcaggaatgaagctactgggcatccacgagcaagccgctgttggttttcttactctaatggaagctctgcggtactgtaaggtcgggtcgtaccttaaatccccaaagtttcctatctggatcgttggttcagaaactcatttgacggtgttcttcgctaaggatatggcccttgttgcccctgaagccccttccgaacaagccaggagggtcttccaaacatacgaccctgaggataatggtttcataccggacagccttctggaggatgtcatgaaggccctcgacctggtctctgacccagagtatatcaatctcatgaaaaataagctcgacccagagggtctgggcatcatacttctaggaccctttctccaggaattctttccagaccagggctcctccggacccgagtccttcacggtatatcactacaatggtctgaagcagtccaattacaatgagaaggtgatgtatgtagaggggactgccgtggtcatgggttttgaggaccccatgctgcaaacggacgacacacccatcaagagatgtttacagacaaaatggccttatattgaactgctgtggacaacagaccgtagcccatccctgaattag

SEQ ID NO: 217518 - DNA, 2381 bp, Artificial Sequence
  derived and/or modified sequence
aagtggcaccagcacttccggtacggaaaactcgctgctgccccaacctggcttgacaggcttggtctctgcaagtggctctcagccccttcttctttcctgcctcaccttccaattcgtttgccgccgccgtcccgcagctgctgtttccggagttgccccttccccatgttccggggcaggagtccgcaaagcgaagatccgcccgccggttcctcatcatgtccgaactgactaaagagctgatggagctggtgtggggcaccaagagcagccccggtctctcggacaccattttctgccgctggacgcaagggtttgtgtttagtgaatcagagggatctgcattagaacagtttgaaggtggcccctgtgctgttattgcacctgttcaggcatttcttttgaagaagctcctgttttcttcggagaagtcttcttggcgggattgttcagaggaagagcagaaggaactcctttgtcataccttgtgtgatattttagaaagtgcttgttgtgaccactctggatcatactgcttggtttcatggttaagaggaaagacaactgaggaaactgctagtatttctgggagtcctgcagagtctagttgccaagtggaacattcttctgccttggctgtcgaagagcttggctttgagcgatttcatgcattaattcaaaaaagatcgttcagaagtttaccagaattaaaagatgctgtcttggaccagtattcaatgtggggaaataaatttggagtattgctttttctgtattctgtattactgacaaagggcattgaaaacataaaaaacgaaattgaagatgcaagtgaacccttgatagatcctgtatatggacatggcagccaaagtttaattaatctcctgctgacgggacatgctgtttctaatgtatgggatggtgatagagagtgctcaggaatgaaacttcttggtatacatgaacaagcagcagtaggatttttaacactaatggaagctttaagatactgtaaggttggttcttacttgaaatctccaaaattccctatttggattgttggcagtgagactcacctcaccgtattttttgccaaggatatggctttagttgcccctgaagctccttcagaacaagccagaagagtttttcaaacctacgacccagaagataatggattcatacccgattcacttctggaagatgtgatgaaagcattggaccttgtttcagatcctgaatatataaatctcatgaagaataaattagatccagaaggattaggaatcatattattgggcccatttcttcaagaattttttcctgatcagggctccagtggtccagaatcttttactgtctaccactacaatggattgaagcagtcaaattataatgaaaaggtcatgtacgtagaagggactgcagttgtgatgggttttgaagatcccatgctacagacagatgacactcctattaaacgctgtctgcaaaccaaatggccatacattgagttactctggaccacagatcgctctccttcactaaattaatttgtctaagtatttataaggaagatcttaataacagatgttgaaagaaggagtcaagactggcaattggctggattaagctaaacactggtatcactgattaactgtaaataacaattaaaaacacattttcagtgtttatgatatgtttaaattatttgtcctaaagctttatgttaaagattatcctattttaccccttcgtgtgaaatttactagcaaaattaagctttcatcaaagttcatcacttttgcattcagatacttggtcatttacttaccaaattacaaacgcaatactacagcatttgtatattaagtatcacagttactattgataaactacttttgggttttatttcattgaggcactttttttattgtttgaatgattccggcttgtaatatatcagcctctacaatgaaatgcagaagagttcatttttctaagatctgtttttcattagaaatattgacaaataacacattgtcaacctggatcctttgacaatttacttaactctggcatgttcacaaaaagtagaaactctaagagaccattaccatttattcacagatgtataggggatgtattctaaaaactgacagaaaagagaatctgatagtcaacactgttaacttttactgtgtaattgccaaatacacttttccaaatttgtcccaacagccctgtaagccagctttcttctatatttataaacacgataaatgcatgagaagatctgttattacattagtatattacgttatttattatgatcctagttgatggcctaaataaacacctttttctttaactgt

SEQ ID NO: 217519 - DNA, 1338 bp, Artificial Sequence
  derived and/or modified sequence
atgagcgagctgaccaaggagctgatggagctggtgtggggcaccaagagcagccccggcctgagcgacaccatcttctgcagatggacccagggcttcgtgttcagcgagagcgagggcagcgccctggagcagttcgagggcggcccctgcgccgtgatcgcccccgtgcaggccttcctgctgaagaagctgctgttcagcagcgagaagagcagctggagagactgcagcgaggaggagcagaaggagctgctgtgccacaccctgtgcgacatcctggagagcgcctgctgcgaccacagcggcagctactgcctggtgagctggctgagaggcaagaccaccgaggagaccgccagcatcagcggcagccccgccgagagcagctgccaggtggagcacagcagcgccctggccgtggaggagctgggcttcgagagattccacgccctgatccagaagagaagcttcagaagcctgcccgagctgaaggacgccgtgctggaccagtacagcatgtggggcaacaagttcggcgtgctgctgttcctgtacagcgtgctgctgaccaagggcatcgagaacatcaagaacgagatcgaggacgccagcgagcccctgatcgaccccgtgtacggccacggcagccagagcctgatcaacctgctgctgaccggccacgccgtgagcaacgtgtgggacggcgacagagagtgcagcggcatgaagctgctgggcatccacgagcaggccgccgtgggcttcctgaccctgatggaggccctgagatactgcaaggtgggcagctacctgaagagccccaagttccccatctggatcgtgggcagcgagacccacctgaccgtgttcttcgccaaggacatggccctggtggcccccgaggcccccagcgagcaggccagaagagtgttccagacctacgaccccgaggacaacggcttcatccccgacagcctgctggaggacgtgatgaaggccctggacctggtgagcgaccccgagtacatcaacctgatgaagaacaagctggaccccgagggcctgggcatcatcctgctgggccccttcctgcaggagttcttccccgaccagggcagcagcggccccgagagcttcaccgtgtaccactacaacggcctgaagcagagcaactacaacgagaaggtgatgtacgtggagggcaccgccgtggtgatgggcttcgaggaccccatgctgcagaccgacgacacccccatcaagagatgcctgcagaccaagtggccctacatcgagctgctgtggaccaccgacagaagccccagcctgaactag

SEQ ID NO: 217520 - protein, 712 aa, Artificial Sequence
  derived and/or modified sequence
MLKDYLSVAQDALRTQKELYHVKEQRLALALDEYVRLNDAYKEKSSSHTSLFSGSSSSTKYDPDILKAEISTTRLRVKKLKRELSQMKQELLYKEQGFETLQQIDKKMSGGQSGYELSEAKAILTELKSIRKAISSGEKEKQDLMQSLAKLQERFHLDQNIGRSEPDLRCSPVNSHLCLSRQTLDAGSQTSISGDIGVRSRSNLAEKVRLSLQYEEAKRSMANLKIELSKLDSEAWPGALDIEKEKLMLINEKEELLKELQFVTPQKRTQDELERLEAERQRLEEELLSVRGTPSRALAERLRLEERRKELLQKLEETTKLTTYLHSQLKSLSASTLSMSSGSSLGSLASSRGSLNTSSRGSLNSLSSTELYYSSQSDQIDVDYQYKLDFLLQEKSGYIPSGPITTIHENEVVKSPSQPGQSGLCGVAAAATGHTPPLAEAPKSVASLSSRSSLSSLSPPGSPLVLEGTFPMSSSHDASLHQFTADFEDCELSSHFADISLIENQILLDSDSGGASQSLSEDKDLNECAREPLYEGTADVEKSLPKRRVIHLLGEKTTCVSAAVSDESVAGDSGVYEAFVKQPSEMEDVTYSEEDVAIVETAQVQIGLRYNAKSSSFMVIIAQLRNLHAFLIPHTSKVYFRVAVLPSSTDVSCLFRTKVHPPTESILFNDVFRVAISQTALQQKTLRKNFTFVTAITHGVCLPLPVPMPSFA

SEQ ID NO: 217521 - protein, 1192 aa, Artificial Sequence
  derived and/or modified sequence
MPRRAGSGQLPLPRGWEEARDYDGKVFYIDHNTRRTSWIDPRDRLTKPLSFADCVGDELPWGWEAGFDPQIGVYYIDHINKTTQIEDPRKQWRGEQEKMLKDYLSVAQDALRTQKELYHVKEQRLALALDEYVRLNDAYKEKSSSHTSLFSGSSSSTKYDPDILKAEISTTRLRVKKLKRELSQMKQELLYKEQGFETLQQIDKKMSGGQSGYELSEAKAILTELKSIRKAISSGEKEKQDLMQSLAKLQERFHLDQNIGRSEPDLRCSPVNSHLCLSRQTLDAGSQTSISGDIGVRSRSNLAEKVRLSLQYEEAKRSMANLKIELSKLDSEAWPGALDIEKEKLMLINEKEELLKELQFVTPQKRTQDELERLEAERQRLEEELLSVRGTPSRALAERLRLEERRKELLQKLEETTKLTTYLHSQLKSLSASTLSMSSGSSLGSLASSRGSLNTSSRGSLNSLSSTELYYSSQSDQIDVDYQYKLDFLLQEKSGYIPSGPITTIHENEVVKSPSQPGQSGLCGVAAAATGHTPPLAEAPKSVASLSSRSSLSSLSPPGSPLVLEGTFPMSSSHDASLHQFTADFEDCELSSHFADISLIENQILLDSDSGGASQSLSEDKDLNECAREPLYEGTADVEKSLPKRRVIHLLGEKTTCVSAAVSDESVAGDSGVYEAFVKQPSEMEDVTYSEEDVAIVETAQVQIGLRYNAKSSSFMVIIAQLRNLHAFLIPHTSKVYFRVAVLPSSTDVSCLFRTKVHPPTESILFNDVFRVAISQTALQQKTLRVDLCSVSKHRREECLAGTQISLADLPFSSEVFTLWYNLLPSKQMPCKKNEENEDSVFQPNQPLVDSIDLDAVSALLARTSAELLAVEQELAQEEEEESGQEEPRGPDGDWLTMLREASDEIVAEKEAEVKLPEDSSCTEDLSSCTSVPEMNEDGNRKESNCAKDLRSQPPTRIPTLVDKETNTDEAANDNMAVRPKERSSLSSRQHPFVRSSVIVRSQTFSPGERNQYICRLNRSDSDSSTLAKKSLFVRNSTERRSLRVKRTVCQSVLRRTTQECPVRTSLDLELDLQASLTRQSRLNDELQALRDLRQKLEELKAQGETDLPPGVLEDERFQRLLKQAEKQAEQSKEEQKQGLNAEKLMRQVSKDVCRLREQSQKVPRQVQSFREKIAYFTRAKISIPSLPADDV

SEQ ID NO: 217522 - protein, 320 aa, Artificial Sequence
  derived and/or modified sequence
MPRLRVHGACLPTKSVLFLFYHRLTMLREASDEIVAEKEAEVKLPEDSSCTEDLSSCTSVPEMNEDGNRKESNCAKDLRSQPPTRIPTLVDKETNTDEAANDNMAVRPKERSSLSSRQHPFVRSSVIVRSQTFSPGERNQYICRLNRSDSDSSTLAKKSLFVRNSTERRSLRVKRTVCQSVLRRTTQECPVRTSLDLELDLQASLTRQSRLNDELQALRDLRQKLEELKAQGETDLPPGVLEDERFQRLLKQAEKQAEQSKEEQKQGLNAEKLMRQVSKDVCRLREQSQKVPRQVQSFREKIAYFTRAKISIPSLPADDV

SEQ ID NO: 217523 - protein, 1143 aa, Artificial Sequence
  derived and/or modified sequence
MPRRAGSGQLPLPRGWEEARDYDGKVFYIDHNTRRTSWIDPRDRLTKPLSFADCVGDELPWGWEAGFDPQIGVYYIDHINKTTQIEDPRKQWRGEQEKMLKDYLSVAQDALRTQKELYHVKEQRLALALDEYVRLNDAYKEKSSSHTSLFSGSSSSTKYDPDILKAEISTTRLRVKKLKRELSQMKQELLYKEQGFETLQQIDKKMSGGQSGYELSEAKAILTELKSIRKAISSGEKEKQDLMQSLAKLQERFHLDQNIGRSEPDLRCSPVNSHLCLSRQTLDAGSQTSISGDIGVRSRSNLAEKVRLSLQYEEAKRSMANLKIELSKLDSEAWPGALDIEKEKLMLINEKEELLKELQFVTPQKRTQDELERLEAERQRLEEELLSVRGTPSRALAERLRLEERRKELLQKLEETTKLTTYLHSQLKSLSASTLSMSSGSSLGSLASSRGSLNTSSRGSLNSLSSTELYYSSQSDQIDVDYQYKLDFLLQEKSGYIPSGPITTIHENEVVKSPSQPGQSGLCGVAAAATGHTPPLAEAPKSVASLSSRSSLSSLSPPGSPLVLEGTFPMSSSHDASLHQFTADFEDYVEKSLPKRRVIHLLGEKTTCVSAAVSDESVAGDSGVYEAFVKQPSEMEDVTYSEEDVAIVETAQVQIGLRYNAKSSSFMVIIAQLRNLHAFLIPHTSKVYFRVAVLPSSTDVSCLFRTKVHPPTESILFNDVFRVAISQTALQQKTLRVDLCSVSKHRREECLAGTQISLADLPFSSEVFTLWYNLLPSKQMPCKKNEENEDSVFQPNQPLVDSIDLDAVSALLARTSAELLAVEQELAQEEEEESGQEEPRGPDGDWLTMLREASDEIVAEKEAEVKLPEDSSCTEDLSSCTSVPEMNEDGNRKESNCAKDLRSQPPTRIPTLVDKETNTDEAANDNMAVRPKERSSLSSRQHPFVRSSVIVRSQTFSPGERNQYICRLNRSDSDSSTLAKKSLFVRNSTERRSLRVKRTVCQSVLRRTTQECPVRTSLDLELDLQASLTRQSRLNDELQALRDLRQKLEELKAQGETDLPPGVLEDERFQRLLKQAEKQAEQSKEEQKQGLNAEKLMRQVSKDVCRLREQSQKVPRQVQSFREKIAYFTRAKISIPSLPADDV

SEQ ID NO: 217524 - DNA, 2139 bp, Artificial Sequence
  derived and/or modified sequence
atgctgaaggactacctgagcgtggcccaggacgccctgagaacccagaaggagctgtaccacgtgaaggagcagagactggccctggccctggacgagtacgtgagactgaacgacgcctacaaggagaagagcagcagccacaccagcctgttcagcggcagcagcagcagcaccaagtacgaccccgacatcctgaaggccgagatcagcaccaccagactgagagtgaagaagctgaagagagagctgagccagatgaagcaggagctgctgtacaaggagcagggcttcgagaccctgcagcagatcgacaagaagatgagcggcggccagagcggctacgagctgagcgaggccaaggccatcctgaccgagctgaagagcatcagaaaggccatcagcagcggcgagaaggagaagcaggacctgatgcagagcctggccaagctgcaggagagattccacctggaccagaacatcggcagaagcgagcccgacctgagatgcagccccgtgaacagccacctgtgcctgagcagacagaccctggacgccggcagccagaccagcatcagcggcgacatcggcgtgagaagcagaagcaacctggccgagaaggtgagactgagcctgcagtacgaggaggccaagagaagcatggccaacctgaagatcgagctgagcaagctggacagcgaggcctggcccggcgccctggacatcgagaaggagaagctgatgctgatcaacgagaaggaggagctgctgaaggagctgcagttcgtgaccccccagaagagaacccaggacgagctggagagactggaggccgagagacagagactggaggaggagctgctgagcgtgagaggcacccccagcagagccctggccgagagactgagactggaggagagaagaaaggagctgctgcagaagctggaggagaccaccaagctgaccacctacctgcacagccagctgaagagcctgagcgccagcaccctgagcatgagcagcggcagcagcctgggcagcctggccagcagcagaggcagcctgaacaccagcagcagaggcagcctgaacagcctgagcagcaccgagctgtactacagcagccagagcgaccagatcgacgtggactaccagtacaagctggacttcctgctgcaggagaagagcggctacatccccagcggccccatcaccaccatccacgagaacgaggtggtgaagagccccagccagcccggccagagcggcctgtgcggcgtggccgccgccgccaccggccacaccccccccctggccgaggcccccaagagcgtggccagcctgagcagcagaagcagcctgagcagcctgagcccccccggcagccccctggtgctggagggcaccttccccatgagcagcagccacgacgccagcctgcaccagttcaccgccgacttcgaggactgcgagctgagcagccacttcgccgacatcagcctgatcgagaaccagatcctgctggacagcgacagcggcggcgccagccagagcctgagcgaggacaaggacctgaacgagtgcgccagagagcccctgtacgagggcaccgccgacgtggagaagagcctgcccaagagaagagtgatccacctgctgggcgagaagaccacctgcgtgagcgccgccgtgagcgacgagagcgtggccggcgacagcggcgtgtacgaggccttcgtgaagcagcccagcgagatggaggacgtgacctacagcgaggaggacgtggccatcgtggagaccgcccaggtgcagatcggcctgagatacaacgccaagagcagcagcttcatggtgatcatcgcccagctgagaaacctgcacgccttcctgatcccccacaccagcaaggtgtacttcagagtggccgtgctgcccagcagcaccgacgtgagctgcctgttcagaaccaaggtgcacccccccaccgagagcatcctgttcaacgacgtgttcagagtggccatcagccagaccgccctgcagcagaagaccctgagaaagaacttcaccttcgtgaccgccatcacccacggcgtgtgcctgcccctgcccgtgcccatgcccagcttcgcctag

SEQ ID NO: 217525 - DNA, 3579 bp, Artificial Sequence
  derived and/or modified sequence
atgcccagaagagccggcagcggccagctgcccctgcccagaggctgggaggaggccagagactacgacggcaaggtgttctacatcgaccacaacaccagaagaaccagctggatcgaccccagagacagactgaccaagcccctgagcttcgccgactgcgtgggcgacgagctgccctggggctgggaggccggcttcgacccccagatcggcgtgtactacatcgaccacatcaacaagaccacccagatcgaggaccccagaaagcagtggagaggcgagcaggagaagatgctgaaggactacctgagcgtggcccaggacgccctgagaacccagaaggagctgtaccacgtgaaggagcagagactggccctggccctggacgagtacgtgagactgaacgacgcctacaaggagaagagcagcagccacaccagcctgttcagcggcagcagcagcagcaccaagtacgaccccgacatcctgaaggccgagatcagcaccaccagactgagagtgaagaagctgaagagagagctgagccagatgaagcaggagctgctgtacaaggagcagggcttcgagaccctgcagcagatcgacaagaagatgagcggcggccagagcggctacgagctgagcgaggccaaggccatcctgaccgagctgaagagcatcagaaaggccatcagcagcggcgagaaggagaagcaggacctgatgcagagcctggccaagctgcaggagagattccacctggaccagaacatcggcagaagcgagcccgacctgagatgcagccccgtgaacagccacctgtgcctgagcagacagaccctggacgccggcagccagaccagcatcagcggcgacatcggcgtgagaagcagaagcaacctggccgagaaggtgagactgagcctgcagtacgaggaggccaagagaagcatggccaacctgaagatcgagctgagcaagctggacagcgaggcctggcccggcgccctggacatcgagaaggagaagctgatgctgatcaacgagaaggaggagctgctgaaggagctgcagttcgtgaccccccagaagagaacccaggacgagctggagagactggaggccgagagacagagactggaggaggagctgctgagcgtgagaggcacccccagcagagccctggccgagagactgagactggaggagagaagaaaggagctgctgcagaagctggaggagaccaccaagctgaccacctacctgcacagccagctgaagagcctgagcgccagcaccctgagcatgagcagcggcagcagcctgggcagcctggccagcagcagaggcagcctgaacaccagcagcagaggcagcctgaacagcctgagcagcaccgagctgtactacagcagccagagcgaccagatcgacgtggactaccagtacaagctggacttcctgctgcaggagaagagcggctacatccccagcggccccatcaccaccatccacgagaacgaggtggtgaagagccccagccagcccggccagagcggcctgtgcggcgtggccgccgccgccaccggccacaccccccccctggccgaggcccccaagagcgtggccagcctgagcagcagaagcagcctgagcagcctgagcccccccggcagccccctggtgctggagggcaccttccccatgagcagcagccacgacgccagcctgcaccagttcaccgccgacttcgaggactgcgagctgagcagccacttcgccgacatcagcctgatcgagaaccagatcctgctggacagcgacagcggcggcgccagccagagcctgagcgaggacaaggacctgaacgagtgcgccagagagcccctgtacgagggcaccgccgacgtggagaagagcctgcccaagagaagagtgatccacctgctgggcgagaagaccacctgcgtgagcgccgccgtgagcgacgagagcgtggccggcgacagcggcgtgtacgaggccttcgtgaagcagcccagcgagatggaggacgtgacctacagcgaggaggacgtggccatcgtggagaccgcccaggtgcagatcggcctgagatacaacgccaagagcagcagcttcatggtgatcatcgcccagctgagaaacctgcacgccttcctgatcccccacaccagcaaggtgtacttcagagtggccgtgctgcccagcagcaccgacgtgagctgcctgttcagaaccaaggtgcacccccccaccgagagcatcctgttcaacgacgtgttcagagtggccatcagccagaccgccctgcagcagaagaccctgagagtggacctgtgcagcgtgagcaagcacagaagagaggagtgcctggccggcacccagatcagcctggccgacctgcccttcagcagcgaggtgttcaccctgtggtacaacctgctgcccagcaagcagatgccctgcaagaagaacgaggagaacgaggacagcgtgttccagcccaaccagcccctggtggacagcatcgacctggacgccgtgagcgccctgctggccagaaccagcgccgagctgctggccgtggagcaggagctggcccaggaggaggaggaggagagcggccaggaggagcccagaggccccgacggcgactggctgaccatgctgagagaggccagcgacgagatcgtggccgagaaggaggccgaggtgaagctgcccgaggacagcagctgcaccgaggacctgagcagctgcaccagcgtgcccgagatgaacgaggacggcaacagaaaggagagcaactgcgccaaggacctgagaagccagccccccaccagaatccccaccctggtggacaaggagaccaacaccgacgaggccgccaacgacaacatggccgtgagacccaaggagagaagcagcctgagcagcagacagcaccccttcgtgagaagcagcgtgatcgtgagaagccagaccttcagccccggcgagagaaaccagtacatctgcagactgaacagaagcgacagcgacagcagcaccctggccaagaagagcctgttcgtgagaaacagcaccgagagaagaagcctgagagtgaagagaaccgtgtgccagagcgtgctgagaagaaccacccaggagtgccccgtgagaaccagcctggacctggagctggacctgcaggccagcctgaccagacagagcagactgaacgacgagctgcaggccctgagagacctgagacagaagctggaggagctgaaggcccagggcgagaccgacctgccccccggcgtgctggaggacgagagattccagagactgctgaagcaggccgagaagcaggccgagcagagcaaggaggagcagaagcagggcctgaacgccgagaagctgatgagacaggtgagcaaggacgtgtgcagactgagagagcagagccagaaggtgcccagacaggtgcagagcttcagagagaagatcgcctacttcaccagagccaagatcagcatccccagcctgcccgccgacgacgtgtag

SEQ ID NO: 217526 - DNA, 963 bp, Artificial Sequence
  derived and/or modified sequence
atgcccagactgagagtgcacggcgcctgcctgcccaccaagagcgtgctgttcctgttctaccacagactgaccatgctgagagaggccagcgacgagatcgtggccgagaaggaggccgaggtgaagctgcccgaggacagcagctgcaccgaggacctgagcagctgcaccagcgtgcccgagatgaacgaggacggcaacagaaaggagagcaactgcgccaaggacctgagaagccagccccccaccagaatccccaccctggtggacaaggagaccaacaccgacgaggccgccaacgacaacatggccgtgagacccaaggagagaagcagcctgagcagcagacagcaccccttcgtgagaagcagcgtgatcgtgagaagccagaccttcagccccggcgagagaaaccagtacatctgcagactgaacagaagcgacagcgacagcagcaccctggccaagaagagcctgttcgtgagaaacagcaccgagagaagaagcctgagagtgaagagaaccgtgtgccagagcgtgctgagaagaaccacccaggagtgccccgtgagaaccagcctggacctggagctggacctgcaggccagcctgaccagacagagcagactgaacgacgagctgcaggccctgagagacctgagacagaagctggaggagctgaaggcccagggcgagaccgacctgccccccggcgtgctggaggacgagagattccagagactgctgaagcaggccgagaagcaggccgagcagagcaaggaggagcagaagcagggcctgaacgccgagaagctgatgagacaggtgagcaaggacgtgtgcagactgagagagcagagccagaaggtgcccagacaggtgcagagcttcagagagaagatcgcctacttcaccagagccaagatcagcatccccagcctgcccgccgacgacgtgtag

SEQ ID NO: 217527 - DNA, 3432 bp, Artificial Sequence
  derived and/or modified sequence
atgcccagaagagccggcagcggccagctgcccctgcccagaggctgggaggaggccagagactacgacggcaaggtgttctacatcgaccacaacaccagaagaaccagctggatcgaccccagagacagactgaccaagcccctgagcttcgccgactgcgtgggcgacgagctgccctggggctgggaggccggcttcgacccccagatcggcgtgtactacatcgaccacatcaacaagaccacccagatcgaggaccccagaaagcagtggagaggcgagcaggagaagatgctgaaggactacctgagcgtggcccaggacgccctgagaacccagaaggagctgtaccacgtgaaggagcagagactggccctggccctggacgagtacgtgagactgaacgacgcctacaaggagaagagcagcagccacaccagcctgttcagcggcagcagcagcagcaccaagtacgaccccgacatcctgaaggccgagatcagcaccaccagactgagagtgaagaagctgaagagagagctgagccagatgaagcaggagctgctgtacaaggagcagggcttcgagaccctgcagcagatcgacaagaagatgagcggcggccagagcggctacgagctgagcgaggccaaggccatcctgaccgagctgaagagcatcagaaaggccatcagcagcggcgagaaggagaagcaggacctgatgcagagcctggccaagctgcaggagagattccacctggaccagaacatcggcagaagcgagcccgacctgagatgcagccccgtgaacagccacctgtgcctgagcagacagaccctggacgccggcagccagaccagcatcagcggcgacatcggcgtgagaagcagaagcaacctggccgagaaggtgagactgagcctgcagtacgaggaggccaagagaagcatggccaacctgaagatcgagctgagcaagctggacagcgaggcctggcccggcgccctggacatcgagaaggagaagctgatgctgatcaacgagaaggaggagctgctgaaggagctgcagttcgtgaccccccagaagagaacccaggacgagctggagagactggaggccgagagacagagactggaggaggagctgctgagcgtgagaggcacccccagcagagccctggccgagagactgagactggaggagagaagaaaggagctgctgcagaagctggaggagaccaccaagctgaccacctacctgcacagccagctgaagagcctgagcgccagcaccctgagcatgagcagcggcagcagcctgggcagcctggccagcagcagaggcagcctgaacaccagcagcagaggcagcctgaacagcctgagcagcaccgagctgtactacagcagccagagcgaccagatcgacgtggactaccagtacaagctggacttcctgctgcaggagaagagcggctacatccccagcggccccatcaccaccatccacgagaacgaggtggtgaagagccccagccagcccggccagagcggcctgtgcggcgtggccgccgccgccaccggccacaccccccccctggccgaggcccccaagagcgtggccagcctgagcagcagaagcagcctgagcagcctgagcccccccggcagccccctggtgctggagggcaccttccccatgagcagcagccacgacgccagcctgcaccagttcaccgccgacttcgaggactacgtggagaagagcctgcccaagagaagagtgatccacctgctgggcgagaagaccacctgcgtgagcgccgccgtgagcgacgagagcgtggccggcgacagcggcgtgtacgaggccttcgtgaagcagcccagcgagatggaggacgtgacctacagcgaggaggacgtggccatcgtggagaccgcccaggtgcagatcggcctgagatacaacgccaagagcagcagcttcatggtgatcatcgcccagctgagaaacctgcacgccttcctgatcccccacaccagcaaggtgtacttcagagtggccgtgctgcccagcagcaccgacgtgagctgcctgttcagaaccaaggtgcacccccccaccgagagcatcctgttcaacgacgtgttcagagtggccatcagccagaccgccctgcagcagaagaccctgagagtggacctgtgcagcgtgagcaagcacagaagagaggagtgcctggccggcacccagatcagcctggccgacctgcccttcagcagcgaggtgttcaccctgtggtacaacctgctgcccagcaagcagatgccctgcaagaagaacgaggagaacgaggacagcgtgttccagcccaaccagcccctggtggacagcatcgacctggacgccgtgagcgccctgctggccagaaccagcgccgagctgctggccgtggagcaggagctggcccaggaggaggaggaggagagcggccaggaggagcccagaggccccgacggcgactggctgaccatgctgagagaggccagcgacgagatcgtggccgagaaggaggccgaggtgaagctgcccgaggacagcagctgcaccgaggacctgagcagctgcaccagcgtgcccgagatgaacgaggacggcaacagaaaggagagcaactgcgccaaggacctgagaagccagccccccaccagaatccccaccctggtggacaaggagaccaacaccgacgaggccgccaacgacaacatggccgtgagacccaaggagagaagcagcctgagcagcagacagcaccccttcgtgagaagcagcgtgatcgtgagaagccagaccttcagccccggcgagagaaaccagtacatctgcagactgaacagaagcgacagcgacagcagcaccctggccaagaagagcctgttcgtgagaaacagcaccgagagaagaagcctgagagtgaagagaaccgtgtgccagagcgtgctgagaagaaccacccaggagtgccccgtgagaaccagcctggacctggagctggacctgcaggccagcctgaccagacagagcagactgaacgacgagctgcaggccctgagagacctgagacagaagctggaggagctgaaggcccagggcgagaccgacctgccccccggcgtgctggaggacgagagattccagagactgctgaagcaggccgagaagcaggccgagcagagcaaggaggagcagaagcagggcctgaacgccgagaagctgatgagacaggtgagcaaggacgtgtgcagactgagagagcagagccagaaggtgcccagacaggtgcagagcttcagagagaagatcgcctacttcaccagagccaagatcagcatccccagcctgcccgccgacgacgtgtag

SEQ ID NO: 217528 - DNA, 2139 bp, Artificial Sequence
  derived and/or modified sequence
atgttgaaagactacttgagcgtcgcccaggacgcactgcgaacccagaaggagttgtatcacgtcaaggaacagagacttgcgttggcacttgacgagtacgtcaggctgaatgatgcttataaagagaagagcagctcccacacatctctgttttccgggagttcatctagtaccaaatacgacccagatatcctgaaagcggagattagcacaacgcggctgagagtaaagaagttaaagcgggagttgtcacaaatgaaacaagagttactgtataaggagcaaggcttcgaaaccctccagcaaatagacaagaagatgagtggaggacagtccggttacgaattatccgaagccaaggctatcttgacggagctgaagagcatccgcaaggctatttcctcaggtgaaaaggaaaagcaagacctcatgcagagcctggcaaagttgcaggaacggttccacctagaccaaaacatcggaaggtccgagccagacctgaggtgctcacctgtcaacagccacctatgcttatctaggcagactctcgacgcggggagccagactagcatcagtggagatattggggtgcgctctaggtcgaacctagcagaaaaagtgcgtctgagtctccagtatgaggaagccaagaggagcatggctaacctcaagattgaactatccaaactcgactcagaggcttggcccggagccttggacattgaaaaagagaagctcatgctcatcaatgagaaagaagagctgctcaaggagttgcagttcgtcacaccccaaaagcgcactcaagacgagctggaaagactcgaggctgagcgacagaggctggaagaggagcttctctctgtgcgcggcactccctctagggcactggctgagcggttgaggctggaagagcggcgcaaggagctgctgcagaagctcgaggaaacaacgaaacttacaacctacctccactcacagttaaaaagtctcagcgcatccaccctatccatgagcagtggatcctccctggggtcactagcatcctctagagggtcactgaatactagctctaggggctccctgaacagcctgtcgtcaactgaattgtattacagttcacaaagcgatcagatcgatgtggactaccagtacaagttggattttctgctacaggaaaagagcgggtacattccctccggccccatcactaccatccacgagaatgaggtggtcaagtcaccttcacagcccggacagtctggcttatgcggagtggctgccgcggccacaggtcatacacctcctctggcagaggcgccaaaatctgtggcctccctgtcttcacgtagttctttaagctctttatcacctccaggatctcccctggttctcgaaggtaccttccccatgtcctcctctcacgatgcaagtctgcatcaatttacagccgattttgaggactgtgaactgtcaagccatttcgccgatatcagtctgattgagaatcagatactgctggacagcgattctggcggagcgagtcagtcactgagtgaagataaggatttaaacgagtgcgccagagagcccctgtatgagggaacggcagatgtggagaagagtctgccaaaacgacgagttatccacctgctcggagagaaaacaacttgtgtgtcagccgcggtttcagatgagtcggtggccggtgacagtggagtttatgaggcctttgtgaagcagccctccgaaatggaagacgtcacttactcggaggaggatgtagctatcgttgagacggctcaggtccagatcggcttgaggtacaacgccaaatcctcatccttcatggtgatcattgctcagttgcgcaatttgcatgcattcctcattccccacacttcgaaagtctacttccgggttgcagtgctaccttcctctaccgacgtgagttgtctctttagaaccaaggttcatccccctactgagagtatcctgtttaacgatgtcttcagagtggcgatcagccaaaccgcattacagcagaaaactctgcggaaaaatttcacatttgttaccgcaatcacacacggcgtctgcctacctctgccggtccctatgccaagctttgcatag

SEQ ID NO: 217529 - DNA, 3579 bp, Artificial Sequence
  derived and/or modified sequence
atgccacggcgagcagggagcggtcagctgccactcccccgcggctgggaggaggctagggattacgatggcaaggtcttctacattgaccacaacacccggagaacgagctggatcgatcctagggaccgattgaccaagcccctgtccttcgctgattgtgtgggagacgaacttccctggggctgggaggctggatttgacccgcaaatcggtgtttactacatagatcatattaataaaaccacacagattgaagatccccgcaaacagtggagaggagagcaggagaaaatgctgaaagattacctcagcgtggcgcaagatgctttgcgcacccagaaggagctctaccacgtcaaggagcagcgcctcgccttggctcttgatgaatacgtgaggctaaacgacgcctacaaagagaagagttcctcacatacaagtctgtttagcggctcctcatcatccaccaagtacgatcccgatatcctcaaagctgaaatttccacaactaggctcagggttaaaaagttgaagagggaactcagccagatgaagcaggagctgctgtataaagaacagggctttgaaacactgcaacagatcgataagaagatgagcggagggcagtcagggtacgagttgagcgaagcgaaggccatcctgactgaactgaaatccattaggaaggcaatctcctctggagagaaagagaaacaggacctgatgcagagcttggccaaattgcaggaacggttccacctcgatcagaacatcggtcgctctgagcctgatctccggtgctctcccgtaaactctcatctgtgtcttagcaggcagaccttggatgccgggagccaaacatctatcagtggtgacattggcgtgcgcagccgcagcaacctcgctgagaaagtgagactgtctctgcagtatgaagaagcaaaacgtagtatggctaacctgaagattgagctgtctaagctggattccgaggcttggccgggagcactagatatcgagaaagaaaaacttatgctgattaatgaaaaagaggaattgttaaaggagctgcaatttgtcacaccacagaaaagaacacaggatgagcttgagcgcttggaggcggagcgacagcgcctggaggaagaacttttatccgtgcgcgggacacccagtcgagctctggccgaacggctgcgcctggaggaacggcggaaggaactactacagaagctcgaggagacgacaaagctcaccacctacctccacagtcagttgaagagtctatctgcaagcactctctccatgagctccggatcaagtctcgggtccctggctagttctagaggctccttgaacacgtccagcaggggaagtctgaacagcctgtcatcgactgaactgtactattctagccaatctgatcaaatcgacgtcgactaccagtataaattggactttctccttcaggaaaagtcagggtacatcccatccgggcccattactaccatccacgaaaacgaggttgtgaagtcgcctagccagcccggacagtctgggctgtgtggggtggccgccgcagcgaccgggcacactccaccactggccgaagcccccaagtcagtggcctccctgtcctcaagatcctcacttagctcccttagtcctcctggatcgccgctcgtattggaaggcacatttccgatgtcatcatcccacgacgctagccttcaccaatttaccgcagactttgaggactgtgaactgagttcacatttcgccgacataagcctcatcgaaaaccagatcttgctagactctgatagcggtggagcttcacagtccctctctgaggacaaggatctgaacgagtgcgcccgtgaaccactgtatgagggcactgcagatgtcgaaaaatctctgcccaagcgccgggtaattcatctgctgggggaaaaaactacatgcgtgtcagccgcagtttcagacgaatctgtggccggggacagcggggtctacgaagctttcgtgaaacaaccttcagagatggaggacgtgacgtattctgaagaagatgtggctatcgtcgaaactgcacaggtccaaatcgggctgaggtacaacgcgaaatcgtcgtctttcatggtcattatcgctcagctgaggaacctgcatgcattcttgataccccacacatctaaggtatattttagagtcgccgtactgccttccagtaccgatgtgtcctgtctctttcgaaccaaggtgcacccacccaccgaaagtatcctgttcaatgatgtgtttcgcgttgcgatctcacagactgcactgcagcagaagacgctgagagtggacctgtgctccgtgtcaaagcatcgccgggaggagtgccttgcaggtacccagatatcgctggccgacctgcctttcagctctgaggtcttcacgctgtggtataatctcctgccatcaaaacagatgccttgcaagaagaacgaggaaaacgaggactcagtgttccagcccaaccagccactggttgatagcattgacctcgacgctgtgagcgccctgttggccagaaccagtgccgagcttttggctgtcgagcaggaactggctcaggaggaagaagaagagtcgggacaagaagagccacggggcccagacggcgactggctgaccatgctccgtgaggctagtgatgaaattgtcgcagaaaaagaagccgaagtcaaactgcctgaagattcgtcgtgcacagaggacctgagttcttgtacctccgtgccagagatgaacgaagacggtaaccgcaaagaaagcaattgcgctaaggatctgcggtctcaaccacccacccgaatccctaccctggtcgacaaagaaacaaacacagacgaggctgccaacgacaacatggctgtaagaccaaaggagcggtcttcccttagctctcggcagcatccttttgtgcgatctagcgttattgtacggagccaaaccttttcaccgggagagcgcaaccagtatatctgccgcctgaatagatcagactccgacagcagcaccctcgcgaaaaaatctctatttgttaggaatagcacagagcgtagatccttgcgcgtaaaacggactgtgtgtcagtctgtattgcgacgtaccacccaagagtgtccagtgagaactagcttggacctcgaactggatctccaggcaagcctcacccggcagtcgagactgaatgacgagctgcaagcactgcgggatctgcgccaaaaactcgaagagctgaaggcacagggggagaccgacctgccacccggtgtactggaagatgagaggttccaacgactgctaaaacaggccgagaaacaagctgagcagtctaaggaagaacagaaacaagggctaaatgcagagaagcttatgagacaggtgtccaaagacgtttgtagactgcgtgaacagagccagaaggtcccaaggcaggtgcagtcctttagggagaagatagcctactttactagggccaagatctccataccttccttgccagctgacgacgtgtag

SEQ ID NO: 217530 - DNA, 963 bp, Artificial Sequence
  derived and/or modified sequence
atgccccgccttagagtccacggagcctgtctccccactaagtcagtgctgttcctgttctaccacagactgacaatgctccgcgaagctagcgatgaaattgtcgcggagaaagaagccgaagtaaagctcccagaggattcctcctgtacagaagatctatcgtcctgcacttcagtccccgaaatgaacgaggacggaaatagaaaagaaagcaattgtgctaaggaccttcgctctcagcctcctaccagaatccccaccctcgtggataaggagaccaacactgatgaagcggccaatgacaacatggcggtgcgaccaaaggagagaagcagtctgtcctcccggcagcatccattcgttcgttcctccgtgatcgtccgctcgcaaacatttagccccggagagcgcaatcaatacatttgccgccttaacagaagcgactccgattcttccactttagcaaagaagtccttgtttgttagaaactctacagaaaggcgctcactgagggtgaagcggacagtctgtcagtccgtcctgcgtagaaccacccaggaatgtcctgtgagaacctctctggacctcgagctggatttgcaggcttcactcacgaggcagagcaggttgaatgatgagctgcaggctctgcgggacctgcgccagaaactcgaggagctcaaggcacagggcgagactgatttaccccctggcgtccttgaggacgaaaggttccagcgcctcctcaagcaggccgaaaagcaagctgagcagagcaaggaggaacagaagcagggattaaatgcagaaaagttgatgcgacaggtgtcaaaggacgtatgccggctgcgagagcagagccaaaaggttccacgtcaggtgcaatcctttagggagaagattgcgtatttcacccgcgcaaagattagcatccctagcctccctgcagacgacgtttag

SEQ ID NO: 217531 - DNA, 3432 bp, Artificial Sequence
  derived and/or modified sequence
atgcctaggagagcgggctctggccagctgcccctgcctcgaggctgggaggaggcacgggactatgatgggaaagtgttttatatcgaccacaacacaaggagaactagctggatcgatcctcgtgacagattgaccaaaccactgagtttcgctgactgcgtaggtgacgaactcccatggggttgggaagctggttttgatccccagattggagtatattatattgatcacattaataaaacaactcagattgaggaccctagaaaacaatggcggggcgagcaggaaaagatgttaaaggattatttgagtgtagcacaggacgccctgcgcacccagaaggagctctatcacgttaaggaacaacggctggcccttgcattagacgagtacgtacggcttaacgacgcctacaaggagaaatcttcatcccatacctccttattctcagggagctcatcctctacaaagtacgaccccgatattctgaaagcagaaatctctaccaccagactgagggtcaagaaattaaagcgggaacttagtcagatgaaacaggagctgctgtacaaagagcaggggtttgaaacacttcaacagatcgataagaaaatgtctgggggacaaagcggatatgagcttagtgaggctaaagccatactaactgaattgaaatccataaggaaagctattagttctggagagaaggagaagcaggacctgatgcagagtctcgccaagctacaggaacgctttcaccttgaccagaacattggcaggtcggagcccgacttacgctgttctccagtaaacagccacctgtgcctgagcaggcaaacactggatgctggttctcagacgtccatatcgggagatattggagttcgctctcggagcaacctggcggagaaggtccgcctgtccttgcagtatgaagaggccaagcgctcaatggcaaacttaaagatcgagttaagcaagcttgattcagaggcatggcccggcgccctggacatcgaaaaggaaaagttaatgctgatcaatgagaaggaagagctcctcaaggaattgcagttcgtgactccacagaaaagaacgcaagacgagctggagagactagaggccgaaaggcagcgactggaggaggagctgctgtccgtccgtggaacgccctcaagagctctggccgaacgcctgaggttagaagagcggaggaaggaactgttgcagaaactggaagagacgactaagctcactacttatctgcattctcagttgaaatcacttagtgccagtactctctctatgtcgtcaggctcttccctcggctcactcgccagcagcagagggagtttaaacacgagcagccgagggtctttgaactcactcagctctaccgagctgtattatagcagccagagcgaccagatcgacgtggattaccaatataagctggactttctgctacaagagaagtccggatatatcccttcagggccgattaccaccattcacgagaatgaagtggtcaagtctccttctcagcctgggcagagtggtttatgcggagtggctgctgcagccacaggccacaccccacctttggcggaggctccaaagagcgtcgcctcactctccagccggagctcattgagctctttaagtccaccaggctctcccttagttctggaaggtacatttccaatgtcttcctcccatgacgcctcacttcaccaatttacagccgacttcgaggattatgttgaaaaatctctgccaaaacggagagtcatacacctactcggtgagaagacaacatgcgtgagcgccgccgtatctgatgaatctgtggccggcgattcaggagtgtacgaagcatttgtgaagcagccgtccgagatggaggacgtcacctactctgaggaagacgtcgctattgtggagacagctcaggtacaaattggcctaaggtacaacgcaaaatcttccagctttatggtgattatagctcaactgagaaacctacacgccttcctcattccccataccagtaaagtttattttagggtggctgtgttacctagctccacagatgtctcctgcctgttccggacgaaggtccacccccccaccgagtcaatcctgttcaacgatgtcttccgggtcgcaatcagccagacagcccttcagcagaagacactgcgcgtagacctgtgctcagtgagtaagcatcgtcgggaagaatgcctagccggcacccagatctcactcgctgacctgcctttctccagcgaggtgtttactctatggtataatcttctccctagcaagcaaatgccctgcaagaagaatgaggagaatgaggattcagtgttccagccgaatcagccactagtggactccatagatctagatgccgtaagtgctcttctggcacggacgtccgcagagctcttagccgtggagcaagagcttgcccaggaagaagaagaagaatctggccaggaggagccaagggggcccgacggcgactggctgactatgctccgcgaagcttccgatgagattgttgcagaaaaggaagcggaggtaaaactccctgaagattcctcttgtaccgaagatttgagttcgtgtacctcagtcccggaaatgaacgaggacggcaacaggaaggagtccaactgtgccaaagacctccgatctcagccaccgacacgaatacccacccttgtcgacaaggaaactaacacagacgaggccgcaaatgacaacatggcagtgcgcccaaaagagcgatctagcttgtcctcccgccaacatccctttgtacgatctagcgtaattgtgcgttctcagaccttctcacccggtgaacgaaaccagtatatctgtcgcttaaatcgaagcgattcagactcatctaccctggccaagaagagcctgtttgtacgtaatagcacggaacgtcgaagcctgcgcgtaaagaggaccgtgtgtcaaagcgtgctacggcgcaccacgcaggagtgcccagtgcgcacctcccttgatctcgaactcgacctgcaagcatccttgactcgacagtcgaggctgaacgatgaattacaagctctgagggatcttcgccaaaagttggaggaactcaaggcccagggagagactgacttgccgcccggtgtgttggaggacgaacgttttcagcggctgctcaaacaagctgagaagcaggcagaacaatccaaagaagaacagaaacagggtctaaacgcagaaaagctgatgcggcaggtgagtaaagatgtgtgcagactgcgcgaacaaagccagaaagttccgcgccaggtgcaaagcttcagagagaagattgcttactttacacgtgctaaaatttcaatcccgagcttacctgccgatgatgtttag

SEQ ID NO: 217532 - DNA, 2139 bp, Artificial Sequence
  derived and/or modified sequence
atgctgaaggactacctgtctgtggcccaggatgccctgcggacccagaaggagctgtaccacgtgaaggagcagaggctggccctggccctggatgaatatgtgcggctgaatgatgcctacaaggagaagagcagcagccacaccagcctcttcagcggcagcagcagcagcaccaagtatgaccctgacatcctgaaggccgagatcagcaccacccggctgcgggtgaagaagctgaagcgggagctgagccagatgaagcaggagctgctgtacaaggagcagggctttgagaccctgcagcagattgacaagaagatgtctgggggccagagcggctatgagctgtctgaggccaaggccatcctgacagagctgaagagcatcaggaaggccatcagcagcggggagaaggagaagcaggacctgatgcagagcctggccaagctgcaggagcgcttccacctggaccagaacatcggccgctctgagccagacctgcgctgcagccctgtgaacagccacctgtgcctgagccggcagaccctggatgctggcagccagaccagcatcagcggggacatcggcgtgcgcagccgcagcaacctggccgagaaggtgcggctgagcctgcagtatgaggaggccaagaggtccatggccaacctgaagattgagctgagcaagctggacagcgaggcctggccaggggccctggacatcgagaaggagaagctgatgctgatcaatgagaaggaggagctgctgaaggagctgcagtttgtgaccccccagaagaggacccaggatgagctggagcggctggaggccgagcggcagaggctggaggaggagctgctgtctgtgcggggcacccccagccgggccctggccgagcggctgcggctggaggagaggaggaaggagctgctgcagaagctggaggagaccaccaagctgaccacctacctgcacagccagctgaagagcctgagcgccagcaccctgtccatgagcagcggcagcagcctgggcagcctggccagcagccggggcagcctgaacaccagcagccggggcagcctgaacagcctgagcagcacagagctgtactacagcagccagagcgaccagattgatgtggactaccagtacaagctggacttcctgctgcaggagaagagcggctacatccccagcggccccatcaccaccatccatgaaaatgaggtggtgaagagccccagccagcccggccagagcggcctgtgtggggtggccgccgccgccaccggccacaccccacccctggccgaggcccccaagtctgtggccagcctgagcagccgcagcagcctgagcagcctgagccccccaggcagccccctggtgctggagggcaccttccccatgagcagcagccatgatgccagcctgcaccagttcaccgctgactttgaggactgtgagctgagcagccactttgctgacatcagcctgattgagaaccagatcctgctggacagcgacagcggcggggccagccagagcctgtctgaggacaaggacctgaatgaatgtgcccgggagcccctgtatgagggcacagcagatgtggagaagagcctgcccaagagaagagtcatccacctgctgggggagaagaccacctgtgtgtctgctgctgtgtctgatgagagcgtggccggggacagcggcgtgtatgaggcctttgtgaagcagcccagcgagatggaggatgtgacctacagcgaggaggatgtggccatcgtggagacagcccaggtgcagatcggcctgcgctacaatgccaagagcagcagcttcatggtgatcatcgcccagctgaggaacctgcacgccttcctgatcccccacaccagcaaggtgtacttccgggtggccgtgctgcccagcagcacagatgtgtcctgcctcttccgcaccaaggtgcaccccccaacagagagcatcctcttcaatgatgtgttccgggtggccatcagccagacagccctgcagcagaagaccctgaggaagaacttcacctttgtgacagccatcacccacggcgtgtgcctgcccctgcctgtgcccatgcccagctttgcctag

SEQ ID NO: 217533 - DNA, 3579 bp, Artificial Sequence
  derived and/or modified sequence
atgcccaggagagctggcagcggccagctgcccctgccccggggctgggaggaggcccgggactatgatggcaaggtgttctacatcgaccacaacaccaggaggacctcctggattgacccccgggaccggctgaccaagcccctgagctttgctgactgtgtgggagatgagctgccctggggctgggaggccggctttgacccccagattggagtgtactacatcgaccacatcaacaagaccacccagatcgaggaccccaggaagcagtggagaggagagcaggagaagatgctgaaggactacctgtctgtggcccaggatgccctgcggacccagaaggagctgtaccacgtgaaggagcagaggctggccctggccctggatgaatatgtgcggctgaatgatgcctacaaggagaagagcagcagccacaccagcctcttcagcggcagcagcagcagcaccaagtatgaccctgacatcctgaaggccgagatcagcaccacccggctgcgggtgaagaagctgaagcgggagctgagccagatgaagcaggagctgctgtacaaggagcagggctttgagaccctgcagcagattgacaagaagatgtctgggggccagagcggctatgagctgtctgaggccaaggccatcctgacagagctgaagagcatcaggaaggccatcagcagcggggagaaggagaagcaggacctgatgcagagcctggccaagctgcaggagcgcttccacctggaccagaacatcggccgctctgagccagacctgcgctgcagccctgtgaacagccacctgtgcctgagccggcagaccctggatgctggcagccagaccagcatcagcggggacatcggcgtgcgcagccgcagcaacctggccgagaaggtgcggctgagcctgcagtatgaggaggccaagaggtccatggccaacctgaagattgagctgagcaagctggacagcgaggcctggccaggggccctggacatcgagaaggagaagctgatgctgatcaatgagaaggaggagctgctgaaggagctgcagtttgtgaccccccagaagaggacccaggatgagctggagcggctggaggccgagcggcagaggctggaggaggagctgctgtctgtgcggggcacccccagccgggccctggccgagcggctgcggctggaggagaggaggaaggagctgctgcagaagctggaggagaccaccaagctgaccacctacctgcacagccagctgaagagcctgagcgccagcaccctgtccatgagcagcggcagcagcctgggcagcctggccagcagccggggcagcctgaacaccagcagccggggcagcctgaacagcctgagcagcacagagctgtactacagcagccagagcgaccagattgatgtggactaccagtacaagctggacttcctgctgcaggagaagagcggctacatccccagcggccccatcaccaccatccatgaaaatgaggtggtgaagagccccagccagcccggccagagcggcctgtgtggggtggccgccgccgccaccggccacaccccacccctggccgaggcccccaagtctgtggccagcctgagcagccgcagcagcctgagcagcctgagccccccaggcagccccctggtgctggagggcaccttccccatgagcagcagccatgatgccagcctgcaccagttcaccgctgactttgaggactgtgagctgagcagccactttgctgacatcagcctgattgagaaccagatcctgctggacagcgacagcggcggggccagccagagcctgtctgaggacaaggacctgaatgaatgtgcccgggagcccctgtatgagggcacagcagatgtggagaagagcctgcccaagagaagagtcatccacctgctgggggagaagaccacctgtgtgtctgctgctgtgtctgatgagagcgtggccggggacagcggcgtgtatgaggcctttgtgaagcagcccagcgagatggaggatgtgacctacagcgaggaggatgtggccatcgtggagacagcccaggtgcagatcggcctgcgctacaatgccaagagcagcagcttcatggtgatcatcgcccagctgaggaacctgcacgccttcctgatcccccacaccagcaaggtgtacttccgggtggccgtgctgcccagcagcacagatgtgtcctgcctcttccgcaccaaggtgcaccccccaacagagagcatcctcttcaatgatgtgttccgggtggccatcagccagacagccctgcagcagaagaccctgcgggtggacctgtgcagcgtgtccaagcacagaagagaggagtgcctggccggcacccagatcagcctggccgacctgcccttcagcagcgaggtgttcaccctgtggtacaacctgctgcccagcaagcagatgccctgcaagaagaatgaggagaatgaagacagcgtcttccagcccaaccagcccctggtggacagcattgacctggatgctgtgtctgccctgctggcccggaccagcgctgagctgctggccgtggagcaggagctggcccaggaggaggaggaggagagcggccaggaggagccccggggcccagatggagactggctgaccatgctgcgggaggccagtgatgagatcgtggccgagaaggaggccgaggtgaagctgcctgaggacagcagctgcacagaggacctgagcagctgcacctctgtgcctgagatgaatgaagatggcaacaggaaggagagcaactgtgccaaggacctgcggagccagccccccacccgcatccccaccctggtggacaaggagaccaacacagatgaagctgccaatgacaacatggctgtgcggcccaaggagaggagcagcctgagcagccggcagcacccctttgtgcgcagctctgtgattgtgcgcagccagaccttcagccctggagagaggaaccagtacatctgccgcctgaacagaagtgacagcgacagcagcaccctggccaagaagagcctgtttgtgaggaacagcacagagcggcgcagcctgcgggtgaagaggacagtgtgccagagcgtgctgcggaggaccacccaggagtgccctgtgaggaccagcctggacctggagctggacctgcaggccagcctgacccggcagagccggctgaatgatgagctgcaggccctgcgggacctgcggcagaagctggaggagctgaaggcccagggcgagacagacctgcccccaggagtgctggaggatgagcgcttccagaggctgctgaagcaggccgagaagcaggccgagcagagcaaggaggagcagaagcagggcctgaatgctgagaagctgatgaggcaggtgtccaaggatgtgtgccgcctgcgggagcagagccagaaggtgccccggcaggtgcagagcttccgggagaagatcgcctacttcacccgggccaagatcagcatccccagcctgcctgcagatgatgtgtag

SEQ ID NO: 217534 - DNA, 963 bp, Artificial Sequence
  derived and/or modified sequence
atgccccggctgcgggtgcatggagcctgcctgcccaccaagtctgtgctcttcctgttctaccaccggctgaccatgctgcgggaggccagtgatgagatcgtggccgagaaggaggccgaggtgaagctgcctgaggacagcagctgcacagaggacctgagcagctgcacctctgtgcctgagatgaatgaagatggcaacaggaaggagagcaactgtgccaaggacctgcggagccagccccccacccgcatccccaccctggtggacaaggagaccaacacagatgaagctgccaatgacaacatggctgtgcggcccaaggagaggagcagcctgagcagccggcagcacccctttgtgcgcagctctgtgattgtgcgcagccagaccttcagccctggagagaggaaccagtacatctgccgcctgaacagaagtgacagcgacagcagcaccctggccaagaagagcctgtttgtgaggaacagcacagagcggcgcagcctgcgggtgaagaggacagtgtgccagagcgtgctgcggaggaccacccaggagtgccctgtgaggaccagcctggacctggagctggacctgcaggccagcctgacccggcagagccggctgaatgatgagctgcaggccctgcgggacctgcggcagaagctggaggagctgaaggcccagggcgagacagacctgcccccaggagtgctggaggatgagcgcttccagaggctgctgaagcaggccgagaagcaggccgagcagagcaaggaggagcagaagcagggcctgaatgctgagaagctgatgaggcaggtgtccaaggatgtgtgccgcctgcgggagcagagccagaaggtgccccggcaggtgcagagcttccgggagaagatcgcctacttcacccgggccaagatcagcatccccagcctgcctgcagatgatgtgtag

SEQ ID NO: 217535 - DNA, 3432 bp, Artificial Sequence
  derived and/or modified sequence
atgcccaggagagctggcagcggccagctgcccctgccccggggctgggaggaggcccgggactatgatggcaaggtgttctacatcgaccacaacaccaggaggacctcctggattgacccccgggaccggctgaccaagcccctgagctttgctgactgtgtgggagatgagctgccctggggctgggaggccggctttgacccccagattggagtgtactacatcgaccacatcaacaagaccacccagatcgaggaccccaggaagcagtggagaggagagcaggagaagatgctgaaggactacctgtctgtggcccaggatgccctgcggacccagaaggagctgtaccacgtgaaggagcagaggctggccctggccctggatgaatatgtgcggctgaatgatgcctacaaggagaagagcagcagccacaccagcctcttcagcggcagcagcagcagcaccaagtatgaccctgacatcctgaaggccgagatcagcaccacccggctgcgggtgaagaagctgaagcgggagctgagccagatgaagcaggagctgctgtacaaggagcagggctttgagaccctgcagcagattgacaagaagatgtctgggggccagagcggctatgagctgtctgaggccaaggccatcctgacagagctgaagagcatcaggaaggccatcagcagcggggagaaggagaagcaggacctgatgcagagcctggccaagctgcaggagcgcttccacctggaccagaacatcggccgctctgagccagacctgcgctgcagccctgtgaacagccacctgtgcctgagccggcagaccctggatgctggcagccagaccagcatcagcggggacatcggcgtgcgcagccgcagcaacctggccgagaaggtgcggctgagcctgcagtatgaggaggccaagaggtccatggccaacctgaagattgagctgagcaagctggacagcgaggcctggccaggggccctggacatcgagaaggagaagctgatgctgatcaatgagaaggaggagctgctgaaggagctgcagtttgtgaccccccagaagaggacccaggatgagctggagcggctggaggccgagcggcagaggctggaggaggagctgctgtctgtgcggggcacccccagccgggccctggccgagcggctgcggctggaggagaggaggaaggagctgctgcagaagctggaggagaccaccaagctgaccacctacctgcacagccagctgaagagcctgagcgccagcaccctgtccatgagcagcggcagcagcctgggcagcctggccagcagccggggcagcctgaacaccagcagccggggcagcctgaacagcctgagcagcacagagctgtactacagcagccagagcgaccagattgatgtggactaccagtacaagctggacttcctgctgcaggagaagagcggctacatccccagcggccccatcaccaccatccatgaaaatgaggtggtgaagagccccagccagcccggccagagcggcctgtgtggggtggccgccgccgccaccggccacaccccacccctggccgaggcccccaagtctgtggccagcctgagcagccgcagcagcctgagcagcctgagccccccaggcagccccctggtgctggagggcaccttccccatgagcagcagccatgatgccagcctgcaccagttcaccgctgactttgaggactatgtggagaagagcctgcccaagagaagagtcatccacctgctgggggagaagaccacctgtgtgtctgctgctgtgtctgatgaatctgtggccggggacagcggcgtgtatgaggcctttgtgaagcagcccagcgagatggaggatgtgacctacagtgaagaagatgtggccatcgtggagacagcccaggtgcagatcggcctgcgctacaatgccaagagcagcagcttcatggtgatcatcgcccagctgaggaacctgcacgccttcctgatcccccacaccagcaaggtgtacttccgggtggccgtgctgcccagcagcacagatgtgtcctgcctcttccgcaccaaggtgcaccccccaacagagagcatcctcttcaatgatgtgttccgggtggccatcagccagacagccctgcagcagaagaccctgcgggtggacctgtgcagcgtgtccaagcaccggcgggaggagtgcctggccggcacccagatcagcctggccgacctgcccttcagcagcgaggtgttcaccctgtggtacaacctgctgcccagcaagcagatgccctgcaagaagaatgaagaaaatgaagattctgtgttccagcccaaccagcccctggtggacagcattgacctggatgctgtgtctgccctgctggcccggaccagcgctgagctgctggccgtggagcaggagctggcccaggaggaggaggaggagagcggccaggaggagccccggggcccagatggagactggctgaccatgctgcgggaggccagtgatgaaattgtggccgagaaggaggccgaggtgaagctgcctgaggacagcagctgcacagaggacctgagcagctgcacctctgtgcctgagatgaatgaagatggcaacaggaaggagagcaactgtgccaaggacctgcggagccagccccccacccgcatccccaccctggtggacaaggagaccaacacagatgaggccgccaatgacaacatggctgtgcggcccaaggagaggagcagcctgagcagccggcagcacccctttgtgcgcagcagcgtcatcgtgcgcagccagaccttcagccctggagagaggaaccagtacatctgccgcctgaacagaagtgacagcgacagcagcaccctggccaagaagagcctgtttgtgaggaacagcacagaaagaagaagcctgcgggtgaagaggacagtgtgccagagcgtgctgcggaggaccacccaggagtgccctgtgaggaccagcctggacctggagctggacctgcaggccagcctgacccggcagagccggctgaatgatgagctgcaggccctgcgggacctgcggcagaagctggaggagctgaaggcccagggcgagacagacctgcccccaggagtgctggaggatgagcgcttccagaggctgctgaagcaggccgagaagcaggccgagcagagcaaggaggagcagaagcagggcctgaatgctgagaagctgatgaggcaggtgtccaaggatgtgtgccgcctgcgggagcagagccagaaggtgccccggcaggtgcagagcttccgggagaagatcgcctacttcacccgggccaagatcagcatccccagcctgcctgcagatgatgtgtag

SEQ ID NO: 217536 - DNA, 2139 bp, Artificial Sequence
  derived and/or modified sequence
atgctgaaggactacctgagcgtggcccaggacgccctgcggacccagaaggagctctaccacgtgaaggagcaacgtctggcactcgctctggatgagtatgtgcgcctgaacgacgcctataaagagaagagcagctcccacacttcactcttttcgggatcctccagctctacaaagtacgatccagatatccttaaagctgaaatatctactactcgcctgagagtcaagaagcttaagagggaactgtcccagatgaaacaagagctgctctataaggaacaagggtttgagactttacaacagatcgacaagaagatgtccggcggccagtccggctacgagctttccgaagctaaggctatcctgaccgaactaaagtcaatccgaaaggccatcagctctggagagaaggagaagcaggacctaatgcaatcattggcaaaactgcaggaacgatttcacctcgatcagaatatcggccgctctgagcccgacttgcgctgcagtcctgtaaatagccacctatgtctctcccggcaaacactcgatgctggttcacagacctctatttctggagacattggagtgcggtcccggtctaatctcgcagagaaggtgcggctctctctccagtacgaggaggctaagcgaagcatggccaacttgaagatagaactgtctaagttggacagtgaggcctggccgggcgcattggatatcgaaaaggaaaaactcatgcttattaacgagaaggaggaacttttgaaggaattacagttcgtcactccacagaagcgaacccaagatgaactggaacgcctggaagcagagagacagcgacttgaagaggaactcctatcagttaggggaacgccatcacgggccttagccgagcgcttgcggttggaggagaggagaaaagaactcctgcagaaactggaagaaacaactaagctgacaacttatctgcatagtcagctgaaaagcctctcagccagtacactgagcatgagttcgggttcttccctcgggagcttggcaagcagccggggatctctgaacactagttcacgcggcagtttgaattccttgtcttccacagagttgtattattcctcccagagcgatcagatagatgtggactatcaatacaagctggactttttactccaggagaagtctggttacatcccttctggtcctattaccaccatacatgagaatgaagttgtgaaatcaccctcgcagccaggccagtctgggctgtgcggcgtggcagcagccgcaacgggccatactccaccgttagccgaggcccccaagtctgtggcctccttaagctctagaagcagcctcagctccctctctccccccggctccccgctcgtcttagaaggcacatttcctatgagttcatcccacgacgcttcactacatcaatttaccgccgacttcgaggactgtgaactgagctctcattttgctgatatttctcttatcgagaatcagattttattagacagtgactccggcggggcatctcagtctctctcggaagacaaagacttaaacgaatgcgctagggagccgttgtatgaggggacggccgatgtggagaagagccttcctaagaggcgagtcattcacctgctgggcgagaagaccacttgtgttagtgccgccgtcagtgacgaatcagtggctggcgacagtggggtgtatgaagcattcgtgaaacagccttccgaaatggaagacgtgacatatagcgaagaggacgttgcaattgtggagaccgcacaggtgcagatcggccttcgatataacgccaaaagttcctccttcatggttattattgcacagctcaggaatttacatgcctttcttatccctcacacgtccaaagtgtactttagagtcgcagtgctgccgtccagcacggacgtgagctgtctgtttcggacaaaagtgcatccaccgacagagagtatccttttcaacgatgtgttccgcgtggctataagccagaccgccttgcagcaaaaaactctgcggaagaatttcacctttgtcaccgcaatcacacacggagtctgcctcccgttgccagtgccaatgccatccttcgcttag

SEQ ID NO: 217537 - DNA, 3579 bp, Artificial Sequence
  derived and/or modified sequence
atgccccggcgggccggcagcggccagctgcccctgccccggggctgggaggaggctcgagactatgatgggaaggttttttacattgaccacaacacacgaagaaccagctggatagacccacgcgaccggctgacgaaaccactgagcttcgccgattgcgttggtgacgagttaccgtggggatgggaggccggttttgaccctcaaatcggagtttattacatagaccacattaataagaccactcagatagaggacccaaggaagcagtggcggggcgagcaagagaaaatgcttaaggattatttgtccgtggcacaggacgccctgcggacacagaaagaactgtaccacgtgaaggaacagcggctggcactggcactagatgaatacgttagactgaatgacgcctataaagaaaagtctagctcacacacgtcccttttctcggggagttcttcatctaccaagtacgatccagatattctgaaggctgaaattagtactacacgtttgcgggtaaagaaacttaaacgggagctcagtcagatgaagcaggaacttctgtacaaggagcaaggattcgagaccctgcaacagatcgataagaagatgtcggggggccagagcggctacgagttgtccgaagccaaagccatcctaacagagttaaaatccatccgcaaggctatatcttcgggcgagaaagaaaagcaggatctgatgcaatctctggccaagctgcaggagcgattccatctggatcagaatattggaagaagcgagccggatttaagatgcagcccggtgaattcgcacctgtgtctgagtaggcagaccctggacgctggttctcaaacatccatttcaggcgacatcggagtgcggtctaggtctaatcttgctgaaaaagttcggttgagcttgcaatatgaggaggccaaacggagtatggctaaccttaaaatcgagctcagcaaactggactcagaggcatggccaggagccctagacatcgagaaagagaagctgatgttgattaatgaaaaagaagagctgctgaaggaactgcagtttgttactcctcagaagcgtacacaggacgagctagaacgcctcgaagcagagcgtcagcgcttggaggaagaactcttgtccgtgaggggaaccccgtcacgcgccttagcggaaaggttgcgactggaagaaaggcgcaaagagctgctgcaaaagctggaggagaccactaaactaacaacgtacctgcattcacagttaaagtccctgtccgctagcactttaagtatgtcctccggaagttcactgggctccctggcatcatctagagggtcactaaatacatcctccaggggatctctgaacagcttgtctagtaccgagctgtactactcttcccagtctgaccagatcgatgtcgattaccagtacaaactggatttcctcttgcaagagaaaagtggatatatcccttctggcccaatcactactatacacgaaaacgaagtggtcaagtctccctcccaaccaggccagtctggcctttgtggcgtggccgctgccgctaccgggcacacaccgccacttgccgaggccccaaaaagcgtggcgtctctatcaagccgctccagcctgagcagcctctccccacctggctcccctctggtgctggaagggacttttcccatgagctcgtcacatgatgcttcgcttcaccagtttacagccgattttgaagactgcgagctgagctctcattttgccgacatctcattgattgagaaccagatcctccttgattctgactccgggggagcttcgcagagtctgagcgaagataaagacctcaacgaatgtgctagggagcctttatatgaggggacagcagacgtggaaaaatccctacctaaacgaagggtgatccatcttctgggagagaagacaacctgcgtgagcgctgcggtttccgatgaatcagtggctggggatagcggagtctatgaggcctttgtgaagcagccgagcgaaatggaggatgtgacctacagtgaagaagacgtcgcgattgttgagactgcccaggtgcagattgggttgaggtataacgcaaaatccagcagtttcatggtgatcattgctcagcttaggaacttgcatgcttttcttatcccccacacaagtaaagtgtacttccgggtggccgtattgcccagttctacggacgtttcctgcttatttaggaccaaagttcacccaccaactgaatctattctttttaacgatgttttccgcgttgccatctctcagaccgccctccagcagaagaccctgcgggtcgatctgtgctccgtctccaaacacaggcgggaggaatgtttagctggcacccaaatctcacttgccgatctccccttcagctcagaggtcttcaccctttggtacaacttgctgccctctaagcaaatgccctgtaaaaaaaacgaggagaatgaagactctgtgtttcagccgaaccagccccttgtggacagcatcgatctggacgctgtgtccgctctgctggcccggacctcggccgagctcctggctgtggaacaggagctcgcacaagaggaagaggaggagtctggccaggaggaacccaggggtccagacggggattggcttaccatgctacgagaggcttctgacgaaatcgttgcggagaaggaggcagaagtgaaactgcccgaagacagttcctgtacggaggatctgtctagctgtacgtcagtgcctgagatgaatgaagacggcaatcgaaaggagagcaattgcgctaaggatcttagatcccaaccccctacaaggattccgacactggtggataaagagacaaatacagacgaagccgctaacgacaacatggctgttcgtcccaaggagcggtcatccctgagctcacgacagcatccattcgttagatcttctgttattgtgaggtcacagacattttcaccgggagaacgcaatcaatatatttgtcgcctcaaccggtccgactccgacagcagtaccctggccaaaaagagcctgtttgtcagaaactcaacggagcgccgaagcctgagggtcaaacgcactgtgtgccagtcagttctgagacgcacaactcaggaatgccctgtgcggaccagtctagatctcgagctggatttgcaggcatctctgacaagacagtccagattgaacgacgaactgcaggctctcagggatttacgtcagaagctggaagagctgaaggcccaaggagagactgacctgcctcccggcgtgctcgaagacgagaggttccagcgcctgctaaagcaggctgaaaagcaggctgagcagtcaaaggaggaacagaaacaggggttgaatgccgagaaactcatgcggcaagtgtctaaggatgtgtgccggctcagggaacagtcacagaaagtgcctagacaggtgcagtcatttcgtgagaagatcgcctattttactcgagctaagatctcaatccccagtctgcctgctgacgacgtatag

SEQ ID NO: 217538 - DNA, 963 bp, Artificial Sequence
  derived and/or modified sequence
atgccccggctgcgggtgcacggcgcctgcctgcccaccaagagcgtgttgtttctgttctatcatagacttaccatgctgcgtgaagccagcgatgagattgttgcagagaaggaggcggaagtcaagctgcccgaggattcctcttgcactgaagacctgagtagctgcactagtgtaccagagatgaacgaagacggaaaccgcaaagagtctaattgtgcaaaggatctgaggagccagcctcctactcggattccaaccttagtggacaaggagaccaatactgacgaagccgcgaatgataacatggctgttcggccaaaggaaagatctagcttgagtagtcggcaacacccttttgttagaagttctgtcatcgtgaggtctcaaacgttctctcctggagagcgcaaccaatacatctgccggctgaacaggagtgattcagattcctccactctcgccaagaagagtctgttcgttcggaattccaccgaacgtagatccctgagagttaagagaactgtctgtcaatccgtattgcggagaactactcaagagtgtcctgtgaggacgagtctcgatttagaattagacctgcaagcttcactaactcgacagagtcgccttaacgacgagctccaagccctgcgagatctccgacaaaaattggaggaactgaaggctcagggggaaaccgacttgccccccggcgtgcttgaggatgaaagatttcagcgccttctcaagcaggctgagaaacaagcggagcagagcaaggaggaacagaagcaaggattaaatgctgagaagttaatgcggcaagtttctaaagatgtttgtcgactgcgcgaacagtcgcagaaagttcctagacaggtgcagtcttttcgagagaaaatagcctacttcacacgcgctaaaatttccataccttcactgcctgctgatgacgtgtag

SEQ ID NO: 217539 - DNA, 3432 bp, Artificial Sequence
  derived and/or modified sequence
atgccccggcgggccggcagcggccagctgcccctgccccggggctgggaagaagcccgcgactatgacggtaaggttttttatatcgatcataacacccgaaggaccagttggattgaccctcgggatagactgacaaagccgctctccttcgccgactgtgtgggtgacgaactgccttggggctgggaagccggattcgatccacagattggcgtgtactatatagatcacatcaacaaaaccacacagatcgaggatccaaggaagcaatggaggggtgagcaggaaaagatgttgaaggactacctatccgtggcccaggacgctctgagaacccagaaagaactgtaccatgtgaaagaacagagactcgccctagctctggatgagtacgtcaggctgaatgacgcgtacaaggagaagtcgtcttcccacacaagcttgttctcgggtagttcaagttccacaaaatacgatccagatatactcaaagcagagatttctaccacccgtctacgggtaaagaagttaaaacgggagctaagccagatgaagcaagagctgctttacaaggagcagggcttcgagacacttcagcagatcgacaagaaaatgtccggaggacagagcggctacgaactgagcgaagctaaagccattttgaccgaactcaaatcaattagaaaagcaatcagcagtggggaaaaggagaagcaagatctgatgcagtccctggccaaattgcaggaaaggttccacctggaccagaatattggaaggagcgaacctgacttacgttgctctccggttaactctcacctgtgccttagtagacagacgctcgatgccgggtcccagacttccatttccggagacatcggggtcaggtctcggagtaacttggctgagaaggtaagactgtccctgcagtacgaagaagcaaaaagatctatggcaaatctgaagatcgagctgagcaagctcgactccgaggcttggcctggcgccctagacatcgagaaggagaagctgatgcttatcaatgagaaggaggagttattaaaagagctgcagtttgtgacaccacagaagagaacacaggacgaattggagaggcttgaggcagaacgccagagactcgaagaggagctgctgagtgtgcgagggaccccttccagagctctggccgaaagactgaggctagaagagcgtcgcaaggagctgctgcagaaacttgaagagactaccaaactgaccacgtacctgcactcacagctgaaaagtttatcagcatctaccctgtccatgtcaagtggctctagccttggctcacttgcttcctcccgggggtccctgaacacgtcctctagagggtctctgaactcgctaagcagcacagagctgtattactcttctcagtcggaccagatcgacgtcgactaccagtacaaacttgacttcttactgcaagagaaatcaggatacataccaagtggacctatcacaacaatccacgagaatgaggtcgtgaaatcaccatcacagccaggtcagtccgggctgtgcggcgtggctgcggctgctaccggccatactccacccctggctgaagctccaaagtcagttgcatctctcagctccaggagcagtttgtcatccctgtctccaccggggtccccactagttctcgagggcacctttccgatgagcagcagccacgatgcatccctccaccagtttacagcagatttcgaggattacgtcgagaagtcactaccaaaacggagagtgatccacctgctcggtgaaaagacgacctgtgtaagcgccgccgtgtcagatgaatctgtggcaggcgacagtggtgtgtacgaagccttcgttaaacagcccagcgagatggaagatgttacctacagtgaagaggacgtcgccatcgttgaaactgcacaggtgcagatcggcctccggtacaatgcgaagagttcaagctttatggttatcatagcacaactgcggaatttgcacgccttcttgataccacatacctccaaagtttacttccgagtggccgtgctccccagcagcacagacgttagctgcttgttccggacaaaagtgcacccacctaccgagagcattttgttcaacgatgtatttcgagtggccatatcacagacagccctgcagcagaaaaccctgcgggtggatctctgctcagtgagcaagcaccgaagagaggaatgcttggccgggacccagatttccctggctgacttgcctttcagcagcgaagtcttcacactgtggtataacctcctgccatctaaacagatgccctgcaaaaaaaacgaggaaaatgaggacagtgtatttcaacctaatcagccgctcgttgattcaattgatctagatgctgtgagtgccctcctggccaggaccagtgcggagctcctcgcagtggagcaggaactggcccaagaggaagaggaagaaagtggccaggaggagccaagggggcccgatggggattggctgaccatgctcagggaggccagcgacgaaattgtggctgaaaaggaggccgaggtcaagctgcccgaagattcctcttgcacggaggatttatcttcctgtacaagcgtgcccgagatgaacgaggacggtaatcgaaaggagagcaactgtgccaaggatctgagaagccagccacccacccggattcccaccctcgtcgacaaggaaaccaatacagacgaagccgccaatgacaacatggctgttagacccaaagagcgatcatctctgtcctccagacagcacccgttcgtccgttcttctgtcatagtccggagtcagactttttcacccggtgaacggaaccagtacatttgcaggctgaatagatctgattcagattccagtactctggccaagaaatctttgttcgtgcgcaactccaccgagcggcggagcttgcgggtgaagcggacggtctgtcagtcagtacttcgccgcacgacccaggagtgcccggtccgtacttcacttgacctcgagctcgatctgcaggccagtctcactcgccaatccagactcaacgacgagctccaggcattgcgggatctccggcagaaactagaggaacttaaggcgcaaggggagaccgatctgccacccggcgtgttagaggatgagcggttccagcggctcttaaaacaagcagagaagcaggcagagcagtctaaggaggagcagaagcagggactgaacgccgagaaacttatgaggcaagtgtctaaagatgtctgccggttacgagaacaatcccagaaggtccctagacaggttcaaagcttccgcgagaagatagcctattttactagggccaaaatcagcatccctagcctcccagccgatgacgtgtag

SEQ ID NO: 217540 - DNA, 2139 bp, Artificial Sequence
  derived and/or modified sequence
atgctaaaggattatctgagcgtggctcaggatgctctaagaacacagaaggagctgtaccatgtgaaagaacaacgtttagcactggccttggatgagtatgttcgcctgaatgacgcctataaagagaagtctagttctcatacaagtctgttctccggctcatcatcaagcactaaatacgaccccgatatccttaaggctgaaataagcaccacgcgcctgagagtaaaaaagctaaagagagaattgagtcaaatgaagcaggagctgctgtataaagagcagggttttgaaacattgcagcaaatcgataaaaagatgtccggcggacagagtggatatgagctcagcgaggccaaagccatcctgaccgaactgaagagtattcggaaagcaatctccagtggtgagaaagaaaagcaggatctgatgcagtcgttggcgaaattacaggaacgcttccacctcgatcaaaacattgggaggagcgaacccgatctccgctgtagccccgtaaattcccacctgtgtttgagtcgacagacgctggacgcaggctcccagacctctataagcggagacattggcgtcaggagccgcagcaatttagcggagaaggtgagattatctttgcagtacgaagaagctaaaagaagcatggctaaccttaaaatagagctctctaagctggactctgaggcctggccgggtgccctcgacatagaaaaggagaagttaatgcttatcaacgagaaggaagaactactgaaggaactccaatttgtgacaccacaaaaaagaacacaggatgaattggaacggcttgaagccgagcggcaaaggctggaagaagagcttctcagcgttcgcggaaccccatcccgagcactggcggagcgactgaggctggaggagaggcgaaaggaacttcttcagaaactggaggaaacaaccaagttgactacgtacttgcatagccagctcaaatctctgtcagcttccactctgagtatgagtagtggttcatcacttggttccctggcctcttccagggggagcttaaacacctctagtcgtgggagcctgaattcgctgtcctccaccgaactctactacagcagccagtcggaccagatcgacgtagattaccagtataaactggactttctcctgcaggaaaagtcgggctacatcccaagtgggccaattacaaccattcatgaaaacgaggtcgtgaagtcccccagccagccagggcagtccggcctgtgcggagtagcagctgccgctaccggacataccccccctctggccgaagcgcctaaatctgtcgcctctttgagttccaggtcctcgctgagctctctttctccccctggttctcccctggtactggaagggactttccccatgagcagctcccacgacgcatctctacaccaatttaccgccgattttgaagactgcgagctgagctctcacttcgctgacatcagtctgatagaaaaccaaattttgttggattcagatagcggcggagcttcccaatcgcttagcgaggacaaggatttgaatgagtgtgccagagaacccctatacgagggcacggccgacgtcgagaagtccctgccgaaaaggcgcgtcattcatctcctgggagaaaaaacaacctgcgtgagtgcagccgttagtgacgagtccgtggccggtgattctggagtctatgaggcatttgttaagcagccatctgaaatggaggatgtcacctacagtgaggaggatgtcgcaatcgtggaaaccgcacaggtacagatcggattgcgatacaacgcaaagtcatcctcgtttatggtgattattgcccagctcaggaacctgcacgctttcttgatcccacacaccagcaaggtctattttcgcgttgctgtcctgccctcatcaactgacgtcagctgcctgttccggaccaaggtgcatcctccgacagagtcaatcctgttcaacgacgtttttcgcgtcgcaatctcccaaacagcacttcaacagaagacactcagaaaaaatttcacctttgtcaccgcaataactcacggagtgtgccttccgctgcccgtgccaatgcccagcttcgcctag

SEQ ID NO: 217541 - DNA, 3579 bp, Artificial Sequence
  derived and/or modified sequence
atgccgaggcgcgctgggtcaggccaactccctttgccacgtggctgggaggaagccagggattatgacggtaaagttttctacatcgaccataataccaggcgtaccagctggattgaccccagggaccggcttaccaagccacttagcttcgcagattgcgtgggcgatgagctcccgtggggctgggaggccggttttgacccacagattggcgtatactacatagaccacatcaacaaaaccacacagatcgaagacccccgaaagcagtggagaggagaacaggagaagatgctgaaggactacctgagcgtagcgcaggacgcattgcgtacacagaaggagctgtaccacgtcaaggaacagcgtcttgccttagccctcgacgaatacgtccggctgaacgacgcctataaggaaaagagcagttcacatacttccctctttagcgggtcgtcttccagcactaagtatgaccccgatatactgaaagcggaaataagcacaacgagactaagggtcaagaagctcaaacgcgaactgagtcagatgaaacaggaactgctgtataaggaacagggctttgaaaccctgcagcagattgacaaaaagatgtctggaggacagtccggctacgaactatctgaagccaaagcaatactcactgagcttaaatctattcgtaaggctatttcttccggggaaaaggagaagcaggacctgatgcagtctttggcgaaactgcaggagaggttccatcttgatcagaatatagggagaagtgaacccgacctgagatgcagcccggtcaacagtcacctgtgccttagtcgccagaccttagatgcaggatcacagacgtccatctccggcgatatcggagttcgtagcaggtcaaatcttgctgagaaggttaggctgtccttgcagtacgaagaggccaagaggtccatggcaaacctgaagatcgaattatccaaactggattccgaagcctggcccggagccctggacatcgagaaggagaagcttatgctcataaatgaaaaggaagagcttctcaaggagctccagttcgtaaccccgcagaagagaactcaagatgagttagaaaggcttgaggcagagcgacagcgactggaagaggaactgctgtcagtgaggggaacccccagtcgggcactcgcagaacggttgcgacttgaggagcgcagaaaagagctgctgcagaagcttgaagagaccactaagttaacaacgtatctgcacagtcaattgaaatcactgagcgcatccaccctctccatgtcttctggctcttccctgggctccctggccagttcgcggggatccctgaatacttcctcacggggttctctgaactctcttagttctaccgagctgtactacagctctcagtccgatcaaatcgatgtggattatcagtacaaactcgacttcctattacaggaaaaatcaggatacatcccttccggaccaatcaccactattcatgaaaacgaggtggtgaagagcccctctcagcccggacagagcggcctttgtggggtggcggcagccgctacgggacacactccccctctggcggaggcacctaaatcggtggcgtccctatcgtctagatccagcttgtccagcttatccccccctggcagtccactggtcctggaaggcacttttccaatgagctcaagccacgacgccagtctgcatcagtttacagccgattttgaggattgcgagctgtcctcacacttcgcggacatctccctgattgagaaccagatcttgctggactccgattcagggggtgcctcccagtccctgtctgaggacaaagatttaaacgaatgcgccagggaacccctctatgagggcaccgcggatgtggagaagagccttcccaagaggagggttatccacttgcttggcgagaagactacttgtgtatcagctgcggtatccgatgaatcagtagctggagactccggggtgtatgaggcgtttgtcaagcaaccaagtgaaatggaggacgtgacatactccgaggaggatgttgccatcgtggaaaccgctcaagtccaaattggcttgagatacaatgccaagtcttccagctttatggttatcattgctcagctgcgcaatctgcatgcctttctgattcctcacacatccaaggtctactttcgcgtggcagtcctgccttctagcacagatgtttcgtgcctctttcggactaaggtgcatcccccaacggaatccattctgttcaacgacgtctttcgcgtcgctatttctcagactgctcttcagcaaaaaactctcagagtggatctttgctccgtatccaagcatcgcagggaagagtgtttggcgggtacacaaatatccctcgctgacttacccttctcatcggaagtgtttaccctgtggtataatcttctcccctccaaacagatgccgtgcaaaaagaatgaagagaacgaggactccgtttttcagcccaatcagccactggttgacagcatcgacttagacgccgtgagcgccctccttgccaggaccagtgctgagctgctagcagtggagcaggagctcgctcaggaggaggaggaggaatcggggcaggaggaaccacgcggacctgatggggactggctgacgatgcttagggaggccagcgacgagatcgttgctgagaaggaggctgaggttaagctcccagaagacagtagttgtacagaagatttatcttcttgtacatccgtcccagagatgaatgaggatggtaaccggaaggagagcaactgcgctaaagaccttcgctcccagccccctacacgcatacccacgctcgtggacaaagagaccaacacggacgaggcagcgaacgacaatatggcggtgaggcccaaagaacgctcttcgctcagcagcagacagcacccattcgttagatcctccgtgattgtgcggagccagaccttcagccccggtgagcgtaatcagtatatctgtcgcctcaataggtctgactctgatagctctaccttggcaaagaagagtctatttgtaagaaactccacagagcgacgatccctgcgcgtcaagagaaccgtgtgtcagagcgtcctgcggaggacaacccaggagtgccctgtgcgcacatctctagatttggagctggatcttcaggcttcactgaccaggcaatcccggctcaatgacgagctgcaagcactcagggatctgcggcaaaaactggaggagctcaaagctcagggggaaacagacctcccccctggcgtccttgaagacgagcgctttcaacgcctcttgaagcaggcggagaagcaagctgagcagagcaaagaagagcagaagcaaggattgaacgccgaaaaactgatgcgccaagtgtcgaaagacgtatgtcgactccgtgagcagtctcaaaaggttcctcggcaggtacagagcttccgcgagaagattgcatactttaccagggcaaaaatcagcatccccagtctaccggctgacgatgtgtag

SEQ ID NO: 217542 - DNA, 963 bp, Artificial Sequence
  derived and/or modified sequence
atgccacggctgcgggtgcatggcgcttgcttgccaaccaaaagcgtgctattcttgttctatcacaggttgaccatgctgcgggaagcatccgacgagattgtggcggaaaaggaggcagaggtgaagctccccgaagattcaagttgtacagaggatttgtcttcttgcacctcagtaccagagatgaacgaggatggaaatagaaaggagtctaattgtgcaaaagacctgaggagccagcctcccacaaggattccaacgcttgtggataaagaaaccaacacagatgaggctgccaacgacaacatggccgtgaggccaaaggaaagatcaagcctgtcctccaggcagcaccctttcgtgagaagttcagtaattgttagatctcagacattctcgccaggggagcgaaatcagtacatttgtaggttgaataggtcagatagcgatagtagcacactcgcaaaaaaatccttgttcgtgagaaatagtaccgaacgcaggtctctgcgcgttaaacgcactgtgtgccagagcgtgctacgtcggaccacacaggagtgccccgtgcgcacgtctcttgacttggagctggatttacaggcctcgcttactaggcagtccagacttaatgatgaacttcaagctctgagggatctccgacagaagttggaagagctcaaggcccaaggcgaaaccgatcttccccctggggtactggaggatgagcgcttccagagactgctgaaacaagctgaaaaacaggccgaacagtcaaaggaggaacaaaaacagggactgaacgcggaaaagcttatgagacaagtttctaaggacgtttgcaggctgagggaacagagccagaaagtgccaaggcaggtgcagagcttccgggagaagatcgcctattttacccgcgctaagattagcatcccttctctccccgcagatgatgtatag

SEQ ID NO: 217543 - DNA, 3432 bp, Artificial Sequence
  derived and/or modified sequence
atgcccaggcgagctggcagcggccagttgccccttccgaggggctgggaagaagccagagactacgacggcaaggtgttctatattgatcataacaccagaagaacaagctggatagatccgagggatcgacttactaaaccgttaagcttcgcagactgcgtgggagacgagctgccatggggatgggaagctgggtttgacccccagatcggcgtttactacattgatcacataaacaaaaccactcagatcgaggaccctaggaagcaatggagaggagaacaagagaagatgctgaaggactacctgtctgtcgcacaggatgctctcagaacccaaaaagagctctaccacgtgaaggagcagagattggctttggcccttgacgagtacgtgagactgaatgacgcttataaagaaaaaagttcctcacatacatcgctgttcagtggatcctccagcagtactaaatatgatccagacatattgaaggccgaaatcagtactacacggctgcgcgtaaagaaactcaagagggagctgtcacagatgaaacaggaacttctatataaggagcagggtttcgagacgctacagcagattgacaaaaaaatgtccggagggcaaagtggctacgagctgtcagaggccaaagcaattctaaccgagctgaagtcaatccgcaaggccatatcaagtggggagaaggaaaagcaggacttgatgcaaagtttagctaagttgcaagagcggtttcacctggatcaaaatatcggaagatccgagcctgatctgaggtgcagccccgttaatagccacttatgcctctcacggcagactctggacgcgggaagccaaacctcaatttctggcgatattggcgtgaggagccggtcaaatcttgccgaaaaagtgagactttcgctgcaatatgaggaagccaagaggtctatggccaacctgaagatagagttatccaaactcgatagcgaggcctggccgggagccctggacatcgagaaggaaaagcttatgctgattaatgagaaagaagagctgctcaaggaactgcagttcgtcacgccgcagaaacgcacccaggatgaactcgagaggctggaagccgagagacagcgcctcgaggaagaactgctctcagtcagagggacgccatctcgagccctggccgagaggttgcgattggaggagcggagaaaggagctgttacagaagttggaggaaaccacaaaattaacaacctacctccactctcaactgaagagtctcagcgctagcaccctttctatgtcttctggtagttctctgggaagtttagccagctcccggggaagcttgaacacaagttcccgcggaagcctcaactccctgtcatctacagaactgtattactcgtcacaatcagaccagatcgacgtagactaccagtataaacttgacttccttctccaggagaaatccgggtatattccgagcggaccaatcacaaccattcacgagaacgaggtagtgaagtccccatcacagcctggccagagcggcctctgcggcgtcgcagctgctgccacaggtcatactcccccactcgcagaggcgccaaagtccgtcgcaagcctatcatcccgatcctccctgtccagtctcagccctccaggcagccccctcgtgctggagggcactttccctatgtcctccagccacgatgccagtttgcaccagtttacagcagactttgaagactacgtggaaaaaagtcttcccaagaggcgcgtgatacacctgctgggagagaaaacgacgtgtgtcagcgctgccgtaagcgacgagtccgtagcaggcgactccggagtgtacgaggccttcgtgaagcaacctagtgagatggaagacgtgacctatagtgaggaagatgtggcaatcgtggagacggcccaggtccagattgggctgcgctataacgcaaaaagtagcagtttcatggtgatcatcgcacagctgagaaacctccacgcttttcttatcccccacactagtaaggtgtattttcgggttgctgtcttacccagttccacggatgttagctgcctgttcagaacaaaggttcacccccctacagagtccattctgtttaacgatgtgttcagagtcgccatcagtcagactgccttacagcagaaaaccctccgcgtggatttgtgttccgtgagcaagcaccgacgcgaggaatgcctggcagggacacaaatttcactggccgacctgcctttctcctcggaggtattcacactgtggtacaatttgctgccctctaaacagatgccttgtaagaagaacgaagagaatgaagatagcgtgtttcagccgaaccaaccactggtggactccatcgacttagacgccgtctcagccctcctcgcgagaacatccgctgagctcctggctgtagaacaagaacttgcccaggaagaggaggaagagtccggacaggaagaaccacgtggtccagacggggattggctgaccatgcttcgcgaagcctccgatgaaattgtggcagaaaaggaagccgaggtgaaactgcccgaagatagctcctgtacagaagacctaagcagttgcaccagcgtgccagagatgaacgaggacgggaatcgcaaggagagcaactgcgctaaggacctgcgctcccagcccccaacccggattcccaccttagtggacaaggagacaaacacagacgaggccgcaaacgataacatggcggtgcgtccaaaagagcgcagctcattaagtagtaggcaacaccccttcgtgcgaagctcagtaatcgtccgctcacagactttctcgcccggagagcggaaccagtatatttgccgtctgaatcggtctgatagtgattcttcaacgctagctaagaagtccctctttgtaagaaatagcaccgagagacgtagcctgagagtgaagagaaccgtgtgccagtcagtcctgcgacgcaccacccaggagtgcccagttagaacctctctggacctggagctggatctgcaggcatctctgaccagacaatcccgactaaatgatgagctgcaagcgctgagagaccttagacagaaactggaagaacttaaggcccagggcgagaccgacttgccaccaggcgtgttggaagatgaaagatttcaacgcctgctcaagcaagctgaaaaacaggcggaacagtccaaggaagagcaaaaacagggtctaaatgccgagaaactgatgaggcaggttagtaaggacgtctgcagactgcgggagcagtcgcagaaggttccacggcaggtgcagtcttttagagaaaaaatcgcttattttacgagggcaaagatcagcataccaagcctgcctgcagacgatgtctag

SEQ ID NO: 217544 - DNA, 2615 bp, Artificial Sequence
  derived and/or modified sequence
cgcgaacagcgtttcctgaggcacctcccgcgcgtggttccgccgcgccccgcgccctgcgcccctcagcccctcgccggcgcccgcgtcgcgggttggcagcctagcccggcagccgcgttcccgccgcgtcccgcgcccggtacctatggaggcgccgctcgccggcgaggccgccgaccatgcctaggagggccgggagcggtcagctgccgctgccccggggctgggaggaggccagggactacgacggcaaggtcttctacattgaccacaacaccaggaggaccagctggatcgacccccgggacaggttaacgaagcccttgtcatttgctgattgtgttggggatgagctgccgtggggatgggaagcagggtttgaccctcagattggtgtctactacatcgatcacatcaacaaaaccacgcagatagaagatccaagaaaacaatggaggggggaacaggagaagatgctcaaggactacctctctgtggcacaggatgccctccggacacagaaggaactgtaccatgtgaaggagcagaggctggcgctggccctggatgaatacgtgcgattaaatgatgcctataaggaaaagtcaagttctcacacaagcttattctcaggatcttcatccagtactaaatatgatcccgatattttaaaagctgagatctccactacaagattaagggttaaaaagctaaagagagagctctcacagatgaagcaggaactgctctataaagaacaaggctttgaaacattgcagcaaattgataaaaaaatgtctggaggccagagcgggtatgaactcagtgaagccaaagccattctaacagaactaaaatctatcagaaaggcaattagctcaggagaaaaagaaaaacaagatctgatgcagagtcttgctaagctgcaggagcggtttcatttggatcagaacattggcagatctgagccagatttgagatgtagtcctgtgaactctcatttatgtctctccagacagacccttgatgctgggtcacaaacaagcatttccggagatattggagtaagaagtagatcaaatttagctgaaaaggtcaggctaagcctacagtatgaagaagccaaaagaagtatggccaacttaaaaattgaactgtcaaaattggacagtgaggcctggcctggggcactggatattgagaaggaaaaactgatgctgattaatgaaaaagaagaacttttgaaagagcttcagttcgtcaccccacagaaacgtacccaagatgaattagaacgcctagaagctgaaaggcagcggctggaagaagagttgctgtctgtgaggggaacaccaagcagagctctggccgagagattgagattggaagagagaagaaaagagctgctacagaaacttgaagaaactactaaattaactacttatttgcattcacaacttaaaagcctctctgccagcaccctgtccatgtcatctgggagcagcctgggttccctggcatcgagtcggggctctctgaacacctccagcagagggtcactcaactccctcagttccaccgaactctattacagcagtcaaagtgatcagatagatgtggattatcagtataaactggacttccttctgcaagagaaaagcggttacattccttctggacccatcaccaccatccatgaaaacgaggtggtcaagtcccctagccagcctggccagagtggactctgtggagtggcagctgcagcaacaggccacactcctccactggctgaggccccgaagtctgtggcctccctgtcctcgaggtcctccctttcctccttgtctcctccaggctctcccttggttttggaaggcacgtttcccatgtcttcttctcatgatgcctctctccatcagttcactgctgactttgaagactgtgagttgagtagccattttgcagatatcagcctcatcgaaaatcagattttgctggattctgattcaggaggagcctcccagtctctttcagaggataaagaccttaatgaatgtgctagggagccattatatgaaggaactgcagatgtggaaaaatcattaccaaaaagaagagtgatccacttgcttggggagaaaaccacttgtgtgtcggctgctgtgtctgatgagtctgtggctggagacagtggggtctatgaagctttcgtgaaacaacctagtgaaatggaagatgtcacatacagtgaagaggatgtagccattgtagagaccgcccaggttcagataggactcagatacaatgcaaaaagttcaagtttcatggtgattatagcacagctccgaaaccttcatgccttcttgatacctcatacttcaaaagtatattttagggttgccgttcttccttcctcaactgatgtcagctgtctgtttcgcacaaaagttcatccgcccacagaatccattttattcaatgatgtgttcagagtcgccatttcccaaacagccttacaacagaagacactgaggaagaactttacctttgtgacagctatcactcatggagtgtgcttaccactcccagtaccaatgccaagctttgcgtga

SEQ ID NO: 217545 - DNA, 8826 bp, Artificial Sequence
  derived and/or modified sequence
ctgatccgcagcggggccgcgaacagcgtttcctgaggcacctcccgcgcgtggttccgccgcgccccgcgccctgcgcccctcagcccctcgccggcgcccgcgtcgcgggttggcagcctagcccggcagccgcgttcccgccgcgtcccgcgcccggtacctatggaggcgccgctcgccggcgaggccgccgaccatgcctaggagggccgggagcggtcagctgccgctgccccggggctgggaggaggccagggactacgacggcaaggtcttctacattgaccacaacaccaggaggaccagctggatcgacccccgggacaggttaacgaagcccttgtcatttgctgattgtgttggggatgagctgccgtggggatgggaagcagggtttgaccctcagattggtgtctactacatcgatcacatcaacaaaaccacgcagatagaagatccaagaaaacaatggaggggggaacaggagaagatgctcaaggactacctctctgtggcacaggatgccctccggacacagaaggaactgtaccatgtgaaggagcagaggctggcgctggccctggatgaatacgtgcgattaaatgatgcctataaggaaaagtcaagttctcacacaagcttattctcaggatcttcatccagtactaaatatgatcccgatattttaaaagctgagatctccactacaagattaagggttaaaaagctaaagagagagctctcacagatgaagcaggaactgctctataaagaacaaggctttgaaacattgcagcaaattgataaaaaaatgtctggaggccagagcgggtatgaactcagtgaagccaaagccattctaacagaactaaaatctatcagaaaggcaattagctcaggagaaaaagaaaaacaagatctgatgcagagtcttgctaagctgcaggagcggtttcatttggatcagaacattggcagatctgagccagatttgagatgtagtcctgtgaactctcatttatgtctctccagacagacccttgatgctgggtcacaaacaagcatttccggagatattggagtaagaagtagatcaaatttagctgaaaaggtcaggctaagcctacagtatgaagaagccaaaagaagtatggccaacttaaaaattgaactgtcaaaattggacagtgaggcctggcctggggcactggatattgagaaggaaaaactgatgctgattaatgaaaaagaagaacttttgaaagagcttcagttcgtcaccccacagaaacgtacccaagatgaattagaacgcctagaagctgaaaggcagcggctggaagaagagttgctgtctgtgaggggaacaccaagcagagctctggccgagagattgagattggaagagagaagaaaagagctgctacagaaacttgaagaaactactaaattaactacttatttgcattcacaacttaaaagcctctctgccagcaccctgtccatgtcatctgggagcagcctgggttccctggcatcgagtcggggctctctgaacacctccagcagagggtcactcaactccctcagttccaccgaactctattacagcagtcaaagtgatcagatagatgtggattatcagtataaactggacttccttctgcaagagaaaagcggttacattccttctggacccatcaccaccatccatgaaaacgaggtggtcaagtcccctagccagcctggccagagtggactctgtggagtggcagctgcagcaacaggccacactcctccactggctgaggccccgaagtctgtggcctccctgtcctcgaggtcctccctttcctccttgtctcctccaggctctcccttggttttggaaggcacgtttcccatgtcttcttctcatgatgcctctctccatcagttcactgctgactttgaagactgtgagttgagtagccattttgcagatatcagcctcatcgaaaatcagattttgctggattctgattcaggaggagcctcccagtctctttcagaggataaagaccttaatgaatgtgctagggagccattatatgaaggaactgcagatgtggaaaaatcattaccaaaaagaagagtgatccacttgcttggggagaaaaccacttgtgtgtcggctgctgtgtctgatgagtctgtggctggagacagtggggtctatgaagctttcgtgaaacaacctagtgaaatggaagatgtcacatacagtgaagaggatgtagccattgtagagaccgcccaggttcagataggactcagatacaatgcaaaaagttcaagtttcatggtgattatagcacagctccgaaaccttcatgccttcttgatacctcatacttcaaaagtatattttagggttgccgttcttccttcctcaactgatgtcagctgtctgtttcgcacaaaagttcatccgcccacagaatccattttattcaatgatgtgttcagagtcgccatttcccaaacagccttacaacagaagacactgagggtagacctttgctctgtcagtaaacaccgaagggaagaatgcctggctggaactcagatcagcctggcagatttaccattttccagtgaggttttcactctatggtataacttgcttccttccaagcaaatgccttgcaaaaagaatgaagaaaatgaggactctgtatttcaaccaaaccagccgttagtagattctatagacttggatgcagtgtcagccttacttgcaagaacatcagctgagttgttagctgtggaacaagaattagcacaagaagaagaagaagaatcaggacaagaagagccaaggggcccagatggagactggctaacaatgctaagagaggcctctgatgaaattgtggctgaaaaagaggctgaagttaaattgccagaggacagtagctgtacagaagatttaagttcatgcactagtgtgcctgagatgaatgaagacgggaacaggaaagaaagcaactgtgccaaagacctcagaagtcagccacctactagaataccaacactggttgacaaagagacaaacactgatgaagccgctaatgacaatatggcagttcgccccaaagagcgcagcagcctgagctctagacagcatccgtttgtgaggagcagtgtgatagtgcgctcacagaccttttctccaggagagcggaaccagtacatctgcaggttaaatcggagtgacagtgacagttcaaccctggctaaaaaatcactgtttgtgagaaactccaccgaacgccgcagtttgagggtcaaaaggacggtttgccagtcagtccttagaagaacaacacaggaatgcccagtgcggacatctctagacttagaactggaccttcaggcatctctgacccggcagagccgcctcaatgatgagctgcaggcgctgagggacttgcggcagaagctggaggaactgaaagctcagggagagactgaccttccaccaggcgtgctggaggatgagaggttccagaggcttctgaagcaagctgagaagcaggctgaacagtccaaagaagagcagaagcaaggtctgaatgcagagaagttgatgaggcaagtctccaaggacgtgtgtcggctccgggagcagagccagaaggtgcctcggcaggtgcagtccttcagggagaagattgcctacttcaccagagcaaagataagcatcccatccctgccagctgatgatgtgtgattacatgacttaagaaattattttttcatctgttcactttcttagggagggtaaaagactgaagatttgtgtttttgttttggtgtttggttttttttggtaacgtaactgtcaactcttgaagaacttttatttcacatcagattttcaacacattaatttgtaaagtaccttgagtgtaatttttatatgcttaaaaaagaaaaaatcatataagaaagatgggataacctggtacacaaatgttgcccagtatgtgcgcattgccagtggacttcattttgtaaaaatggaatagaggcagtaccccacatgtgtactgttgagccggctgttgagaaacaacttggttcagccggtggttttgcttctcctttgtgttcctgtgagtaggctgtgccgatggcagcagcgccacgtggtatctgtgcgctggcgaggagaggagcgctttccatttggaggcagtgtgagcacacgctggagtgcagcgttccaaagtccgcccgaaatggatgctgcgtccacggccatcacctgtgcgggaacacctggtttccttaagacaatttcctttttgtccttttatatttttctaaagaaaactaagatataaactaccaagtgctcttaagaataaaaataagaataagaatacaaaggagcactactcttggctacacgaaagatcttgggattcatgacactgagggcagggagaagaaagaacaccagccacgcagagatacaaataagctcatcaaatgagcagctggtttgtctcactcagcctgaatttgcattaagtgttcaaaagtgagtttctggcttgcactagtgttttgccctaaatctaaggatggtgcctagtggtggccctgtgttctgaggacagagagagctggaggggtggagggaaatgcatcggcactcatttggtgtaaccaagaagagggggaaagatgtcttgatagaatcaaagttgccaaaaacaaagaagagtttatcaagcagatttctaacatttagtagaaactacttcatagctctcatttttagggggttctatctataatttatggtaaatagttgggaggcaaagggaagaatgtgtgtggggggattattaatttgaagtataagctaaattgtttattaaaaagcctattttggatgaacaagtttagagagataaactgactaatgtgtcctccagtttagaatttcaccttacccgacccaggcacttcttaaaaacacagatcctcagtgcagctctgccagcatcaaggcttttaaaatatgtagtatttaggccatttaaaccatacttattactcaataacccaagaaacaattttgggttagccatctaatatagcaaataaaatagattttttaaagaaatccaaaattgtcttaaaggaatggaccccttgaagaaaaaaaaaaaaagttttgttcctcagttagaatgctcactagctcactagcaagaatttttattttcttgaaagcaattatatatattttggaaagttcatgttattggaattgaagttcaaattaagcaacttctgagcctagaactttaattactttttcctaaatgtcccaacacttacatacaaatttctttgaagacataactggacatggcagacactgctttgaacaaaaaccagcctagtgaattgactgagtacagtcctttaaggctgcccagttcattctattagatgactaaggaaaactagaaaaagaatacagttcacccttgtcaaggtcaaatgtgaaagacagaagtttatttaatgtagaggtaaatgaaggtgagctgttttcagcatcttagtttgaccatgaaaatgtctatagaattatgtgtagttgttccgtacgattttattttcttcatttatttatttacagtcttatttatgttctgtttaatatatagtttgattctggccattttaaatatttgacacagaagagactatattggaatatttacagctttataagtctttcatcagattagctgttgactttttgtaatacaaaaagtttcagacaagtattaaagaataaaatctgtctcaggctggtagttagcagttgtgaccaagatgcttttggttgttgtatttcacaaaatttcctcatttctaacatgagagatgaacttattttaatataatcctttttctacactttaaaagtcagcaatagtgttatgtatttataggcagcttttaataatcttgtcatatttgtactaacccaaatgattcacagtgacaaaacattttaataacttgatcacaaaaccatatggacaaatatgaattttaatattataaatactatttttaaaaggtagaatttattcgcacagggtaaaaagaatgtaatatttagttctcaagtttgaattatcagtatattattacaattttgtatatcagaatcttaagtgttacaggtacaaaaagaatattgctagccaaatgaacaaagtttagctaaatctctgtagcatgcaaatcaaataaattaaaattttttgctattgctttatctatattgtcttaaatatcaaaagctcaggactgaacttaatatttaatcaggttaaattctgaacatgtttctgttttaatttgtcttgtttgtaaacgtatgcaaatacatcacatagattaactggtttctgcactttccatgtgtttgtgggtggaaaaaaattcagtggttttttttaaaaaaaaaagcaaaaacaaagctacatattgcctaatactctatttcagtgtcgtttattgttcagtttatttccctgattggcacaaacacaagagtttccttgaaccatgtaccaagcaaatacaaaatatttcatgaagaaatccccaggctggcagtttgtgatgaatagttcttgttggaactatatgtattgctgataaaaaaggacgaagtattttcattgagcaaataaaatgaagggctccagaatatgtgctctgtggtcgctgcgcctgggctggcagtgtgctccacagagaggcagccgtcccaggaggttatctacccacacaccccagtcctgccctgccgtgccccccacaggctgctcagtgcctgggaagccagaaacgctgcccgtgaaatacagaacacaggatgcagaagcacgtttgtgtggcagagtctacttgaatcatccaaaacccaagatcgccctcctgcctctgacagtatagaaggcgtgactgaatgtggctgccttttgaaaaaggttccatagagacactgaggtctctgattcagaaggagatgatgtgtctacacctttcacctctgaagcttctaaagagctagtaattattttatataataagacgtcatgcattttaaataaatatgcaacaagacctcaggcttattatactaggttatcttaaacacctgaaataagtaaatgatttgccaaatgattccgctccatatgaataataccttcaaagatacatagagattaatgttttatttaccacttctgtgcaatcgctattttaaaattgagaaaactcatccacagtaatgggtgtcattactattcagtcttgattgattttggtctcagactagaagataaaaatggtttaccagtcttggaaagaaactatagtttaatagccacaggaaaagatgcattttcaaaaatcaaaagcacagtgagatgactagagcgggacatcctaccaaatccagtgttgagcaagcgtctcctgaacagcagacgcttgtcctttctggcttagtgtttcaggttggtgtttctcgtctccagttcttgatgatgatcttgtgtttgtgccactgcgtagtggcccgaagctaggggagcgtggctggagcaggctgcacagtggagcagacaccctcctagcagaagagaaagtccagcaaaccagcccagaaacagggcctccccaaactcccacctggggacaaagtctgggacgttctcatcccagaactcctgaaccgtcttgtgggcaacccaagagacgggaaccagggctgtgactcccgaggcccaggacagaattcctcccaggatcagcagtcgcctcttgagatctctctgactctctccaattctcaaacagtccaggccaaacccagagaccagcaggcccagaaatcccagcccatttgacagaaacattaagatcctggagaccctgagttcagcaggcaaagccaggaaggagtcaaagtccttgcattgcatccccacttcctcttggatgacacaggtttgccagagtcccatggtccagttttccatttcatttaagtccaggttgaggttcttccagtgtggcaggtagtttgtaagacaggataaaacccatcccagcaaagataatgaaactccagctagttgagctacagttctaaatactaaagccattataatgtcctgagagctttagccaaactaactcctgcccttcggttgctgtgaaaagaagtgtgacacttgtgttataacttatgaaactcagaaatatttcttcattgtgtatataggaggattcttgccagagttgctattgtttgattccatgttgaatgggtttcacaaaaggatagggaaataatgccgccaaccagtaatgccaaggtgtggccaagattgtgtttgtgtcctgtgggctggatttgacagaaagcagtttgtcactgaaatataattaagtgataatctcctttcattgtcaaggttaaaatggctttcatgttattcccaacctttctaacaaagaattaagtctaaatgcaaaatgtttaactgatggttttggttcaactcctcctgctttgtgtttcactaactgcacctgtcagattttcatctcttatagttctcacatttcaaatgtgcatgttatggtaatactgagtgttattttttaaaaataggtttaagaaaagtatttcttaaccaaataaatcaatcttatcagaaa

SEQ ID NO: 217546 - DNA, 1216 bp, Artificial Sequence
  derived and/or modified sequence
tgagtctgtttatttcccagataacaacttagcatgcccaggttgcgtgttcatggagcatgcctgcctaccaaaagtgttttgtttttgttttaccataggctaacaatgctaagagaggcctctgatgaaattgtggctgaaaaagaggctgaagttaaattgccagaggacagtagctgtacagaagatttaagttcatgcactagtgtgcctgagatgaatgaagacgggaacaggaaagaaagcaactgtgccaaagacctcagaagtcagccacctactagaataccaacactggttgacaaagagacaaacactgatgaagccgctaatgacaatatggcagttcgccccaaagagcgcagcagcctgagctctagacagcatccgtttgtgaggagcagtgtgatagtgcgctcacagaccttttctccaggagagcggaaccagtacatctgcaggttaaatcggagtgacagtgacagttcaaccctggctaaaaaatcactgtttgtgagaaactccaccgaacgccgcagtttgagggtcaaaaggacggtttgccagtcagtccttagaagaacaacacaggaatgcccagtgcggacatctctagacttagaactggaccttcaggcatctctgacccggcagagccgcctcaatgatgagctgcaggcgctgagggacttgcggcagaagctggaggaactgaaagctcagggagagactgaccttccaccaggcgtgctggaggatgagaggttccagaggcttctgaagcaagctgagaagcaggctgaacagtccaaagaagagcagaagcaaggtctgaatgcagagaagttgatgaggcaagtctccaaggacgtgtgtcggctccgggagcagagccagaaggtgcctcggcaggtgcagtccttcagggagaagattgcctacttcaccagagcaaagataagcatcccatccctgccagctgatgatgtgtgattacatgacttaagaaattattttttcatctgttcactttcttagggagggtaaaagactgaagatttgtgtttttgttttggtgtttggttttttttggtaacgtaactgtcaactcttgaagaacttttatttcacatcagattttcaacacattaatttgtaaagtaccttgagtgtaatttttatatgcttaaaaaagaaaaaatcatataagaaa

SEQ ID NO: 217547 - DNA, 4887 bp, Artificial Sequence
  derived and/or modified sequence
atgcctaggagggccgggagcggtcagctgccgctgccccggggctgggaggaggccagggactacgacggcaaggtcttctacattgaccacaacaccaggaggaccagctggatcgacccccgggacaggttaacgaagcccttgtcatttgctgattgtgttggggatgagctgccgtggggatgggaagcagggtttgaccctcagattggtgtctactacatcgatcacatcaacaaaaccacgcagatagaagatccaagaaaacaatggaggggggaacaggagaagatgctcaaggactacctctctgtggcacaggatgccctccggacacagaaggaactgtaccatgtgaaggagcagaggctggcgctggccctggatgaatacgtgcgattaaatgatgcctataaggaaaagtcaagttctcacacaagcttattctcaggatcttcatccagtactaaatatgatcccgatattttaaaagctgagatctccactacaagattaagggttaaaaagctaaagagagagctctcacagatgaagcaggaactgctctataaagaacaaggctttgaaacattgcagcaaattgataaaaaaatgtctggaggccagagcgggtatgaactcagtgaagccaaagccattctaacagaactaaaatctatcagaaaggcaattagctcaggagaaaaagaaaaacaagatctgatgcagagtcttgctaagctgcaggagcggtttcatttggatcagaacattggcagatctgagccagatttgagatgtagtcctgtgaactctcatttatgtctctccagacagacccttgatgctgggtcacaaacaagcatttccggagatattggagtaagaagtagatcaaatttagctgaaaaggtcaggctaagcctacagtatgaagaagccaaaagaagtatggccaacttaaaaattgaactgtcaaaattggacagtgaggcctggcctggggcactggatattgagaaggaaaaactgatgctgattaatgaaaaagaagaacttttgaaagagcttcagttcgtcaccccacagaaacgtacccaagatgaattagaacgcctagaagctgaaaggcagcggctggaagaagagttgctgtctgtgaggggaacaccaagcagagctctggccgagagattgagattggaagagagaagaaaagagctgctacagaaacttgaagaaactactaaattaactacttatttgcattcacaacttaaaagcctctctgccagcaccctgtccatgtcatctgggagcagcctgggttccctggcatcgagtcggggctctctgaacacctccagcagagggtcactcaactccctcagttccaccgaactctattacagcagtcaaagtgatcagatagatgtggattatcagtataaactggacttccttctgcaagagaaaagcggttacattccttctggacccatcaccaccatccatgaaaacgaggtggtcaagtcccctagccagcctggccagagtggactctgtggagtggcagctgcagcaacaggccacactcctccactggctgaggccccgaagtctgtggcctccctgtcctcgaggtcctccctttcctccttgtctcctccaggctctcccttggttttggaaggcacgtttcccatgtcttcttctcatgatgcctctctccatcagttcactgctgactttgaagactatgtggaaaaatcattaccaaaaagaagagtgatccacttgcttggggagaaaaccacttgtgtgtcggctgctgtgtctgatgagtctgtggctggagacagtggggtctatgaagctttcgtgaaacaacctagtgaaatggaagatgtcacatacagtgaagaggatgtagccattgtagagaccgcccaggttcagataggactcagatacaatgcaaaaagttcaagtttcatggtgattatagcacagctccgaaaccttcatgccttcttgatacctcatacttcaaaagtatattttagggttgccgttcttccttcctcaactgatgtcagctgtctgtttcgcacaaaagttcatccgcccacagaatccattttattcaatgatgtgttcagagtcgccatttcccaaacagccttacaacagaagacactgagggtagacctttgctctgtcagtaaacaccgaagggaagaatgcctggctggaactcagatcagcctggcagatttaccattttccagtgaggttttcactctatggtataacttgcttccttccaagcaaatgccttgcaaaaagaatgaagaaaatgaggactctgtatttcaaccaaaccagccgttagtagattctatagacttggatgcagtgtcagccttacttgcaagaacatcagctgagttgttagctgtggaacaagaattagcacaagaagaagaagaagaatcaggacaagaagagccaaggggcccagatggagactggctaacaatgctaagagaggcctctgatgaaattgtggctgaaaaagaggctgaagttaaattgccagaggacagtagctgtacagaagatttaagttcatgcactagtgtgcctgagatgaatgaagacgggaacaggaaagaaagcaactgtgccaaagacctcagaagtcagccacctactagaataccaacactggttgacaaagagacaaacactgatgaagccgctaatgacaatatggcagttcgccccaaagagcgcagcagcctgagctctagacagcatccgtttgtgaggagcagtgtgatagtgcgctcacagaccttttctccaggagagcggaaccagtacatctgcaggttaaatcggagtgacagtgacagttcaaccctggctaaaaaatcactgtttgtgagaaactccaccgaacgccgcagtttgagggtcaaaaggacggtttgccagtcagtccttagaagaacaacacaggaatgcccagtgcggacatctctagacttagaactggaccttcaggcatctctgacccggcagagccgcctcaatgatgagctgcaggcgctgagggacttgcggcagaagctggaggaactgaaagctcagggagagactgaccttccaccaggcgtgctggaggatgagaggttccagaggcttctgaagcaagctgagaagcaggctgaacagtccaaagaagagcagaagcaaggtctgaatgcagagaagttgatgaggcaagtctccaaggacgtgtgtcggctccgggagcagagccagaaggtgcctcggcaggtgcagtccttcagggagaagattgcctacttcaccagagcaaagataagcatcccatccctgccagctgatgatgtgtgattacatgacttaagaaattattttttcatctgttcactttcttagggagggtaaaagactgaagatttgtgtttttgttttggtgtttggttttttttggtaacgtaactgtcaactcttgaagaacttttatttcacatcagattttcaacacattaatttgtaaagtaccttgagtgtaatttttatatgcttaaaaaagaaaaaatcatataagaaagatgggataacctggtacacaaatgttgcccagtatgtgcgcattgccagtggacttcattttgtaaaaatggaatagaggcagtaccccacatgtgtactgttgagccggctgttgagaaacaacttggttcagccggtggttttgcttctcctttgtgttcctgtgagtaggctgtgccgatggcagcagcgccacgtggtatctgtgcgctggcgaggagaggagcgctttccatttggaggcagtgtgagcacacgctggagtgcagcgttccaaagtccgcccgaaatggatgctgcgtccacggccatcacctgtgcgggaacacctggtttccttaagacaatttcctttttgtccttttatatttttctaaagaaaactaagatataaactaccaagtgctcttaagaataaaaataagaataagaatacaaaggagcactactcttggctacacgaaagatcttgggattcatgacactgagggcagggagaagaaagaacaccagccacgcagagatacaaataagctcatcaaatgagcagctggtttgtctcactcagcctgaatttgcattaagtgttcaaaagtgagtttctggcttgcactagtgttttgccctaaatctaaggatggtgcctagtggtggccctgtgttctgaggacagagagagctggaggggtggagggaaatgcatcggcactcatttggtgtaaccaagaagagggggaaagatgtcttgatagaatcaaagttgccaaaaacaaagaagagtttatcaagcagatttctaacatttagtagaaactacttcatagctctcatttttagggggttctatctataatttatggtaaatagttgggaggcaaagggaagaatgtgtgtggggggattattaatttgaagtataagctaaattgtttattaaaaagcctattttggatgaacaagtttagagagataaactgactaatgtgtcctccagtttagaatttcaccttacccgacccaggcacttcttaaaaacacagatcctcagtgcagctctgccagcatcaaggcttttaaaatatgtagtatttaggccatttaaaccatacttattactcaataacccaagaaacaattttgggttagccatctaatatagcaaataaaatagattttttaaagaaatccaaaattgtcttaaaggaatggaccccttgaagaaaaaaaaaaaaa

SEQ ID NO: 217548 - protein, 972 aa, Artificial Sequence
  derived and/or modified sequence
MATRGHVQDPNDRRLRPIYDYLDNGNNKMAIQQADKLLKKHKDLHCAKVLKAIGLQRTGKQEEAFTLAQEVAALEPTDDNSLQALTILYREMHRPELVTKLYEAAVKKVPNSEEYHSHLFMAYARVGEYKKMQQAGMALYKIVPKNPYYFWSVMSLIMQSISAQDENLSKTMFLPLAERMVEKMVKEDKIEAEAEVELYYMILERLGKYQEALDVIRGKLGEKLTSEIQSRENKCMAMYKKLSRWPECNALSRRLLLKNSDDWQFYLTYFDSVFRLIEEAWSPPAEGEHSLEGEVHYSAEKAVKFIEDRITEESKSSRHLRGPHLAKLELIRRLRSQGCNDEYKLGDPEELMFQYFKKFGDKPCCFTDLKVFVDLLPATQCTKFINQLLGVVPLSTPTEDKLALPADIRALQQHLCVVQLTRLLGLYHTMDKNQKLSVVRELMLRYQHGLEFGKTCLKTELQFSDYYCLLAVHALIDVWRETGDETTVWQALTLLEEGLTHSPSNAQFKLLLVRIYCMLGAFEPVVDLYSSLDAKHIQHDTIGYLLTRYAESLGQYAAASQSCNFALRFFHSNQKDTSEYIIQAYKYGAFEKIPEFIAFRNRLNNSLHFAQVRTERMLLDLLLEANISTSLAESIKSMNLRPEEDDIPWEDLRDNRDLNVFFSWDPKDRDVSEEHKKLSLEEETLWLRIRSLTLRLISGLPSLNHPVEPKNSEKTAENGVSSRIDILRLLLQQLEATLETGKRFIEKDIQYPFLGPVPTRMGGFFNSGCSQCQISSFYLVNDIYELDTSGLEDTMEIQERIENSFKSLLDQLKDVFSKCKGDLLEVKDGNLKTHPTLLENLVFFVETISVILWVSSYCESVLRPYKLNLQKKKKKKKETSIIMPPVFTSFQDYVTGLQTLISNVVDHIKGLETHLIALKLEELILEDTSLSPEERKFSKTVQGKVQSSYLHSLLEMGELLKKRLETTKKLKI

SEQ ID NO: 217549 - DNA, 2919 bp, Artificial Sequence
  derived and/or modified sequence
atggccacccggggtcatgtccaggatccgaatgacaggcgcttgaggccaatctatgattacctggacaatggaaataataaaatggcaattcaacaggccgacaagttacttaagaagcacaaggacctgcactgcgccaaggtgttgaaagccattggcttgcaaaggaccggtaaacaggaagaggcctttactctggcgcaggaagtagccgccctcgagcctaccgatgataattcactccaggcactcaccatcctgtatcgtgaaatgcaccggccagaactggtgacaaaactgtacgaagcagccgtgaagaaggttcctaacagcgaggagtaccatagccacctgtttatggcgtatgcacgtgtcggggaatacaagaagatgcagcaggctggcatggcactgtacaaaatcgttcccaagaatccctattatttttggtccgtgatgtccctgatcatgcagtccatttcagctcaggatgagaatctgagtaaaactatgttcctcccattagctgagcggatggtggagaagatggttaaggaggacaaaatagaagccgaagctgaagtggagttatactatatgattttagagaggttgggcaagtaccaggaagcactggatgtcatcagaggtaagctcggggaaaagttaacatctgaaatacagagtagggaaaacaagtgtatggcaatgtataagaaactgtccaggtggccagaatgcaacgcattatcccgcaggctgctcctgaaaaattccgatgattggcagttctacctgacctacttcgacagcgttttccggctcatagaggaagcttggtctccccctgctgagggcgaacactcactggaaggcgaagttcactattccgccgagaaggctgtaaagttcatcgaggatcgcatcaccgaagaatcaaagagcagtcgccatttacgaggacctcatttagccaaactggagttgatccgcagattgaggtcacagggctgcaacgatgagtataagcttggcgaccccgaggaacttatgtttcagtactttaaaaagtttggagacaagccctgctgcttcaccgatctgaaagtgtttgtcgacttactgcctgccacacagtgtacaaagttcatcaaccagctccttggggtggtgcctctaagtactccaacagaggataaactggcactgccggctgatatccgtgccctgcagcaacacctctgcgtagtgcagctgacccgactgttaggcctctaccacactatggataagaatcagaagctgtccgtcgttcgggaactcatgctacgatatcagcatggactcgagttcggtaagacctgcttgaaaactgaattacagttcagcgattactattgcttgctagctgtgcatgcactcatcgacgtctggcgggagactggcgatgaaacaacagtgtggcaggccctgacactgctagaagagggtttaacccacagccccagtaacgcacagtttaagctgctcctggtacggatttattgcatgctgggcgcctttgagcccgtggtggacctttattccagcctcgacgcgaagcacattcagcatgacaccatcggctacctcctgactaggtacgctgaaagcctcggtcagtatgccgctgcctcccagtcatgcaatttcgcactacggttctttcatagcaaccagaaggatacatccgagtatattatccaagcctacaaatatggggctttcgaaaaaatacccgaattcattgcattccgcaacagactgaacaacagtctgcactttgcacaggtccgcaccgaacgaatgcttcttgatctgttgctggaggccaacatctccacatcactcgcggagtccatcaagtcgatgaacctccgtcccgaagaggacgacatcccttgggaggacctcagagataaccgtgacctcaacgtctttttcagctgggatcccaaagatcgggatgtgtccgaggagcataaaaaactgtctcttgaggaagaaaccttgtggctgagaatcaggtccctgacgttacgcctcatatcagggctaccttccctgaaccatccggtagaacctaaaaactctgagaagaccgcagagaacggtgtgagcagcagaatagacatcttgcgcttactgttacagcaactcgaggctactttggaaactggtaaaagattcatcgagaaagacatccaatatccattcctgggacctgtgcctacccggatgggcggtttttttaacagcggttgctcccagtgccagatttcttctttttatctcgtcaacgatatttatgagctggacacctccggcctggaggacactatggaaatacaagaacgcatcgagaattcctttaaaagtctgctggatcagctaaaggacgtgttcagcaaatgtaagggggatctgctcgaagttaaggacgggaatctgaaaacgcacccgacactgttggaaaatttggtcttctttgtagagaccatatctgtgatcctgtgggtgtcttcctattgcgagagcgtgctacggccctataaacttaacctccaaaaaaaaaaaaagaaaaagaaagagacatcaatcatcatgccacctgtatttactagcttccaggattacgtcacagggctccagaccctaatctcgaacgtagtggatcacatcaaaggactggaaacgcacttgattgctctgaagctggaggagttaattctggaagatacgtctctgagccctgaggaaaggaagtttagcaagaccgtccagggtaaggtgcagtcctcctatctacactctctgcttgagatgggggagctgttaaagaaacgcctcgagaccacaaagaaacttaaaatttag

SEQ ID NO: 217550 - DNA, 2919 bp, Artificial Sequence
  derived and/or modified sequence
atggccacccggggccacgtgcaggaccccaatgaccggcggctgcggcccatctatgactacctggacaatggaaacaacaagatggccatccagcaggccgacaagctgctgaagaagcacaaggacctgcactgtgccaaggtgctgaaggccatcggcctgcagaggacaggcaagcaggaggaggccttcaccctggcccaggaggtggccgccctggagcccacagatgacaacagcctgcaggccctgaccatcctgtaccgggagatgcacaggcctgagctggtgaccaagctgtatgaggccgctgtgaagaaggtgcccaacagcgaggagtaccacagccacctgttcatggcctatgcccgggtgggggagtacaagaagatgcagcaggccggcatggccctgtacaagatcgtgcccaagaacccctactacttctggagcgtgatgagcctcatcatgcagagcatcagcgcccaggatgagaacctgagcaagaccatgttcctgcccctggccgagaggatggtggagaagatggtgaaggaggacaagattgaggccgaggccgaggtggagctgtactacatgatcctggagcggctgggcaagtaccaggaggccctggatgtgatccggggcaagctgggggagaagctgaccagcgagatccagagccgggagaacaagtgcatggccatgtacaagaagctgagccgctggccagaatgtaatgccctgagccggcggctgctgctgaagaacagtgatgactggcagttctacctgacctactttgacagcgtcttccggctgattgaggaggcctggagccccccagctgagggggagcacagcctggagggggaggtgcactacagcgctgagaaggctgtgaagttcattgaagatcgcatcacagaggagagcaagagcagccgccacctgcggggcccccacctggccaagctggagctgatccggcggctgcggagccagggctgcaatgatgagtacaagctgggggaccctgaggagctgatgttccagtacttcaagaagtttggagacaagccctgctgcttcacagacctgaaggtgtttgtggacctgctgcctgccacccagtgcaccaagttcatcaaccagctgctgggcgtggtgcccctgagcacccccacagaggacaagctggccctgcctgctgacatccgggccctgcagcagcacctgtgtgtggtgcagctgacccggctgctgggcctgtaccacaccatggacaagaaccagaagctgtctgtggtgcgggagctgatgctgcgctaccagcacggcctggagtttgggaagacctgcctgaagacagagctgcagttcagtgactactactgcctgctggccgtgcacgccctgattgatgtgtggagggagactggagatgagaccaccgtgtggcaggccctgaccctgctggaggagggcctgacccacagccccagcaatgcccagttcaagctgctgctggtgcgcatctactgcatgctgggcgcctttgagcctgtggtggacctgtacagcagcctggatgccaagcacatccagcacgacaccatcggctacctgctgaccaggtatgcagagagcctgggccagtatgctgctgccagccagagctgcaactttgccctgcgcttcttccacagcaaccagaaggacaccagcgagtacatcatccaggcctacaagtatggagcctttgagaagatccctgagttcatcgccttcaggaaccggctgaacaacagcctgcactttgcccaggtgaggacagagaggatgctgctggacctgctgctggaggccaacatcagcaccagcctggccgagagcatcaagtccatgaacctgcggcctgaggaggatgacatcccctgggaggacctgcgggacaacagagacctgaatgtgttcttctcctgggaccccaaggacagagatgtgtctgaggagcacaagaagctgagcctggaggaggagaccctgtggctgcgcatccgcagcctgaccctgcggctcatcagcggcctgcccagcctgaaccaccctgtggagcccaagaacagcgagaagacagcagaaaatggagtgagcagcagaattgacatcctgcggctgctgctgcagcagctggaggccaccctggagaccgggaagcgcttcatcgagaaggacatccagtaccccttcctgggccctgtgcccaccaggatgggcggcttcttcaacagcggctgcagccagtgccagatcagcagcttctacctggtgaatgacatctatgagctggacaccagcggcctggaggacaccatggagatccaggagagaattgagaacagcttcaagagcctgctggaccagctgaaggatgtgttcagcaagtgcaagggggacctgctggaggtgaaggatggcaacctgaagacccaccccaccctgctggagaacctggtgttctttgtggagaccatcagcgtcatcctgtgggtgagcagctactgtgagagcgtgctgcggccctacaagctgaacctgcagaagaagaagaagaagaagaaggagaccagcatcatcatgcctcctgtgttcaccagcttccaggactatgtgacaggcctgcagaccctcatcagcaatgtggtggaccacatcaagggcctggagacccacctgattgccctgaagctggaggagctgatcctggaggacaccagcctgagccctgaggagaggaagttcagcaagacagtgcagggcaaggtgcagagcagctacctgcacagcctgctggagatgggagagctgctgaagaagaggctggagaccaccaagaagctgaagatctag

SEQ ID NO: 217551 - DNA, 2919 bp, Artificial Sequence
  derived and/or modified sequence
atggccacccggggccacgtgcaggaccccaacgaccggcggctgcggccaatatatgattatctagataatgggaataataagatggccattcagcaggccgacaaattgctgaagaaacataaggacctgcactgcgcaaaagttctaaaggccatcgggctacagcggaccggcaagcaggaggaagctttcacccttgcacaagaggtggctgccctcgagccaaccgacgataacagcttgcaagcactgacaattctctatcgcgaaatgcacagaccggagcttgtgactaaactgtacgaggcggcggtgaagaaagtgccaaacagcgaagagtatcactcccatctgtttatggcttacgcacgggtaggtgaatataagaaaatgcagcaggctgggatggccctgtacaaaattgtgcccaaaaatccctactatttttggagtgtgatgtccctaatcatgcagtccattagcgcgcaggatgaaaatttgagcaagaccatgtttctgcccttggccgagagaatggttgaaaagatggttaaagaagataagattgaagccgaagctgaggtggaactgtattacatgattctagagcggctgggcaagtatcaggaggctctggatgtgattcgggggaaactgggcgagaaactgacaagcgagatccagagtcgcgagaacaaatgcatggcgatgtataagaagctcagtagatggcccgaatgtaatgctctgtcccgccggctgcttcttaagaactcggatgactggcagttttatctcacctactttgattccgtgttcaggttgatcgaagaggcatggtcccctccagcagaaggcgaacactcattggagggcgaggttcattattctgctgaaaaggccgtgaaatttattgaggaccgaattacagaagagtcaaaatcaagtcgtcatctgcgcggtccccacctggctaaactagaacttatacgccgtctgcgctcccagggctgtaacgacgagtataagcttggcgaccccgaagagttgatgtttcaatactttaagaagttcggcgataagccttgctgctttactgacctcaaggtgttcgtggacctactaccagcaacacagtgtaccaagtttatcaaccagctcctcggagtggtgcccctttccaccccaaccgaggacaagttggcactgcctgctgacatccgagcactccaacagcatctgtgcgtggtgcagctgaccaggctgttaggtctgtaccataccatggacaaaaaccagaaactttcggtcgttagggaactgatgctgcgctatcagcacggactcgagtttggaaagacatgcctgaaaactgaattgcagtttagtgattattactgcttactggctgtacacgctttgatagacgtttggcgggagactggcgacgaaaccactgtttggcaggccctgactctgctggaagaaggcctgacccactcaccaagcaacgcccagtttaaacttttgctggtccggatttactgtatgctgggtgcatttgagccggtggtggacctatacagctccctggacgccaaacatatacaacacgatactatcggctatttgcttactcggtatgccgagtcactggggcagtacgctgctgcatctcagtcctgcaattttgcattgcggtttttccatagcaatcagaaggacacatcagaatatattatccaggcgtacaagtacggagccttcgagaagattcccgaattcatcgccttccgaaatcggctcaacaattctctccactttgcgcaggtccgaacagaaaggatgttgttagacctgcttcttgaggccaacatctccactagtctggccgagagtatcaaatctatgaacttgaggcctgaggaagacgacatcccctgggaagatctacgtgataacagagacctgaacgtcttcttcagctgggatcctaaagaccgtgatgtctcagaagaacataagaagttgtccctcgaggaggaaaccctgtggctgaggatacggtcacttacactgaggttaatttcaggccttccatcactgaatcatccagtagagcctaagaacagtgaaaaaactgccgagaatggtgtttcatcacggattgatatactccgtcttttactacagcagttagaagccacactcgaaacaggtaagcgcttcatagaaaaggacatccaatacccattccttggtccggttcccaccagaatgggtggcttctttaactcagggtgttcccagtgtcagatctcttctttttatctggttaatgacatctatgaactcgatacctcaggtctcgaggacactatggagatccaggaaaggattgagaatagtttcaagtctctgctggatcagctgaaggacgtcttcagcaaatgcaaaggtgatctcttagaggtgaaggatggtaatctgaagacccaccctactcttctagagaacttggtgttcttcgtggaaactatctcagtgattttgtgggtgagttcatactgtgaatccgtcctgcggccatacaaactgaaccttcagaaaaaaaagaagaaaaaaaaggagacctccataattatgccccctgtctttacctccttccaggattatgtgaccggtttgcaaaccttgatcagcaatgtggtggatcacatcaaaggcctggaaacacacctgattgccctcaaattggaggaactgatcttagaagacacatcactcagtcccgaggaaagaaagttctctaagacagtacagggcaaagtccaatctagttacctgcattcccttctggagatgggagaactcctcaagaaaagactcgaaaccacgaagaagctaaaaatttag

SEQ ID NO: 217552 - DNA, 2919 bp, Artificial Sequence
  derived and/or modified sequence
atggccacgagggggcatgttcaggaccctaatgaccgcaggctgagacccatctacgactatcttgataatggcaacaacaagatggccatacaacaagctgacaagttgttaaagaagcataaagatcttcactgcgccaaggtgcttaaagcgataggcctgcaacgtaccggcaagcaggaagaagcattcaccctggcccaagaggtagccgctcttgaaccaaccgacgacaattcccttcaagcgctcacaatcctctatcgcgagatgcaccgaccagagctggtgaccaagctctacgaagctgcagtcaagaaagtgccaaattcagaggaataccattctcatctcttcatggcctacgccagggtcggagagtataagaagatgcaacaggccggtatggccctctacaagatcgtgcccaaaaatccttactacttctggtcagtgatgtcgctgattatgcagtcaatttccgcccaagacgaaaatctgtctaaaacaatgtttttgccattagccgagagaatggtggaaaagatggtgaaagaagataaaatagaagcagaggccgaggtggaactctattatatgatcctggagcgtctcggcaagtatcaggaggccctggacgtgatccgtggcaagctgggtgaaaagctgacatccgagattcaatcgagggagaacaagtgcatggccatgtataagaaacttagtaggtggcccgagtgcaatgccttgagcagaagactcctcttgaaaaactcagacgactggcaattctatctaacatattttgacagtgtgttcaggctgatcgaggaggcatggtctccacctgcagagggtgagcatagcttagagggcgaagtccactatagtgctgaaaaagctgtgaaatttatcgaagatcgcataacagaggaaagtaagtcttcacgtcacttacgtggcccacacctggctaaactggaactcattagaaggttgcgttcccagggctgcaacgatgagtacaagctgggtgacccagaggaactcatgtttcaatactttaagaagttcggcgacaagccctgttgcttcaccgatctcaaggtttttgtggatctcttgccagctactcagtgcacaaaattcattaaccaattgctaggcgtcgtgcccctcagtacacccactgaagacaaactggcccttcctgcggatataagggccctacagcagcatctgtgcgttgtacagttgactaggctgctgggactatatcacacaatggacaagaatcagaagttgtccgtggtgagagagttgatgttgaggtatcagcacggacttgagttcggcaagacttgccttaagacagagctccagttttccgactactattgcctactggctgtgcacgctttgatagatgtatggagagagaccggcgatgaaactactgtgtggcaggctctcacactcctggaagaaggcttgacacactcacctagcaacgcccagttcaagctgctgcttgtccgaatctattgtatgctgggcgctttcgagcctgtcgtcgacctgtacagcagcctggacgctaagcacatccagcacgacaccatagggtatcttctgacacgatacgctgagagccttggccagtacgctgccgctagtcagtcctgtaactttgcattaagattttttcacagcaaccagaaggacacatcggagtacataatccaggcttacaagtatggtgcgttcgaaaagattccggagttcatcgcctttaggaatcggttaaataacagtttgcacttcgcacaggtgaggaccgagcggatgctcctagatttacttctcgaggccaatatatctacgtcccttgctgagtctatcaagtccatgaacctgaggccagaagaagacgacatcccctgggaggatttgcgcgacaacagggacctcaacgtatttttctcatgggaccctaaggaccgagatgtgagtgaagagcacaaaaaactcagcttagaggaagagacactctggctaagaatcagatctctgactctaaggctgatttccggactgccctcactgaatcaccccgttgagccaaagaactccgaaaaaaccgctgagaatggtgttagctccaggattgacatcttgcggctgctgctgcaacagctcgaagccaccctggagaccggaaaacgcttcatcgagaaggacatacaatacccgttcttggggccagtgcctaccagaatgggaggcttttttaattccggctgcagtcagtgccagattagcagtttttacctcgtaaatgacatatacgaactagacacttccggcctcgaagatactatggagatacaggaaagaattgagaactccttcaagtctttgctggatcaactgaaagatgtattctctaaatgcaagggcgatttactggaagtcaaggatgggaatcttaaaactcacccaactctcctggaaaacctcgtgttctttgtcgagactatttccgtaattctctgggtgtcgagctattgcgagtccgttctgcgcccttataaattgaaccttcagaaaaaaaagaagaagaaaaaagaaacttctatcattatgccccctgtgtttacttcctttcaggactacgtcaccgggctgcaaacactgatctcaaatgtggttgatcacattaaggggctggagacgcatttgattgctctgaagctggaagagctgattctagaggacacttcgctctccccggaggagagaaaattcagcaaaactgtgcagggcaaagtgcaaagctcttacctccattctttactggagatgggagaactcctgaaaaagcgcctggaaacaacaaagaaacttaagatttag

SEQ ID NO: 217553 - DNA, 6003 bp, Artificial Sequence
  derived and/or modified sequence
agtgactcggaagactttaacagcaacagctgcctcctcttgccagcttgatcccacctgctaagtgaaggaacagcgtttaaagaggtggcaatcggcaagggtggatgcttccctttccgcgcaggcgcgttcagtcgcagcaccgcgactatcgtgatagacaagcgagatcgacgctggccctttaatagccctttcccggggtcctgccccgcgcgtgcgcactgtggttctgcgcttgtcatcatggcgacgcggggccatgtgcaggaccctaacgacaggcgcctccggcccatttacgattatcttgacaatggtaataataaaatggcaattcagcaagcagataaactgttgaagaaacataaggatcttcattgtgctaaggttttaaaggcaattggtttacagagaactggaaagcaagaggaagcctttactcttgcacaggaggtggcagcccttgaacccacagatgacaactcactgcaggcactgactatcctttaccgggagatgcaccgaccggagttagttacaaaactttatgaggcagctgtgaagaaagttcccaatagtgaggagtatcactctcacctcttcatggcctatgccagagtgggtgaatacaagaaaatgcaacaggctggcatggctctatataagattgtccccaaaaatccctactacttttggtctgtgatgagcttaattatgcaatctatatcggcacaggatgaaaacctctcaaaaacaatgtttctgccccttgctgagagaatggtcgaaaaaatggtgaaagaggacaagatagaagctgaggctgaagttgaactttattatatgatcctggaacgtttgggaaagtaccaggaggccttggatgtcatcagagggaaattaggagagaagttgacaagtgagattcagagtcgggaaaataaatgcatggctatgtacaagaagctgagcaggtggccagagtgcaatgccctttcccggcgcctcttactaaaaaactcagatgactggcagttctatctgacttatttcgattctgtctttcgactgattgaagaggcctggagtcctcctgctgaaggtgaacactctttagaaggagaagtacattattctgcagaaaaagctgtgaagtttatagaagatcggataacggaagaatctaaaagttctcgccatctccgaggaccacatctagctaaattggagctgattaggcgtttacgaagtcaaggttgtaacgatgagtacaaactgggtgatccagaagaattaatgttccagtattttaaaaagtttggcgataaaccttgttgttttacagaccttaaggtgtttgttgacctcttacctgctacacagtgtacaaaatttattaatcagttacttggagttgttcctttgtcgacaccaacagaggataagctggcactgcctgctgacatcagagctctgcagcaacatttgtgtgtggtgcagctgacgaggttacttggcttgtaccacaccatggataaaaatcagaaattgagtgtggtcagagaattgatgttaaggtaccagcatggactggaatttgggaaaacctgtttgaaaacagaattgcaattttctgactattactgtctccttgctgtccatgcgcttattgatgtatggagggaaacaggtgatgagaccactgtgtggcaggccctgactttgctggaagagggattaacccatagcccttccaatgctcagttcaaattgctgcttgttcgaatctactgtatgctgggtgcatttgaaccagtggtggatctttactccagcctcgatgctaagcatatccagcatgataccattggttatcttttgacccgatatgctgaatctctaggtcagtatgctgctgcgtcccaatcctgtaacttcgcactcaggttttttcactccaaccagaaagatacctcagaatatattattcaagcttacaaatatggtgcatttgagaagatcccagagtttatcgcttttaggaacaggctgaataattctcttcattttgcacaagtccgtactgaacggatgctgttagaccttctacttgaagcaaatatatcaaccagtttagcagaaagtataaagtcaatgaaccttaggccagaagaagatgacattccatgggaagatttgcgagacaacagagacttaaatgtttttttcagctgggatccaaaagacagggacgtttctgaagaacataagaaactttccttagaggaggagaccttgtggttaagaatccgatccttaacattgaggctgataagtggacttccaagtctcaaccaccctgtggagccaaagaactcggagaagactgccgagaatggggtatcctcccggattgatattcttcgtttgctccttcaacagctggaggcaaccctggagacaggaaagcgatttattgagaaggatattcagtatcctttccttggtcctgtacctaccagaatgggtggattctttaattctggctgttctcagtgccagataagctctttttatcttgtcaatgatatttatgagctggataccagtggtttagaggatacaatggagattcaggaacgaatagaaaatagttttaagtctttactagaccagttaaaagatgtcttcagtaaatgtaaaggtgacctcttagaagttaaagatggtaacttgaaaacacatcctactcttttagaaaatctagttttctttgttgagactatttctgttatcctttgggtatccagttactgtgagagtgtcctacgaccatacaaactaaatttacagaaaaagaaaaagaagaaaaaagaaaccagcatcatcatgccacctgtctttaccagtttccaagactatgttactgggcttcagactttaatttccaatgttgtggatcatattaaagggcttgaaacacatctaattgcacttaaacttgaagaacttattttagaagacacttctctctcaccggaagagagaaaattttcaaagactgtgcaagggaaggtgcagagcagttatctgcactcacttctggaaatgggggagctgctgaaaaaaagacttgagaccacaaagaaactaaaaatttaaggaagtatctatcatgggcactgatgactctgcaacagaatatgacaccatcttcccaggcaaaagcaacatctggttgaccatgattttaatccagaacttcctcataaaatgcatgaaggactttgatcgtgaatttttttaggtgttaaatatatacaactgattaaattattgtatataaaccagaagcgggaccctcatctgggtttgaccactttttatacatgttcatatgcatatggcagcaacaagagaaccctacttttcttcttcccatcaccagaaacatcttttcaggggagcggggggtctataaaaacagcaatagaaattaagcataaagcatcaacctcatagcaactgaatagcccttccattataaataacattgagagtttttggtctggtccttgagccacaagaagtggaggggagaccatgcctgggaacagacccccttttcacagcagtaagtttgttttgaggctttctcagctacttggctcccacagaacccaaggcaggtacacaaaggaccttagatgagatctggcatatgcacccgcaatagaagggcaccacttggatgaccacaggcacttagtttttggctagtttttgtctgatagttaagacatccccatcctagcttctgtgagagttaaaaatctcaggtaagaaggcaaggaaggctctgttaatttatagctgtttagaggggaaagcagtgcagaccacttattaagcccgctgaggactagctttctgtctttcatacatttgggaaagataggaatgactgtttcaaagaagagaggtgcacataatttatgcaggcaagtatgatacttatttcattggttttgtgagtcatatatatacatatatatatatacacatatatatatgacttgaaaattaagatttaatactttaatgttttaagtgtggggggtttgggaaggaaggaatgtaatattatggatttagccttaggctttaagttttaggctggcaaaagaaatgttattcagtgggtttgaggtttggactactttcttcaaacttagagaattataacaggatggtgtttactttgttcacctggatgtccccaagactctagcttcttctatcagtggttggtctgatagaagaggtaaaaattgctcttgaaaatgtcctacaatttatgcagtttctttgataatatttttctgtttaaatccctgcttctgtttttggtctgttacctaaatatagttcaagtttaattctgtaagagcaaagaaatgaatttgatgaggaaattaagcatccaatggaggattggtcttgaagaccttaaaggtgctttccaacctgcactgctccagtgaaatgtggtacttttttcttttaaaagcaaccaagagagctgggaatatctgtgtacgcaaagtaattgcattttgtcccttcattttgactttcttagattcataatttgatacagtgcttaaacttccaaggaaattttaaacaattactacattacctgttcaaaataaggcttgttggaaatcctagtccatcaactaatttcaaaaatttatttttgatatgagtagcaacagctggtcatataccctatcccaaaaggaagaactgtcttgaacaagatgaatggaaaattgtggttaattctgaatttcatgtaatgacaacatattctttcataaaactatggcctgtttaagatggaactttgtgtgtgtctgctggggagggtggggtacatgtgtatggcgtgtgttcttgaaatgatgtctctctgaatatccaaaaaagtactgtactgtagaaatgctctttgaaaaagtctatcgactgaccatgatcaatctagcatatgtatgttcagtgggctagccttggtcctcagggacagtgtgtgactctagtggtcttcctaaccagtctcttgcctaaagatatctgggacctctactggctttaatgacaaataatgttatgttgaggttatgcttcctttgttatttgctgattttcctactaaatgtagcatttcaattagatccagctttcacattttgagataattgtaaaaagaatgaaattatgcagaaatggccaatatctcttatcaatctgttcttttggaaaccctcatgtactataaattgtgtacagttaaaaaaatatatatatatatatattcttacatgagtaaaaagcaccctctcccagcaatcgtatgccattggtatttgaagagaattcccaaataacccattgctgctgctgctgtttttgatttgtatgggtttttttgttttgtttgtttttgtgtggtaaactgatatttaaaaaaggaaaggagaaaaatcacgactactgtttacagactgaaaaattattgctttttatactactgagatcctaagttaagactctccaaagcaaacatttggtttaaatcatttatctgatgtagataaaaggtagagaaacttgtagtgttctccacataatggaaaatgtacaaatgcctagttgtgttgcccatcaattttgtatattttcataattttaattgttgaaaattgcattatattttgcaatcactatgttcaatctggatttgtctttcattttaacttttaatataaaaaggggtttcaatgtatctacaggcttgttattgaaacttcctacttatttgatgtgatttattaatataggaagtatatattcttccttaagtaagtgaagcatagcaaatctactttaaactggatgggttaatttatataaacattttcattttaa

SEQ ID NO: 217554 - DNA, 2919 bp, Artificial Sequence
  derived and/or modified sequence
atggccaccagaggccacgtgcaggaccccaacgacagaagactgagacccatctacgactacctggacaacggcaacaacaagatggccatccagcaggccgacaagctgctgaagaagcacaaggacctgcactgcgccaaggtgctgaaggccatcggcctgcagagaaccggcaagcaggaggaggccttcaccctggcccaggaggtggccgccctggagcccaccgacgacaacagcctgcaggccctgaccatcctgtacagagagatgcacagacccgagctggtgaccaagctgtacgaggccgccgtgaagaaggtgcccaacagcgaggagtaccacagccacctgttcatggcctacgccagagtgggcgagtacaagaagatgcagcaggccggcatggccctgtacaagatcgtgcccaagaacccctactacttctggagcgtgatgagcctgatcatgcagagcatcagcgcccaggacgagaacctgagcaagaccatgttcctgcccctggccgagagaatggtggagaagatggtgaaggaggacaagatcgaggccgaggccgaggtggagctgtactacatgatcctggagagactgggcaagtaccaggaggccctggacgtgatcagaggcaagctgggcgagaagctgaccagcgagatccagagcagagagaacaagtgcatggccatgtacaagaagctgagcagatggcccgagtgcaacgccctgagcagaagactgctgctgaagaacagcgacgactggcagttctacctgacctacttcgacagcgtgttcagactgatcgaggaggcctggagcccccccgccgagggcgagcacagcctggagggcgaggtgcactacagcgccgagaaggccgtgaagttcatcgaggacagaatcaccgaggagagcaagagcagcagacacctgagaggcccccacctggccaagctggagctgatcagaagactgagaagccagggctgcaacgacgagtacaagctgggcgaccccgaggagctgatgttccagtacttcaagaagttcggcgacaagccctgctgcttcaccgacctgaaggtgttcgtggacctgctgcccgccacccagtgcaccaagttcatcaaccagctgctgggcgtggtgcccctgagcacccccaccgaggacaagctggccctgcccgccgacatcagagccctgcagcagcacctgtgcgtggtgcagctgaccagactgctgggcctgtaccacaccatggacaagaaccagaagctgagcgtggtgagagagctgatgctgagataccagcacggcctggagttcggcaagacctgcctgaagaccgagctgcagttcagcgactactactgcctgctggccgtgcacgccctgatcgacgtgtggagagagaccggcgacgagaccaccgtgtggcaggccctgaccctgctggaggagggcctgacccacagccccagcaacgcccagttcaagctgctgctggtgagaatctactgcatgctgggcgccttcgagcccgtggtggacctgtacagcagcctggacgccaagcacatccagcacgacaccatcggctacctgctgaccagatacgccgagagcctgggccagtacgccgccgccagccagagctgcaacttcgccctgagattcttccacagcaaccagaaggacaccagcgagtacatcatccaggcctacaagtacggcgccttcgagaagatccccgagttcatcgccttcagaaacagactgaacaacagcctgcacttcgcccaggtgagaaccgagagaatgctgctggacctgctgctggaggccaacatcagcaccagcctggccgagagcatcaagagcatgaacctgagacccgaggaggacgacatcccctgggaggacctgagagacaacagagacctgaacgtgttcttcagctgggaccccaaggacagagacgtgagcgaggagcacaagaagctgagcctggaggaggagaccctgtggctgagaatcagaagcctgaccctgagactgatcagcggcctgcccagcctgaaccaccccgtggagcccaagaacagcgagaagaccgccgagaacggcgtgagcagcagaatcgacatcctgagactgctgctgcagcagctggaggccaccctggagaccggcaagagattcatcgagaaggacatccagtaccccttcctgggccccgtgcccaccagaatgggcggcttcttcaacagcggctgcagccagtgccagatcagcagcttctacctggtgaacgacatctacgagctggacaccagcggcctggaggacaccatggagatccaggagagaatcgagaacagcttcaagagcctgctggaccagctgaaggacgtgttcagcaagtgcaagggcgacctgctggaggtgaaggacggcaacctgaagacccaccccaccctgctggagaacctggtgttcttcgtggagaccatcagcgtgatcctgtgggtgagcagctactgcgagagcgtgctgagaccctacaagctgaacctgcagaagaagaagaagaagaagaaggagaccagcatcatcatgccccccgtgttcaccagcttccaggactacgtgaccggcctgcagaccctgatcagcaacgtggtggaccacatcaagggcctggagacccacctgatcgccctgaagctggaggagctgatcctggaggacaccagcctgagccccgaggagagaaagttcagcaagaccgtgcagggcaaggtgcagagcagctacctgcacagcctgctggagatgggcgagctgctgaagaagagactggagaccaccaagaagctgaagatctag

SEQ ID NO: 217555 - protein, 643 aa, Artificial Sequence
  derived and/or modified sequence
MAAVLALRVVAGLAAAALVAMLLEHYGLAGQPSPLPRPAPPRRPHPAPGPGDSNIFWGLQISDIHLSRFRDPGRAVDLEKFCSETIDIIQPALVLATGDLTDAKTKEQLGSRQHEVEWQTYQGILKKTRVMEKTKWLDIKGNHDAFNIPSLDSIKNYYRKYSAVRRDGSFHYVHSTPFGNYSFICVDATVNPGPKRPYNFFGILDKKKMEELLLLAKESSRSNHTIWFGHFTTSTILSPSPGIRSIMSSAIAYLCGHLHTLGGLMPVLHTRHFQGTLELEVGDWKDNRRYRIFAFDHDLFSFADLIFGKWPVVLITNPKSLLYSCGEHEPLERLLHSTHIRVLAFSLSSITSVTVKIDGVHLGQAVHVSGPIFVLKWNPRNYSSGTHNIEVIVQDSAGRSKSVHHIFSVQENNHLSFDPLASFILRTDHYIMARVLFVLIVLSQLTILIIFRYRGYPELKEPSGFINLTSFSLHVLSKINIFYYSVLLLTLYTVLGPWFFGEIIDGKFGCCFSFGIFVNGHFLQGSITFIIGILQLAFFNIPLMAYMCWSLLQRCFGHNFRSHLHQRKYLKIMPVHLLMLLLYIWQVYSCYFLYATYGTLAFLFSPLRTWLTLLTPVLIRYVWTLNSTKFGIFMVQLKSHLSS

SEQ ID NO: 217556 - DNA, 1932 bp, Artificial Sequence
  derived and/or modified sequence
atggccgccgtgctggccctgagagtggtggccggcctggccgccgccgccctggtggccatgctgctggagcactacggcctggccggccagcccagccccctgcccagacccgccccccccagaagaccccaccccgcccccggccccggcgacagcaacatcttctggggcctgcagatcagcgacatccacctgagcagattcagagaccccggcagagccgtggacctggagaagttctgcagcgagaccatcgacatcatccagcccgccctggtgctggccaccggcgacctgaccgacgccaagaccaaggagcagctgggcagcagacagcacgaggtggagtggcagacctaccagggcatcctgaagaagaccagagtgatggagaagaccaagtggctggacatcaagggcaaccacgacgccttcaacatccccagcctggacagcatcaagaactactacagaaagtacagcgccgtgagaagagacggcagcttccactacgtgcacagcacccccttcggcaactacagcttcatctgcgtggacgccaccgtgaaccccggccccaagagaccctacaacttcttcggcatcctggacaagaagaagatggaggagctgctgctgctggccaaggagagcagcagaagcaaccacaccatctggttcggccacttcaccaccagcaccatcctgagccccagccccggcatcagaagcatcatgagcagcgccatcgcctacctgtgcggccacctgcacaccctgggcggcctgatgcccgtgctgcacaccagacacttccagggcaccctggagctggaggtgggcgactggaaggacaacagaagatacagaatcttcgccttcgaccacgacctgttcagcttcgccgacctgatcttcggcaagtggcccgtggtgctgatcaccaaccccaagagcctgctgtacagctgcggcgagcacgagcccctggagagactgctgcacagcacccacatcagagtgctggccttcagcctgagcagcatcaccagcgtgaccgtgaagatcgacggcgtgcacctgggccaggccgtgcacgtgagcggccccatcttcgtgctgaagtggaaccccagaaactacagcagcggcacccacaacatcgaggtgatcgtgcaggacagcgccggcagaagcaagagcgtgcaccacatcttcagcgtgcaggagaacaaccacctgagcttcgaccccctggccagcttcatcctgagaaccgaccactacatcatggccagagtgctgttcgtgctgatcgtgctgagccagctgaccatcctgatcatcttcagatacagaggctaccccgagctgaaggagcccagcggcttcatcaacctgaccagcttcagcctgcacgtgctgagcaagatcaacatcttctactacagcgtgctgctgctgaccctgtacaccgtgctgggcccctggttcttcggcgagatcatcgacggcaagttcggctgctgcttcagcttcggcatcttcgtgaacggccacttcctgcagggcagcatcaccttcatcatcggcatcctgcagctggccttcttcaacatccccctgatggcctacatgtgctggagcctgctgcagagatgcttcggccacaacttcagaagccacctgcaccagagaaagtacctgaagatcatgcccgtgcacctgctgatgctgctgctgtacatctggcaggtgtacagctgctacttcctgtacgccacctacggcaccctggccttcctgttcagccccctgagaacctggctgaccctgctgacccccgtgctgatcagatacgtgtggaccctgaacagcaccaagttcggcatcttcatggtgcagctgaagagccacctgagcagctag

SEQ ID NO: 217557 - DNA, 1932 bp, Artificial Sequence
  derived and/or modified sequence
atggcagcagtcctggcgctcagagtggtggcagggctggccgctgcagcgttagtagctatgctgctagagcattacgggctggcgggccaaccctcccccctcccgcggccagccccaccacgtcgacctcaccccgctcccgggccaggcgacagtaacattttctggggactccagatttccgacattcacctttcgaggttccgggacccgggacgtgccgtcgatctggagaaattctgtagtgagaccatcgatatcatccagcccgctttagttttggccacgggcgatttaacagacgccaaaaccaaagaacagctaggaagtcgacaacatgaagttgagtggcagacttatcagggtatcctgaagaagaccagggtgatggagaaaacgaagtggctggatataaaggggaatcacgatgcattcaacatccccagtctggactctattaaaaattactatagaaaatacagcgcggttcgtcgcgatggctctttccactacgtgcatagcacacccttcggtaattactccttcatttgtgttgatgcgacagttaaccctggtcctaagcgcccttataatttctttggtatcctggataagaagaaaatggaggagctcctcttacttgccaaagaaagctctaggtcaaaccacaccatatggttcggtcactttactaccagcaccatacttagcccctctcctggtatcaggagcattatgtcctcggctatcgcatatttgtgcggtcacttacacactctgggggggctaatgcctgttctgcataccaggcacttccagggtactctggaattggaagtcggcgattggaaggacaaccggcggtatagaatctttgcctttgaccacgatctgttctcattcgccgatctgatcttcggcaaatggcccgtggtcttaatcactaatcccaaatccctgctgtactcatgcggcgagcacgagcctctggaacgcctcctgcatagcacacacataagggttctggctttcagtctgtcctcaattacttctgtcacggtgaaaatcgatggtgtccacctggggcaggctgtccacgttagtgggccaatctttgttctcaagtggaacccccggaattactcgtcaggcacccacaatatagaagttattgtccaggacagtgcaggccgaagtaagagtgtacaccatatcttctccgttcaggagaataatcatctaagctttgatcccctcgcctccttcatcctcagaaccgatcattacattatggccagggtgctgtttgtactgattgtcctttcccagttgacaatcctgatcattttccgctaccgggggtatccggagctgaaggaaccaagtggcttcatcaatctcacatccttctcgctgcacgtactgtctaaaattaacatattctactactccgttctccttctgacactgtacacagttttaggaccgtggttcttcggagaaattatcgatgggaagttcggatgttgtttcagtttcggcatttttgtgaatggtcattttctgcagggatccatcacttttattattgggatcctacagctcgccttctttaatattcccctcatggcatatatgtgttggagccttctgcagagatgcttcggccataactttcggagtcacttacaccagaggaaatacttgaagattatgcctgtccacttgctgatgttgctgttgtatatttggcaagtgtactcatgttactttctctacgccacttatggaaccctcgcatttcttttctcaccattaaggacatggctgactttactgacccccgttctgatcagatacgtctggacccttaatagcactaagttcggaatctttatggtacagttaaaatctcatttatcttcgtag

SEQ ID NO: 217558 - DNA, 1932 bp, Artificial Sequence
  derived and/or modified sequence
atggctgctgtgctggccctgcgggtggtggccggcctggccgccgccgccctggtggccatgctgctggagcactacggcctggccggccagcccagccccctgcccaggcctgccccaccccggcggccccacccagcccctggccctggggacagcaacatcttctggggcctgcagatcagtgacatccacctgagccgcttccgggaccccggccgggctgtggacctggagaagttctgcagcgagaccatcgacatcatccagcctgccctggtgctggccactggagacctgacagatgccaagaccaaggagcagctgggcagccggcagcacgaggtggagtggcagacctaccagggcatcctgaagaagaccagggtgatggagaagaccaagtggctggacatcaagggcaaccatgatgccttcaacatccccagcctggacagcatcaagaactactacaggaagtacagcgctgtgagaagagatggcagcttccactacgtgcacagcacccccttcggcaactacagcttcatctgtgtggatgccaccgtgaaccctggccccaagaggccctacaacttcttcggcatcctggacaagaagaagatggaggagctgctgctgctggccaaggagagcagccgcagcaaccacaccatctggtttggccacttcaccaccagcaccatcctgagccccagccctggcatccgcagcatcatgagcagcgccatcgcctacctgtgtggccacctgcacaccctgggcggcctgatgcctgtgctgcacaccaggcacttccagggcaccctggagctggaggtgggggactggaaggacaacagacgctaccgcatctttgcctttgaccatgacctcttctcctttgctgacctgatctttgggaagtggcctgtggtgctgatcaccaaccccaagagcctgctgtacagctgtggggagcacgagcccctggagcggctgctgcacagcacccacatccgggtgctggccttcagcctgagcagcatcacctctgtgacagtgaagattgatggagtgcacctgggccaggccgtgcacgtgtctggccccatctttgtgctgaagtggaaccccaggaactacagcagcggcacccacaacattgaagtcatcgtgcaggacagcgctggccgcagcaagtctgtgcaccacatcttctctgtgcaggagaacaaccacctgagctttgaccccctggccagcttcatcctgaggacagaccactacatcatggcccgggtgctgtttgtgctgattgtgctgagccagctgaccatcctgatcatcttccgctaccggggctacccagagctgaaggagcccagcggcttcatcaacctgaccagcttcagcctgcacgtgctgagcaagatcaacatcttctactacagcgtgctgctgctgaccctgtacacagtgctgggcccctggttcttcggggagatcattgatggcaagtttggctgctgcttctcctttggcatctttgtgaatggccacttcctgcagggcagcatcaccttcatcatcggcatcctgcagctggccttcttcaacatccccctgatggcctacatgtgctggagcctgctgcagcgctgcttcggccacaacttccgcagccacctgcaccagaggaagtacctgaagatcatgcctgtgcacctgctgatgctgctgctgtacatctggcaggtgtacagctgctacttcctgtatgccacctacggcaccctggccttcctgttcagccccctgcggacctggctgaccctgctgacccctgtgctgatccgctacgtgtggaccctgaacagcaccaagtttggcatcttcatggtgcagctgaagagccacctgagcagctag

SEQ ID NO: 217559 - DNA, 1932 bp, Artificial Sequence
  derived and/or modified sequence
atggccgccgtgctggccctgcgggtggtggccggcctggccgccgcagcgctcgtcgcgatgttgctggaacactacggcctagccgggcagccatcaccactacctcgccccgcgccccctagacggcctcaccctgctcccggtccaggcgattccaacattttctggggcttacagatctctgacatccacctctctagattcagggacccgggcagggccgtggacctagagaagttctgttccgagaccatcgacatcatccagcccgcgcttgttctcgccaccggcgaccttactgatgccaagaccaaagagcaactcggctcccgccagcacgaggtagagtggcagacataccagggaatcttgaagaagacgagggtcatggagaaaaccaaatggttagatatcaagggtaatcatgatgcattcaacatcccaagcctggatagcataaagaattattatagaaagtactcagccgtccgccgagacggtagcttccattacgtacactcgaccccttttgggaattactcttttatctgcgtggatgccacagttaatcccggcccaaaacgaccatataatttctttggcatactggataagaaaaaaatggaggagctgctgctgctagccaaggaatcatcccggtccaaccatactatatggttcggccactttacaacatcaacaattctttcgccgtcccccggcattaggtctatcatgagttcggcaatagcctatctgtgtggacacctgcacacactgggtggactcatgccagtgctacacactcgtcactttcaggggaccctggagttggaggtcggggactggaaggacaataggaggtaccgtatctttgctttcgaccacgatttgttctcctttgccgacctgatatttgggaaatggccagtggtgttgattacgaatcccaagtctctcctctattcctgcggcgaacatgagcccctggagaggctcttgcactcaactcatattcgagttctagccttctctctttcttctattacttcggtgacagtgaagatcgacggcgtgcaccttgggcaggcggtccatgttagcggacctatcttcgtgttgaaatggaatccgaggaattattcttccgggacacacaacattgaggtgattgttcaggactctgcgggcagatcaaaatcagtgcatcacatattcagcgtacaggagaataaccacctctccttcgaccctctggcatcctttatccttcgaaccgaccactatattatggccagggtcctttttgtcctgatcgttttgtcccagttaacaatactcatcatttttagatatcggggatacccagagctgaaagagcccagcggatttattaatctgacttccttttccctgcacgttctcagcaagataaacatattttactattctgtccttctcctgactctttacacagtattgggcccctggtttttcggcgagataattgatggaaagtttgggtgttgcttcagttttggaatttttgttaacgggcattttctgcagggtagcataaccttcattattggtattctgcagctcgcatttttcaacatccctcttatggcatacatgtgttggagcctactccaacggtgtttcggacacaactttcggagtcacctccatcagcgcaagtacctcaagatcatgcctgttcacttgctcatgttattgttgtatatttggcaggtctattcatgctatttcttgtacgccacctatgggacactggccttccttttctccccactcagaacgtggttaactcttttgacacccgttcttatccgatacgtttggaccctaaattccacgaaattcggaatcttcatggtgcaattgaaatcacacctctcatcttag

SEQ ID NO: 217560 - DNA, 1932 bp, Artificial Sequence
  derived and/or modified sequence
atggctgcggtgttggctctgagggttgtggcagggttggctgctgccgctctggtggcaatgttactggagcactacggcctcgcaggtcagcccagcccactgccgaggccagcacctcccaggcggccacatcctgccccagggccaggcgacagcaatatcttctgggggctgcagatatccgacatccatctttctcggttcagggatcctggaagggcagtggatctggaaaagttttgtagcgagaccatagatatcattcagcccgcacttgtgttagcgactggcgatctgacggacgctaagacgaaagagcagcttgggtctagacagcatgaggtagagtggcaaacttatcagggcatactgaagaaaacacgggttatggagaagaccaagtggctagacatcaagggcaaccacgacgcctttaatattcctagtctagactcgatcaagaactactatcggaaatattctgccgtgcgacgggatgggtcattccattacgtgcactccactcctttcggcaactacagttttatctgcgtcgatgccaccgttaatccgggaccaaagcgcccatacaatttttttggcatactggacaagaagaaaatggaagagttacttttgctcgccaaggagagcagtcggtctaaccacactatttggtttgggcacttcactacctcaacaatacttagccccagtccaggcatcaggtctattatgagctccgcgatcgcttatctctgcgggcacctgcatacactcggcggactgatgccagtgttacacacacggcacttccagggcactttggagttggaggtaggggactggaaagacaaccggagataccggattttcgcattcgaccatgacttattttctttcgccgatcttatattcggcaaatggccagtggtccttattactaatcccaagtcgctgttgtactcttgcggggagcacgaaccgctcgagagactcctgcatagcacccacatcagggtgcttgccttctctctctcttcaatcacgtctgttactgtgaaaattgacggagtgcaccttggccaggccgtccatgtatccgggcctatcttcgtcctgaagtggaatccacgtaattactcttctggcacacacaacatcgaagtaatcgtgcaggacagtgctgggaggtcaaaatctgtccaccacatcttttcagtccaggagaataatcacctgtcttttgatccgctggcatccttcatccttaggactgaccattacataatggccagagtgctctttgtgctgatcgtgctctcgcaacttactattctgatcattttccgatacagaggttatcccgagcttaaggagccgtctggctttatcaacttaactagcttctctctacatgtgctgtccaagatcaatatattttactattccgtgttattgctcaccctgtacacggtgctgggaccctggttctttggcgagatcatcgacggaaagttcgggtgttgtttttcgttcggaattttcgtgaatggccactttctccaaggcagtatcaccttcatcatcggaattctgcagcttgctttctttaacataccactgatggcttatatgtgctggagtttgctgcaaagatgcttcggacataatttcaggtctcacctgcatcaaagaaaataccttaaaatcatgcctgttcatctcctcatgctgctgctctatatttggcaggtttacagctgttacttcctttatgcaacatacggtaccctagctttcctgttttcaccgctccgtacatggctgactctgctgacccccgtgctgattcgttatgtgtggactctaaactctactaagtttggtatatttatggtgcaactaaaatcccatctgagtagctag

SEQ ID NO: 217561 - DNA, 2760 bp, Artificial Sequence
  derived and/or modified sequence
ggtgttcagagtttcggttctcttttctgtgatcgtattacttatgcaaaacgagcccagtcacttgcgcggccagagaggggcaggtgctgggcggcggctgacgggcgcagcaccctaggcccagtgtctggctccagccccgcatccggcgccggccccgcatccagctctggccctgcgacaatagagtccggaagtgcaggcaaagcggctcccgggagcgccgcgcggtcctgcgcgggatcagcgagggccgcgccccggcgggcgggcggcatggctgcagtgctggctctcagggtggtcgcggggttggcggccgcagcgctggtggccatgctcttggagcactacggcctggcgggccagccctcgccgctgccgcgccccgcgccccccaggaggccgcaccctgcgccagggcccggagacagcaacatcttctggggcctgcagatatccgacattcacctgagcaggtttcgagatccaggcagagcggtagacttagagaaattctgttctgaaactattgacatcattcaaccagctctcgtcctagcaacaggagacctgacagatgccaaaacaaaggaacagttgggatccaggcagcatgaggtagaatggcaaacctaccagggtattctgaagaagacaagagtcatggaaaaaaccaagtggctggatatcaaaggaaatcatgatgcattcaatattccaagtctggacagcatcaagaattattacaggaaatattctgctgtacgtagagatggctctttccattatgtccacagtactccctttggcaactattcgttcatctgtgtagatgccactgtaaatccagggcctaagagaccctataatttctttggaattttagataagaaaaagatggaggagctcttattactggccaaggaaagcagtcggagcaaccatacaatttggtttggacactttacaacatccactattctttctccatcaccaggaatccggtcaataatgagttcggctatagcttatttgtgtggacatctccatacacttggtggactgatgcctgttttgcacactcgtcacttccagggcactttggaacttgaggtgggagactggaaggataataggaggtaccggatttttgcttttgatcacgacctctttagctttgcagatttgatctttgggaagtggcctgtggttcttatcaccaatcctaaatcactcctttatagttgtggtgaacatgaaccactagaaagacttcttcactcaacacacatcagagtcttggccttttccttatcctccattacttctgtcacagttaagattgatggagttcatttaggccaggctgttcatgtgtctggtcccattttcgtactgaagtggaatcctagaaactacagtagtgggacacataacatagaagtaatcgtccaggattctgctggaagaagtaagagtgttcaccacatattttctgttcaagagaataatcatctcagttttgatcccctggcatcatttattctccgtactgatcactacatcatggcccgggtcctttttgtgctgattgtgctgagccagctcaccattctcattatttttagatatcgaggatacccagagcttaaagaaccttcagggtttataaatctgacctcattttctcttcatgtcttgagcaaaataaacatcttctactattctgtgttgttgttgaccctgtatacagtgctgggtccatggttttttggtgaaatcattgatggcaaatttggttgctgcttttcctttgggatatttgttaatggacatttcctacaaggcagcataacatttataattggaattctccagctggcgttttttaacatccccttgatggcttacatgtgttggagcttgctgcagcggtgctttggtcacaacttcaggtctcatctccatcaaagaaaatacttgaaaattatgcctgttcacctacttatgctactgctgtacatctggcaggtttattcctgctactttctttatgcaacatacggcaccctagcttttttattctcccctttgcggacctggttgacactgctgacacctgttctcattcgttatgtgtggacactgaactccaccaagtttggaatcttcatggtgcagttaaaaagccacctgagctcctgaaggccatgtctcaccactggcagctgggcagaagcccagcctctgtgtctgtagcccaggcctctaccccagtagcaggtggagggccaggattggtgggtgagctttagggagcagctgctcgtttggagtcctggacgttggagggattacccactactgatacctgcagaatggactgcagaaaagtctcaaaaataatgcctttattccttccctccctaaggaggcaaagagttgatttacctttgtgaagagaaaacccttatctaggacatccacagggtagaggttgggtgtgtgtacgggagtgtctgaggcccagtgtgttttttagggttaccccatgtaaagcacttaccgctgtgcttggaattcagcagctgtcaaaggtgcaatttcaggggcagggaacctttgaggatctgggcccgaccctcactacccctgagatattagttcccaggcctgttttcccacaggattgtgggctctctgcttccttagtcggaagtgttttcaactaatcaaataaatgaatgaatgatg

SEQ ID NO: 217562 - protein, 204 aa, Artificial Sequence
  derived and/or modified sequence
MMPSCNRSCSCSRGPSVEDGKWYGVRSYLHLFYEDCAGTALSDDPEGPPVLCPRRPWPSLCWKISLSSGTLLLLLGVAALTTGYAVPPKLEGIGEGEFLVLDQRAADYNQALGTCRLAGTALCVAAGVLLAICLFWAMIGWLSQDTKAEPLDPEADSHVEVFGDEPEQQLSPIFRNASGQSWFSPPASPFGQSSVQTIQPKRDS

SEQ ID NO: 217563 - DNA, 615 bp, Artificial Sequence
  derived and/or modified sequence
atgatgcccagttgtaaccgatcctgctcatgcagtagaggtccatcggttgaagatggaaagtggtacggtgtccgaagctacctccatctgttttacgaggactgcgctggcacagctctctcagacgatccggagggccctccggtgctatgccctaggaggccctggccctccctttgctggaagatctccctctcgtctgggaccctgctgctcctgctaggcgtggccgcgctgacaactggctatgctgtgcctcctaagctggaaggtattggtgaaggagaatttcttgtgctggaccagagggccgcagattacaaccaagctcttgggacctgccgcctggctgggaccgccttgtgtgtggccgcgggtgtcctgctcgccatctgcctgttctgggctatgatcggttggctgtcgcaggatacgaaggcggaacctctcgatcctgaagccgattcacatgtggaagtgttcggggacgaacccgaacaacagctctcaccgatcttcaggaatgcatcaggtcagtcttggttctcgccacccgcgagcccttttggccagagttctgttcagaccattcagccgaagagggatagttag

SEQ ID NO: 217564 - DNA, 615 bp, Artificial Sequence
  derived and/or modified sequence
atgatgccatcctgtaatcgatcatgcagctgtagtagaggccccagcgtggaagacggcaaatggtacggtgtacgtagctaccttcacctgttctacgaggactgcgcaggaaccgccctaagcgatgacccggagggccctccggtgctgtgtccccgtagaccttggcccagcctgtgttggaaaatctcgttatcatctggtaccctactgctgttattgggcgtagctgcactcactacgggatatgccgtgcccccaaagctcgaaggaataggagagggagaattcctagtgctcgaccaaagagctgccgactacaaccaggcgctggggacatgcagactggccggaaccgcgctttgtgttgccgctggagttttgttggccatttgcctgttttgggctatgattggctggctctctcaggacacaaaagcagagcccctcgatccagaggccgattcccatgtggaagtgttcggcgacgaaccagagcagcagttatcacccatttttaggaacgcctcaggtcaatcatggttttctccccctgccagcccgttcggacaatcctcagtgcaaaccattcagccaaagagggacagctag

SEQ ID NO: 217565 - DNA, 615 bp, Artificial Sequence
  derived and/or modified sequence
atgatgcccagctgcaacagaagctgcagctgcagccggggccccagcgtggaggatggcaagtggtatggagtgcgcagctacctgcacctgttctatgaggactgtgccggcacagccctgagtgatgatcctgagggcccccctgtgctgtgcccccggcggccctggcccagcctgtgctggaagatcagcctgagcagcggcaccctgctgctgctgctgggcgtggccgccctgaccaccggctatgctgtgccccccaagctggagggcattggagagggggagttcctggtgctggaccagagagctgctgactacaaccaggccctgggcacctgccgcctggccggcacagccctgtgtgtggccgccggcgtgctgctggccatctgcctcttctgggccatgattggctggctgagccaggacaccaaggccgagcccctggaccctgaggccgacagccacgtggaggtgtttggagatgagcctgagcagcagctgagccccatcttcagaaatgccagcggccagagctggttcagccccccagccagccccttcggccagagctctgtgcagaccatccagcccaagagggacagctag

SEQ ID NO: 217566 - DNA, 615 bp, Artificial Sequence
  derived and/or modified sequence
atgatgcccagctgcaaccggagctgcagctgcagccggggcccctctgtggaggacggaaaatggtacggcgtgcgcagttatctgcacctgttttacgaggattgcgcgggcactgcactcagcgatgacccggagggacctccagttctgtgtcctcgccggccgtggccaagcctctgttggaagatttctctgagttccggtactcttctgcttctcttaggcgtcgccgcgctcactactggttacgcagttcccccaaaactggagggaatcggagagggggagtttctggttcttgaccagcgtgccgccgactataaccaagccctggggacctgtcgtctagctggcactgccctttgtgttgccgcaggtgtcctccttgccatttgcttgttttgggcgatgatcggctggctctcacaggataccaaggcagagcctctcgacccagaggctgatagccatgtggaggtgtttggcgatgagcctgaacagcagctttcaccaatcttcaggaatgcatccggacaatcttggttttcaccacctgcttcacctttcggccaaagttctgtccagactattcaacccaaaagagactcatag

SEQ ID NO: 217567 - DNA, 615 bp, Artificial Sequence
  derived and/or modified sequence
atgatgcccagctgcaaccggagctgcagctgcagccggggccccagtgtagaggacgggaagtggtacggagtgaggtcctatttacacctgttctatgaggactgtgcaggcaccgcgttatccgacgacccagagggcccaccagttctctgccccagaagaccctggcccagcctgtgctggaaaatcagcttgtcaagcggcacccttcttctgctgctaggggtggccgctctgactacaggttacgctgtgcctccaaagctggaagggattggagagggggagttcctcgtgctggaccagagggccgccgattacaaccaggccctcggaacttgtaggctggccggcacagcactgtgtgtggctgccggagttcttcttgctatatgcctgttctgggcgatgattgggtggctcagtcaggataccaaggctgagcctctggatcctgaggctgactctcatgtggaagtgtttggcgatgagcccgagcagcagttaagccctattttccgcaatgcctctggccagtcttggtttagtccaccggcctccccttttggtcagtcttccgttcagaccattcaaccaaagagagacagctag

SEQ ID NO: 217568 - DNA, 1047 bp, Artificial Sequence
  derived and/or modified sequence
ggacccgcctttgctcggcggagacagcaggcagagagtttctctctagggaaaaggacgcagttggtgtggagcagggcatcggtggtcctgtcaggaagagtggcgcgggtgccgatgaggaaactgagacccagaaaggtggaagcacttgtctaaggtcacgcctccaggaagcagtgtgtccacgactccagtccaagtggtcaggctccagagcccacagtcccaggggtccatgatgccgagctgcaatcgttcctgcagctgcagccgcggccccagcgtggaggatggcaagtggtatggggtccgctcctacctgcacctcttctatgaggactgtgcaggcactgctctcagcgacgaccctgagggacctccggtcctgtgcccccgccggccctggccctcactgtgttggaagatcagcctgtcctcggggaccctgcttctgctgctgggtgtggcggctctgaccactggctatgcagtgccccccaagctggagggcatcggtgagggtgagttcctggtgttggatcagcgggcagccgactacaaccaggccctgggcacctgtcgcctggcaggcacagcgctctgtgtggcagctggagttctgctcgccatctgcctcttctgggccatgataggctggctgagccaggacaccaaggcagagcccttggaccccgaagccgacagccacgtggaggtcttcggggatgagccagagcagcagttgtcacccattttccgcaatgccagtggccagtcatggttctcgccacccgccagcccctttgggcaatcttctgtgcagactatccagcccaagagggactcctgagctgcccacatggcctaagatgtgggtcctggatccttccccccttctcaccataaccccctctcagtgtttccccaacttctcccttttagcagggtccctttagagcccaactccaggtcaaatctggagctcaaatcccagtgctccctccccaggagtggggccccaactcttccaagataccagcattc

SEQ ID NO: 217569 - DNA, 2088 bp, Artificial Sequence
  derived and/or modified sequence
gcggccgccgtctgcagagccaggccctgaggcgggccggcgccccctcccccgccccgaactgcggcgcaggcgcgaaccggacccgcctttgctcggcggagacagcaggcagagagatgaggaaactgagacccagaaaggtggaagcacttgtctaaggtcacgcctccaggaagcagtgtgtccacgactccagtccaagtggtcaggctccagagcccacagtcccaggggtccatgatgccgagctgcaatcgttcctgcagctgcagccgcggccccagcgtggaggatggcaagtggtatggggtccgctcctacctgcacctcttctatgaggactgtgcaggcactgctctcagcgacgaccctgagggacctccggtcctgtgcccccgccggccctggccctcactgtgttggaagatcagcctgtcctcggggaccctgcttctgctgctgggtgtggcggctctgaccactggctatgcagtgccccccaagctggagggcatcggtgagggtgagttcctggtgttggatcagcgggcagccgactacaaccaggccctgggcacctgtcgcctggcaggcacagcgctctgtgtggcagctggagttctgctcgccatctgcctcttctgggccatgataggctggctgagccaggacaccaaggcagagcccttggaccccgaagccgacagccacgtggaggtcttcggggatgagccagagcagcagttgtcacccattttccgcaatgccagtggccagtcatggttctcgccacccgccagcccctttgggcaatcttctgtgcagactatccagcccaagagggactcctgagctgcccacatggcctaagatgtgggtcctggatccttccccccttctcaccataaccccctctcagtgtttccccaacttctcccttttagcagggtccctttagagcccaactccaggtcaaatctggagctcaaatcccagtgctccctccccaggagtggggccccaactcttccaagataccagcattcctcaagtcctcccaaaacttcctacccacaccctcttcccaaggccctcaggggcagaaaacatctccttcaacccgtccccactccttcctctgcatgaccttgggcaaacccttgccctttcaagccatcagctcctgcctctctgccatgagggctttggatcagattcctcttctcgccaggatgaggacacgcactgccctccatagacacagatgaaggggtgggggtcattcagctcgaatgggtcccagatgctcacttggcctttccctgcaggatgagtgaagacgtttgcctctcacagtgtgtcttctacctgcattttggcatcagagccccccagcccacccaccacaggcaattactagccctagttgataggtgaggtgggtgaagaaggctggaggtgacatgtccgaggtcacacaacaaagcagcatgcaggaactagaaacacatcttcagcctcctcctgggccagctcttgtgctacaggtggggcggagccagcccctcaccttcctggttccctgagggtcctcagggtggaggacaggtttggcccagaaagactagccagaggcctgatggtcccaggtggctctggatatactttggatatggatttaaatggtctctaagagccgggggtagggggcaggaaaagtgggttgtctttgcccctcaaagtccacctacctagaaaccaagcccacggtcttggccgtgaccctgataataaatgggctctctcagaggcgccagcccctccctccccagccggaggcgtcatctctcttctgtaccactagagggagctctgatgcagctggagagcagcgctcaaggctctcgcccctcccctccctaacccttaccttcagtctccaccagcctgaagggcctcctaggggatcctcaggcggcccccaccagggcacaccctactgtccttgtgcctcacgccccctcctcatcctgcaccccttccatcccaccttccctttcaataaacagctgggatggatactga

SEQ ID NO: 217570 - DNA, 615 bp, Artificial Sequence
  derived and/or modified sequence
atgatgcctagctgtaaccgctcttgctcctgctcacgaggaccgagtgtggaggacggaaagtggtacggcgtgcgttcatacttgcacctattttacgaagattgcgcaggcactgccctcagtgatgatccagagggtccccctgtgctttgtcccaggcggccttggccaagtttgtgttggaagatttcactttcgtctggcaccctgttgctgttgttgggtgttgccgcactcacgaccgggtacgccgtgccccctaaactggaggggataggtgaaggcgaatttctcgtgctggatcagcgcgcagcggattacaaccaagctctgggcacctgccggctcgccggaaccgccctgtgtgtggctgccggagtcctcctcgccatctgtctgttttgggccatgatcggctggttatcgcaagacaccaaggctgagcccctggacccggaagcagactctcatgtcgaggtctttggagacgaacccgaacagcagctgtcaccaatcttccgtaatgcatcagggcagtcatggttttcaccacctgcatctccgtttggacagtcaagcgtgcagaccatccagcctaaaagggattcctag

SEQ ID NO: 217571 - DNA, 615 bp, Artificial Sequence
  derived and/or modified sequence
atgatgccctcttgcaaccgcagctgctcgtgctcacgcggacctagcgtggaagacggaaaatggtatggcgttaggtcttacctgcatctcttctacgaggattgcgcagggaccgcattgtccgacgatcctgagggacccccagttctgtgccccaggagaccttggccctcgttatgctggaaaatttcactctcctcagggacgcttcttctgctcctgggcgtggcagccttgaccactgggtacgctgtgccgccaaaattggagggaattggagagggcgaatttctcgtcctcgatcagcgggcagcagactacaatcaggctctgggcacatgtaggttggccggaacagccctgtgcgtcgccgcaggagtgttactggctatatgcctattttgggctatgattggctggttatcgcaggacaccaaggccgaacctctggatcctgaggccgactcccatgtggaggtcttcggggacgagcccgagcagcaactcagccccatattccgcaacgcttccggacagtcctggttttctcccccagccagcccctttggtcagagtagcgtgcagaccattcagccaaagagggattcatag

SEQ ID NO: 217572 - DNA, 615 bp, Artificial Sequence
  derived and/or modified sequence
atgatgcccagctgcaacagaagctgcagctgcagcagaggccccagcgtggaggacggcaagtggtacggcgtgagaagctacctgcacctgttctacgaggactgcgccggcaccgccctgagcgacgaccccgagggcccccccgtgctgtgccccagaagaccctggcccagcctgtgctggaagatcagcctgagcagcggcaccctgctgctgctgctgggcgtggccgccctgaccaccggctacgccgtgccccccaagctggagggcatcggcgagggcgagttcctggtgctggaccagagagccgccgactacaaccaggccctgggcacctgcagactggccggcaccgccctgtgcgtggccgccggcgtgctgctggccatctgcctgttctgggccatgatcggctggctgagccaggacaccaaggccgagcccctggaccccgaggccgacagccacgtggaggtgttcggcgacgagcccgagcagcagctgagccccatcttcagaaacgccagcggccagagctggttcagcccccccgccagccccttcggccagagcagcgtgcagaccatccagcccaagagagacagctag

SEQ ID NO: 217573 - protein, 437 aa, Artificial Sequence
  derived and/or modified sequence
MSGILKRKFEEVDGSSPCSSVRESDDEVSSSESADSGDSVNPSTSSHFTPSSILKREKRLRTKNVHFSCVTVYYFTRRQGFTSVPSQGGSTLGMSSRHNSVRQYTLGEFAREQERLHREMLREHLREEKLNSLKLKMTKNGTVESEEASTLTLDDISDDDIDLDNTEVDEYFFLQPLPTKKRRALLRASGVKKIDVEEKHELRAIRLSREDCGCDCRVFCDPDTCTCSLAGIKCQVDRMSFPCGCTKEGCSNTAGRIEFNPIRVRTHFLHTIMKLELEKNREQQIPTLNGCHSEISAHSSSMGPVAHSVEYSIADSFEIETEPQAAVLHLQSAEELDCQGEEEEEEEDGSSFCSGVTDSSTQSLAPSESDEEEEEEEEEEEEEDDDDDKGDGFVEGLGTHAEVVPLPSVLCYSDGTAVHESHAKNASFYANSSTLYY

SEQ ID NO: 217574 - DNA, 1758 bp, Artificial Sequence
  derived and/or modified sequence
atgtctgggattttgaagcggaaatttgaggaagtagatgggagttccccatgctctagcgtgcgagaatcggacgatgaggtttcctcctctgagagcgccgattccggcgactccgtgaatccaagcactagcagtcattttacaccctcctctattctcaaaagggagaagcgattaagaactaagaacgtgcacttctcttgtgtgactgtctactattttacaaggcgtcaggggttcacatcggtgccctctcaaggcgggagcacccttggcatgtcctctagacacaacagtgtccgccagtacacgttgggcgagtttgccagagagcaagagagactccatcgggaaatgctgcgcgagcaccttcgcgaagaaaagttgaattccctgaagctcaaaatgaccaagaacggtacggtggagagcgaggaggcaagcacgttaactctggacgatatctcggacgacgacatagaccttgataacactgaagtcgatgaatattttttcctgcagcctctgcccaccaaaaaacgccgggccctcctcagggcgagcggcgttaaaaaaatagatgtggaggagaagcacgagttgagagccattcgactgtctcgtgaagactgcggctgcgattgcagagtcttctgtgatccagatacctgcacgtgtagcttagcaggcataaagtgtcaggtggatagaatgagttttccctgcggctgcaccaaggaggggtgttctaacacagcgggccgcattgagtttaaccccatacgggtacgcacccatttcctgcatactatcatgaagctggaactcgaaaagaatagggaacaacagattcctacactgaacggatgtcactcagaaatttccgcccactcatcgagcatgggccccgtcgcacactctgtcgagtacagcattgcagactcatttgaaatagagaccgaacctcaggctgccgtgctgcacctccaaagcgccgaagagttagactgtcagggagaggaagaggaggaggaagaggatggatcaagcttctgttctggcgttacagacagctcaacccagtctcttgcaccttctgaatctgacgaagaggaggaggaggaggaggaagaggaagaagaggaagacgacgacgacgataagggggatggatttgttgaaggactggggacacatgcagaggtggtgcccctgccctccgtgttatgttatagcgacggaaccgcagtgcatgaaagccacgccaaaaacgcgagcttttacgccaacagttctacactctattaccagattgattctcatatccctggtacccctaatcagataagtgaaaactatagcgagcgggacaccgtcaagaatggcaccctctctctcgtgccatacacgatgactccagagcaatttgttgactatgcccgccaggctgaggaggcctatggcgcatcacactaccccgctgctaacccatccgtgatcgtgtgctgtagctcttccgaaaacgattccggcgtcccctgtaactccctctacccggagcaccgctctaaccacccgcaagtggagtttcatagttacctcaaaggtccctcacaggaggggttcgtgagcgccctgaatggggactcccacatctctgaacatcccgctgagaacagcttaagcttggctgaaaaatcgattctgcacgaggagtgcattaaatcacctgtcgtagagactgtgccagtatag

SEQ ID NO: 217575 - DNA, 1758 bp, Artificial Sequence
  derived and/or modified sequence
atgtcaggtatcctcaagcggaagttcgaggaggtggacggtagttcaccatgcagcagtgtccgggagtcagacgatgaggtgtcttctagcgagagcgccgacagcggcgatagtgtcaatcccagcacgtcctcacatttcactccaagtagcatactgaagcgggagaagaggttgcgtaccaaaaacgtccatttctcatgtgtgaccgtgtactatttcacccgtcgccaagggtttactagtgtgcctagtcagggaggctctaccctcggaatgagttctaggcacaactcagtccgccagtacaccttgggggagttcgctagggaacaagaaagattacacagggagatgctgagggagcatcttcgtgaagagaagctaaattctctgaagcttaaaatgacgaaaaacggcaccgtggaaagtgaagaagctagcacgcttaccttagatgatatctcggatgatgatatcgaccttgacaacaccgaagtggatgaatacttttttctgcagcccctgcctaccaaaaaacgtagagcactactccgggcatcaggtgtgaaaaaaatcgatgtggaggagaaacacgagctgagagccatcaggctaagtagagaggattgtgggtgcgactgtcgcgtgttctgtgatcccgacacatgcacgtgttcactggctggaattaaatgccaggttgatagaatgtcttttccatgtggctgcactaaggaaggttgtagtaataccgccggacggatcgagtttaatccaattcgcgttaggacgcactttcttcacactattatgaaattagagcttgaaaaaaatagagagcagcagatccctacacttaacgggtgccacagtgagatctcggctcattcatcatctatgggaccggtagcacactccgtggaatatagtatagccgattcattcgagattgaaaccgagcctcaagctgccgtgctgcacctgcagtcggccgaagagctggactgccagggcgaagaggaggaggaggaggaagatggttcatctttttgtagcggagttacagactccagcactcaatcactggcgccctcggagagtgacgaggaagaggaggaggaagaggaggaggaggaggaagaggacgatgatgacgacaagggagacggctttgttgaaggcctgggcacacacgccgaagtggtcccgctcccaagcgttctgtgctatagcgatggaaccgcagtgcatgagagtcatgccaagaatgccagtttttatgcaaactcttccacactctattaccagattgactcgcatattccaggaacacccaaccaaatcagcgaaaactattcagagcgagatacggtgaagaacggaaccctgagtctcgtgccttacacaatgaccccggaacaatttgtggactacgcaagacaagccgaggaggcctacggcgcgtcacactatccagccgcgaatccctctgtcattgtatgctgttcctcttcagagaacgatagcggtgtaccgtgtaactccctgtacccagagcatcgctctaatcacccacaggtggaatttcactcttatctgaagggcccaagccaggagggttttgtgtcagctctgaatggagacagccatatttccgaacaccccgctgagaactcattgtccctggctgaaaagagtattttacacgaagagtgcatcaagagccccgtagtcgaaaccgtcccggtgtag

SEQ ID NO: 217576 - DNA, 417 bp, Artificial Sequence
  derived and/or modified sequence
atgtcaggaattctcaagcgcaagttcgaagaagtcgatggtagttccccttgcagtagcgttagagaatcagatgacgaagtgagctcgtcagagagcgcggattccggggatagtgtcaatccatcaacatcatcccactttacacctagctcaatcctgaaaagagaaaagaggctccgaaccaagaacgttcacttcagctgcgtgactgtttattacttcacccgcagacaaggatttacctctgtaccttctcagggcggcagcacccttggaatgagctcacgccacaactccgtgagacagtataccttgggagaatttgcccgggaacaggaacgactgcatcgagagatgctaagagaacatctgcgagaagaaaaattaaatagcctgaaacttaagatgacttag

SEQ ID NO: 217577 - DNA, 1314 bp, Artificial Sequence
  derived and/or modified sequence
atgtcggggattttgaagagaaaatttgaggaagtggacggctcaagcccatgttccagcgtcagagagagcgacgatgaggttagctcgtccgaatccgcagattccggtgacagcgtgaatccaagtacctcgagccacttcacccctagcagcatcttgaagcgtgaaaaacgactcagaacgaagaatgtgcatttctcttgcgtcaccgtgtattactttacgcgaagacaggggttcacttccgtccccagccaaggagggagcacactgggaatgtctagtaggcataattccgtgcggcaatacaccctaggagagtttgcacgggagcaggagcgcctgcaccgagagatgctccgcgaacacctgcgtgaggagaaactgaactcccttaaactgaagatgaccaaaaacggaaccgttgagtctgaagaagcctccactttgactctggacgacattagtgacgatgacattgatctggacaataccgaggtcgacgagtatttctttctccagccccttccgaccaaaaagagaagggctctgttacgagcgagcggcgtaaagaagatagatgtggaagaaaaacacgaactacgtgcaatccgcctcagcagggaggactgtggctgcgattgccgagtcttttgtgatcccgatacctgtacgtgctctctggccggcattaaatgccaagtagatcgcatgagcttcccttgcggatgtacgaaagagggttgttccaacaccgccggacgtatcgagttcaacccgatcagggtgaggactcactttctgcataccatcatgaagctggagctggagaagaaccgcgagcagcagattcccactctgaacggatgtcattccgagatctcagctcactcaagctccatgggaccggtagcccattccgtcgagtactcaattgccgattcttttgaaatcgaaacggaacctcaggcggctgtgctccacctgcagagcgctgaagaactggactgtcagggagaggaggaggaggaagaggaggacggttcctcattttgctcaggcgtgactgactcctccacccagtcactcgcaccaagcgagagcgatgaggaagaagaggaagaggaggaggaggaggaggaagaagatgatgatgatgataagggggatggatttgttgaggggctaggcacccacgcagaagtcgtgccactgccgtctgtcctgtgttactctgacgggactgcagtgcacgagtcccatgcaaaaaacgccagcttctacgctaactcaagcacactgtactactag

SEQ ID NO: 217578 - DNA, 1758 bp, Artificial Sequence
  derived and/or modified sequence
atgagcggcatcctgaagaggaagtttgaggaggtggatggcagcagcccctgcagctctgtgcgggagagtgatgatgaggtgagcagcagcgagagcgctgacagcggggacagcgtgaaccccagcaccagcagccacttcacccccagcagcatcctgaagcgggagaagaggctgcggaccaagaatgtgcacttcagctgtgtgacagtgtactacttcacccggcggcagggcttcacctctgtgcccagccagggcggcagcaccctgggcatgagcagccgccacaacagcgtgcggcagtacaccctgggggagtttgcccgggagcaggagcggctgcaccgggagatgctgcgggagcacctgcgggaggagaagctgaacagcctgaagctgaagatgaccaagaatggcaccgtggagagcgaggaggccagcaccctgaccctggatgacatcagtgatgatgacatcgacctggacaacacagaggtggatgagtacttcttcctgcagcccctgcccaccaagaagaggcgggccctgctgcgggccagcggcgtgaagaagattgatgtggaggagaagcatgagctgcgggccatccggctgagccgggaggactgtggctgtgactgcagggtcttctgtgaccctgacacctgcacctgcagcctggccggcatcaagtgccaggtggacaggatgtccttcccctgtggctgcaccaaggagggctgcagcaacacagctggaagaattgagttcaaccccatccgggtgaggacccacttcctgcacaccatcatgaagctggagctggagaagaaccgggagcagcagatccccaccctgaatggctgccacagcgagatcagcgcccacagcagctccatgggccctgtggcccacagcgtggagtacagcattgctgacagctttgaaattgaaacagagccccaggccgctgtgctgcacctgcagagcgctgaggagctggactgccagggcgaggaggaggaggaggaggaggatggcagcagcttctgcagcggcgtgacagacagcagcacccagagcctggcccccagcgagagtgatgaggaggaggaggaggaggaggaggaggaggaggaggaggatgatgatgatgacaagggagatggctttgtggagggcctgggcacccatgctgaggtggtgcccctgcccagcgtgctgtgctacagtgatggaacagctgtgcatgagagccacgccaagaatgccagcttctacgccaacagcagcaccctgtactaccagattgacagccacatccctggcacccccaaccagatcagcgagaactacagcgagcgggacacagtgaagaatggcaccctgagcctggtgccctacaccatgaccccagagcagtttgtggactatgcccggcaggccgaggaggcctacggggccagccactacccagctgccaaccccagcgtgattgtgtgctgcagcagcagtgaaaatgattctggagtgccctgcaacagcctgtacccagagcacaggagcaaccacccccaggtggagttccacagctacctgaagggccccagccaggagggctttgtgtctgccctgaatggagacagccacatcagcgagcaccctgctgagaacagcctgagcctggccgagaagagcatcctgcacgaggagtgcatcaagagccctgtggtggagaccgtgcctgtgtag

SEQ ID NO: 217579 - DNA, 417 bp, Artificial Sequence
  derived and/or modified sequence
atgagcggcatcctgaagaggaagtttgaggaggtggatggcagcagcccctgcagctctgtgcgggagagtgatgatgaggtgagcagcagcgagagcgctgacagcggggacagcgtgaaccccagcaccagcagccacttcacccccagcagcatcctgaagcgggagaagaggctgcggaccaagaatgtgcacttcagctgtgtgacagtgtactacttcacccggcggcagggcttcacctctgtgcccagccagggcggcagcaccctgggcatgagcagccgccacaacagcgtgcggcagtacaccctgggggagtttgcccgggagcaggagcggctgcaccgggagatgctgcgggagcacctgcgggaggagaagctgaacagcctgaagctgaagatgacctag

SEQ ID NO: 217580 - DNA, 1314 bp, Artificial Sequence
  derived and/or modified sequence
atgagcggcatcctgaagaggaagtttgaggaggtggatggcagcagcccctgcagctctgtgcgggagagtgatgatgaggtgagcagcagcgagagcgctgacagcggggacagcgtgaaccccagcaccagcagccacttcacccccagcagcatcctgaagcgggagaagaggctgcggaccaagaatgtgcacttcagctgtgtgacagtgtactacttcacccggcggcagggcttcacctctgtgcccagccagggcggcagcaccctgggcatgagcagccgccacaacagcgtgcggcagtacaccctgggggagtttgcccgggagcaggagcggctgcaccgggagatgctgcgggagcacctgcgggaggagaagctgaacagcctgaagctgaagatgaccaagaatggcaccgtggagagcgaggaggccagcaccctgaccctggatgacatcagtgatgatgacatcgacctggacaacacagaggtggatgagtacttcttcctgcagcccctgcccaccaagaagaggcgggccctgctgcgggccagcggcgtgaagaagattgatgtggaggagaagcatgagctgcgggccatccggctgagccgggaggactgtggctgtgactgcagggtcttctgtgaccctgacacctgcacctgcagcctggccggcatcaagtgccaggtggacaggatgtccttcccctgtggctgcaccaaggagggctgcagcaacacagctggaagaattgagttcaaccccatccgggtgaggacccacttcctgcacaccatcatgaagctggagctggagaagaaccgggagcagcagatccccaccctgaatggctgccacagcgagatcagcgcccacagcagctccatgggccctgtggcccacagcgtggagtacagcattgctgacagctttgaaattgaaacagagccccaggccgctgtgctgcacctgcagagcgctgaggagctggactgccagggcgaggaggaggaggaggaggaggatggcagcagcttctgcagcggcgtgacagacagcagcacccagagcctggcccccagcgagagtgatgaggaggaggaggaggaggaggaggaggaggaggaggaggatgatgatgatgacaagggagatggctttgtggagggcctgggcacccatgctgaggtggtgcccctgcccagcgtgctgtgctacagtgatggaacagctgtgcatgagagccacgccaagaatgccagcttctacgccaacagcagcaccctgtactactag

SEQ ID NO: 217581 - DNA, 1758 bp, Artificial Sequence
  derived and/or modified sequence
atgagcggcatcctgaagcggaagttcgaggaggtggacggcagctctccatgtagttctgtgagagaatctgacgatgaagtctctagttctgaatctgccgattcgggtgacagcgtcaatcctagtacgtccagccactttactcccagcagcatactgaagcgcgagaaaagactccgcacaaaaaacgtgcatttttcctgtgtgacagtctattacttcactcgacgccagggctttactagtgtcccttcgcagggcggctccacattagggatgagtagcaggcacaatagcgtgagacagtacactcttggagagtttgctcgggagcaggagcggttacatcgggagatgttaagagaacacctcagggaggagaagctaaatagcctgaagctgaagatgactaaaaatggcacagtggaaagtgaggaggccagcaccctgaccttggatgacatttcagatgatgatatcgacctcgataatacagaagtcgatgagtacttcttcttacagccactcccaaccaaaaagagacgggccttgctccgcgcgtctggagtcaagaagatagatgtagaggaaaagcacgagctccgggcaatcaggctgtcaagggaggactgtggctgtgattgccgggtcttctgcgaccccgatacatgtacatgctcgctggctggcatcaaatgccaagtcgaccgcatgtcctttccgtgcggctgcactaaggaaggatgcagcaataccgctggtaggatcgaattcaatcccataagggttaggactcactttctgcacacaattatgaaactggaactggagaaaaaccgggagcagcagatacccacactgaacgggtgtcattctgagatatcagcccattcctcttcaatgggacccgttgcgcacagcgtggagtattctattgcagattcatttgaaatagaaacagagccgcaggcggcagttcttcacttgcagtccgctgaggagctggattgccagggagaagaggaggaggaggaagaggacggtagctccttctgttccggagtgactgactcctcaactcaatcactggcaccaagcgagtctgacgaagaggaggaggaggaggaggaggaggaagaagaagaggatgacgatgacgacaaaggcgatggctttgtggaagggctgggcacgcacgcggaggtcgtgcccttgccctccgtgctttgttattccgacggcaccgctgtccacgagtctcatgccaaaaatgcatccttctatgcgaattcaagcacactctattaccagatcgattcccacatacctggcactccaaatcagatctcagagaactatagcgaacgagacaccgttaagaatggtaccctatcattggttccgtatacaatgactccagagcagttcgtggattacgcccgtcaggccgaggaagcatatggagctagccattaccccgcagccaatcccagtgtaatagtttgctgtagctcatctgaaaacgacagcggcgtcccttgcaactcattataccccgagcacaggtctaaccacccccaggtcgaatttcattcttatctcaaagggcccagtcaggagggtttcgtatccgccctgaatggcgatagtcacataagcgaacaccccgcagaaaactccttgtccctggcagagaagtctatcttgcacgaagagtgtatcaaaagccccgtggtcgagacagtaccggtatag

SEQ ID NO: 217582 - DNA, 1758 bp, Artificial Sequence
  derived and/or modified sequence
atgagcggcatcctgaagcggaagttcgaggaggtggacggcagcagtccttgttctagtgtgagggaaagcgacgacgaggtatcctccagtgaatccgcggactccggagactctgtgaaccctagtacctcctcccactttaccccttcctcgatcctgaaacgcgagaaaagactccgtaccaagaatgtgcacttttcttgcgttacagtgtactattttaccagaaggcagggtttcacctccgtgccttcccaaggggggtcgacgcttgggatgtcctccaggcataattcagtgaggcagtatacactgggggagtttgctcgcgagcaagaacgtttgcaccgggagatgctgagggaacatctgagggaggagaagctgaactccctgaagctgaagatgaccaaaaacgggactgtcgagtccgaagaagccagtacactgaccctggacgacatctcagatgacgatattgatctggataatacagaggtggatgaatatttcttcttgcagcccttgcccaccaaaaagcgccgcgcactcttgcgcgcctccggcgtgaaaaagattgacgtggaagaaaaacacgagttgagggccattcgtctgagccgggaggactgcggttgcgattgtagggtcttctgcgaccctgatacctgtacatgcagcctggccgggatcaagtgccaggtagacaggatgtcgtttccatgcgggtgcacaaaagagggttgttcaaatacggcaggacgcatagagtttaatcctattcgcgtcagaacgcatttcttgcacacgatcatgaagctagagctggaaaaaaacagggaacagcagatcccgacactcaacggctgccattcagagatcagtgcacacagctctagtatggggccggttgcgcactccgtggagtattctattgcagattcatttgagatagagaccgaaccccaggctgctgtgctacatctgcagtcagctgaggaactagactgtcagggggaagaggaagaagaagaggaagatggatcttctttttgtagtggggtgactgacagcagtactcaatccctcgcgccatcagagagtgatgaggaggaggaagaagaagaggaggaggaggaagaagaggacgatgatgatgataagggggatggatttgtggaaggcctgggcactcatgccgaggtagttccattaccttcagtcttgtgctactctgacgggaccgccgttcatgaatctcatgccaagaacgcctctttctatgccaatagctccactctgtattaccagatcgactctcacatacccggcacacctaatcagatctcagagaattatagtgaacgggatactgtcaagaacggtactctcagcttggttccttatacaatgacccccgaacagttcgttgattacgcccgccaggcagaagaagcttatggagcctctcattaccccgcggcaaacccttctgtgatcgtctgctgctcttcctccgagaacgactccggtgttccttgtaactccctgtatccagagcaccggagcaaccacccccaggtcgaattccatagttacctgaagggcccatcacaggaaggcttcgttagtgcacttaacggagattctcacatctcagagcaccctgcagagaactctttgagtctagccgagaagagtatcctccacgaagaatgcataaagtcgcccgtggttgagacagtgcctgtctag

SEQ ID NO: 217583 - DNA, 417 bp, Artificial Sequence
  derived and/or modified sequence
atgagcggcatcctgaagcggaagttcgaggaggtggacggcagctcgccctgttcttcggtaagagagtctgatgacgaggtcagttcctcagagagcgccgactctggcgattctgtgaaccccagcacaagctcacactttaccccatctagcatcctgaaaagagagaaacggctccgcacaaagaatgtccacttttcatgcgtcacggtttactacttcacaagacggcaagggttcacgagcgtccccagtcaaggtggaagcactctgggcatgtcatcccggcataatagtgtgagacagtacactctcggtgagttcgctcgggagcaggagaggttgcaccgggaaatgttacgtgagcacctccgtgaggagaagctgaacagcctcaaactgaagatgacctag

SEQ ID NO: 217584 - DNA, 1314 bp, Artificial Sequence
  derived and/or modified sequence
atgagcggcatcctgaagcggaagttcgaggaggtggacggcagcagtccctgttcgtcagtgagggagtcagacgatgaagtgagttcttctgaatccgccgattcaggggatagcgtgaacccttctacttcgtcacacttcactccatcatcgatactcaagcgagaaaaaagactgcggactaagaacgtgcatttttcttgcgtgacggtgtactatttcacccgtagacagggtttcacctcagtgccctcccagggagggagcactctcgggatgagctctagacataattctgtccggcagtacacgctaggggagttcgcacgagagcaggagaggttacacagggagatgctgcgggagcatctgcgtgaggagaaactgaattcactgaagctgaagatgacaaagaacggcaccgtggagagtgaagaagcttcaaccctcactttggatgatatttcagatgacgacatagatctcgataataccgaggtagatgagtattttttcctgcagcctctgcctaccaagaaaagaagagcattgcttcgagcatccggggtgaagaaaattgatgtcgaggaaaaacatgaattgcgtgcaatccgcttatcccgagaggactgcggctgcgactgcagagtgttttgcgaccccgacacgtgcacatgcagcctcgctggcattaagtgtcaggtcgatcgcatgagttttccatgtggctgtactaaggagggatgcagtaacaccgccggccggatcgaattcaaccccatccgcgttcgaacgcatttcctccacactattatgaagctcgaacttgagaagaaccgcgagcaacaaattcctaccttaaacgggtgccacagcgagatctcagctcacagttcatctatgggccccgtagctcattcagtggagtactctatcgccgacagcttcgaaatcgagaccgagccccaggcagcagtcctgcatcttcagtccgcagaggaactggattgtcagggcgaagaggaggaggaagaggaagatggcagttccttctgttcgggggtgactgactcctctacccagtccttagcaccctccgagtccgacgaggaagaagaagaagaggaggaggaggaggaagaggaagacgatgatgatgataagggcgacggctttgtagagggcctcggaacccacgccgaggtggtccccctccccagcgtcttgtgctatagcgacggcactgctgttcacgagtcacacgccaagaacgcatccttctatgcgaattcatctacattgtactattag

SEQ ID NO: 217585 - DNA, 1758 bp, Artificial Sequence
  derived and/or modified sequence
atgagcggtatcctgaagcgtaagttcgaagaggtggacggatcttccccctgctctagtgttagagaatctgatgacgaagtttcctccagcgaaagcgcggactctggcgacagtgtcaacccatctacctcctctcatttcacgccgtcgtccattctaaaacgtgaaaagcgcctcaggacaaagaacgtccacttctcctgtgtgacagtatactattttacaaggcgacaggggttcaccagtgtgccatcccaggggggaagtacactgggaatgtcgtcccggcataacagtgtgaggcaatataccctgggcgagtttgccagggagcaggaacggctgcaccgggagatgctgcgggagcacttgagagaagagaagctaaacagcctcaagctcaagatgaccaagaatggcaccgtagagtccgaagaggccagcacccttactctcgacgacatctcagacgacgatatcgacctggacaataccgaggttgatgagtactttttcttacagccccttcccactaaaaagcgacgcgcacttctgcgtgcatcaggtgtcaagaaaatagacgtcgaggaaaaacatgagctgcgggctatccggctcagtagggaggactgtgggtgcgactgcagagtgttctgtgacccggatacatgcacctgttctttggccggtatcaaatgccaggtagatagaatgagtttcccctgcggctgtaccaaagagggctgctcaaataccgccggtcgcatagagtttaatcctattagagtcagaacacacttcctccacaccattatgaagttggagttggagaaaaacagggagcagcagattcccactctgaatggatgccactccgaaattagtgcccactccagctccatgggccctgtagcccacagtgtggaatactcgatcgccgattcgttcgagattgagacagagcctcaagcggctgtactgcacctgcagtctgctgaggagctcgactgccagggcgaagaagaggaagaggaggaggacgggtcaagcttctgcagtggcgtgaccgacagcagcacacagtccctggctccctcagagagtgacgaggaggaggaagaagaggaggaggaagaagaggaggaagacgacgatgacgataagggcgacggcttcgtggaagggctcgggactcacgccgaggttgtgcccctgccatcagtgctttgctacagcgacggtaccgcggtccatgaatcccacgctaaaaatgcttcgttctatgccaatagttcaacgctgtattaccaaatcgattctcatatcccaggcacacccaaccaaatttctgaaaactactccgagcgcgacactgtcaaaaatggaacattatccttggttccgtatacaatgactcccgagcaatttgtcgactacgctcgccaagccgaagaagcctatggcgctagccattatcctgctgccaacccgtccgtgatcgtgtgttgttcatctagtgaaaatgatagtggcgtgccctgcaatagtctgtatcctgaacataggtccaaccatcctcaggtcgaatttcactcctatcttaagggtccttctcaagaaggtttcgtgtctgctctgaatggagacagccatattagcgagcatccagccgagaatagcctgtcactagccgaaaagtctatactgcatgaggagtgtatcaaaagccctgtcgttgaaaccgtaccagtctag

SEQ ID NO: 217586 - DNA, 1758 bp, Artificial Sequence
  derived and/or modified sequence
atgtcaggcattctgaaacggaaattcgaagaggtggacggatcaagcccttgctcttctgttcgcgagagcgacgatgaggtttcttcctctgagagcgctgattctggcgactccgtgaacccctctacctcttcccacttcacacccagctcgatccttaaacgggagaaacggctgcgaacgaagaacgtccacttcagttgcgtgaccgtgtactatttcacacgccgacagggctttacttccgttccttctcagggagggtccacactcggtatgagctcccgccataattcagttagacagtatacgctcggcgagtttgccagggaacaagagagattacacagagaaatgttacgtgaacaccttcgtgaggagaaacttaattctctgaaacttaagatgacaaagaacggcacggtcgaatccgaagaagctagcaccttgaccctggatgatatttctgatgacgatatcgatctagataatacagaagtggacgagtacttttttctgcagccattgcccacaaaaaaaaggagggccttgctgcgagccagcggagtcaaaaaaattgacgtggaggagaagcacgagctgcgggctatccgcctgtccagagaggactgtggttgtgattgccgcgttttctgcgatcccgacacctgcacgtgtagtttggcagggattaaatgccaggtggaccggatgagttttccttgcggttgtactaaggagggctgctctaacaccgccggaaggatcgagtttaaccccatcagagtccgtacacacttcctgcataccatcatgaagttggaacttgagaaaaaccgcgagcaacagatcccgaccctgaatggatgccacagcgagatttcggctcattcatcctccatgggacctgtggcccacagcgtcgaatactctattgctgatagcttcgagattgagacggaacctcaggccgctgtactgcacctgcaatccgcggaagagctcgattgccagggtgaagaggaggaggaggaggaagacggatcaagcttctgctccggcgtgacagactcctctacacagagtctggctccgtctgaatctgatgaggaagaagaggaggaggaagaagaggaggaggaagaggacgatgacgatgacaaaggcgacggatttgtggaaggtctggggactcacgctgaggtggtgccgctgccctcagtcctgtgctatagcgatgggacggccgtgcatgagtcacatgcgaagaacgccagtttttacgccaattcaagcaccctttactaccagatcgatagccacattcctggcaccccgaaccagatctccgaaaattacagcgagagagatactgtgaagaacggcacgcttagcctcgtgccctacactatgaccccagaacagttcgtggattatgcacggcaggccgaggaggcttatggggcaagccactacccagcagccaaccctagcgtcattgtatgttgcagcagctccgagaacgactcaggtgtgccttgtaactctctgtaccccgagcaccggtcaaaccacccccaggtcgagtttcattcttacctgaagggtccatctcaggagggattcgtttccgcactgaacggtgactctcacatatccgaacacccagcagagaatagtttatctctggccgagaagtcaatcctgcacgaggaatgtattaagtccccagttgttgagacggtgccagtctag

SEQ ID NO: 217587 - DNA, 417 bp, Artificial Sequence
  derived and/or modified sequence
atgtcagggatcctgaaacgcaaattcgaggaggtggatggatctagcccatgctcttctgtcagagagagcgatgacgaagtctctagcagcgagagcgctgatagtggggatagtgtaaacccatctacatctagccatttcacaccttctagcatcctaaaaagggagaagagactccggacgaagaacgtccacttcagttgtgtaacagtgtattatttcacacgcaggcagggcttcacaagtgtcccgtcccagggcggtagtactcttggcatgtcttcaaggcacaatagcgtgcgacaatacaccctgggcgaattcgctagggaacaggagaggttacatagagaaatgctccgtgagcacctgcgggaggagaaacttaacagcttgaaactcaaaatgacttag

SEQ ID NO: 217588 - DNA, 1314 bp, Artificial Sequence
  derived and/or modified sequence
atgtccggtatccttaagaggaagttcgaagaagtagacgggtcctcaccatgttcttccgtgcgagaatcggatgatgaagttagctctagcgagtcagcagacagtggtgatagcgttaatcccagcacttcatctcacttcacaccttcaagcattctgaagcgcgagaaacgcctccgcacaaagaacgtacattttagctgcgtgactgtctactattttacgagacggcaaggatttacttccgtgccttcacaaggtggatctacacttgggatgtcgagtcggcataattccgttcgccagtatacactcggggagttcgcgagagaacaggaacgcctccaccgggaaatgcttcgggagcacctgagagaagaaaaactcaactcactgaagctgaaaatgacaaagaacggtacggtcgaaagcgaggaggccagcacactgactctcgatgacatctccgatgacgatattgacctcgacaataccgaagtggatgagtatttttttttgcagcctctgcccacaaaaaagagaagagcccttctgcgtgcctcaggggtcaagaaaatcgacgtggaggagaagcacgagttgagagctatcaggctgtcacgagaggattgcggctgcgactgcagagttttttgcgatcccgatacctgtacctgcagcttggcgggaatcaagtgtcaggttgatcggatgagcttcccctgcggatgcactaaggagggttgttctaacactgctggcagaatagagttcaaccctatcagagtccgtacacacttcttacacacaattatgaaactagagctggagaaaaatagggaacagcagatccctaccctgaatggatgtcattcagagattagtgctcatagtagcagcatggggccagtggcacactctgtcgagtatagtatcgccgattcatttgaaattgagactgagccccaagcggcagtgctacatctgcagtctgctgaggagctggactgtcaaggagaggaggaagaagaggaggaggacggatcttctttttgctccggcgtcacagactcatccacccagtcattggctccttctgagagcgatgaagaggaggaggaggaggaggaagaggaggaagaggaggacgatgacgacgacaagggagatggttttgtggaggggctgggtacgcatgccgaggtggtgccactgccctcagtgctgtgttattccgatggtactgccgtgcacgagtctcacgccaaaaatgcctccttttacgctaacagttcaaccctgtactactag

SEQ ID NO: 217589 - DNA, 1758 bp, Artificial Sequence
  derived and/or modified sequence
atgagcggcatcctgaagagaaagttcgaggaggtggacggcagcagcccctgcagcagcgtgagagagagcgacgacgaggtgagcagcagcgagagcgccgacagcggcgacagcgtgaaccccagcaccagcagccacttcacccccagcagcatcctgaagagagagaagagactgagaaccaagaacgtgcacttcagctgcgtgaccgtgtactacttcaccagaagacagggcttcaccagcgtgcccagccagggcggcagcaccctgggcatgagcagcagacacaacagcgtgagacagtacaccctgggcgagttcgccagagagcaggagagactgcacagagagatgctgagagagcacctgagagaggagaagctgaacagcctgaagctgaagatgaccaagaacggcaccgtggagagcgaggaggccagcaccctgaccctggacgacatcagcgacgacgacatcgacctggacaacaccgaggtggacgagtacttcttcctgcagcccctgcccaccaagaagagaagagccctgctgagagccagcggcgtgaagaagatcgacgtggaggagaagcacgagctgagagccatcagactgagcagagaggactgcggctgcgactgcagagtgttctgcgaccccgacacctgcacctgcagcctggccggcatcaagtgccaggtggacagaatgagcttcccctgcggctgcaccaaggagggctgcagcaacaccgccggcagaatcgagttcaaccccatcagagtgagaacccacttcctgcacaccatcatgaagctggagctggagaagaacagagagcagcagatccccaccctgaacggctgccacagcgagatcagcgcccacagcagcagcatgggccccgtggcccacagcgtggagtacagcatcgccgacagcttcgagatcgagaccgagccccaggccgccgtgctgcacctgcagagcgccgaggagctggactgccagggcgaggaggaggaggaggaggaggacggcagcagcttctgcagcggcgtgaccgacagcagcacccagagcctggcccccagcgagagcgacgaggaggaggaggaggaggaggaggaggaggaggaggaggacgacgacgacgacaagggcgacggcttcgtggagggcctgggcacccacgccgaggtggtgcccctgcccagcgtgctgtgctacagcgacggcaccgccgtgcacgagagccacgccaagaacgccagcttctacgccaacagcagcaccctgtactaccagatcgacagccacatccccggcacccccaaccagatcagcgagaactacagcgagagagacaccgtgaagaacggcaccctgagcctggtgccctacaccatgacccccgagcagttcgtggactacgccagacaggccgaggaggcctacggcgccagccactaccccgccgccaaccccagcgtgatcgtgtgctgcagcagcagcgagaacgacagcggcgtgccctgcaacagcctgtaccccgagcacagaagcaaccacccccaggtggagttccacagctacctgaagggccccagccaggagggcttcgtgagcgccctgaacggcgacagccacatcagcgagcaccccgccgagaacagcctgagcctggccgagaagagcatcctgcacgaggagtgcatcaagagccccgtggtggagaccgtgcccgtgtag

SEQ ID NO: 217590 - DNA, 417 bp, Artificial Sequence
  derived and/or modified sequence
atgagcggcatcctgaagagaaagttcgaggaggtggacggcagcagcccctgcagcagcgtgagagagagcgacgacgaggtgagcagcagcgagagcgccgacagcggcgacagcgtgaaccccagcaccagcagccacttcacccccagcagcatcctgaagagagagaagagactgagaaccaagaacgtgcacttcagctgcgtgaccgtgtactacttcaccagaagacagggcttcaccagcgtgcccagccagggcggcagcaccctgggcatgagcagcagacacaacagcgtgagacagtacaccctgggcgagttcgccagagagcaggagagactgcacagagagatgctgagagagcacctgagagaggagaagctgaacagcctgaagctgaagatgacctag

SEQ ID NO: 217591 - DNA, 1314 bp, Artificial Sequence
  derived and/or modified sequence
atgagcggcatcctgaagagaaagttcgaggaggtggacggcagcagcccctgcagcagcgtgagagagagcgacgacgaggtgagcagcagcgagagcgccgacagcggcgacagcgtgaaccccagcaccagcagccacttcacccccagcagcatcctgaagagagagaagagactgagaaccaagaacgtgcacttcagctgcgtgaccgtgtactacttcaccagaagacagggcttcaccagcgtgcccagccagggcggcagcaccctgggcatgagcagcagacacaacagcgtgagacagtacaccctgggcgagttcgccagagagcaggagagactgcacagagagatgctgagagagcacctgagagaggagaagctgaacagcctgaagctgaagatgaccaagaacggcaccgtggagagcgaggaggccagcaccctgaccctggacgacatcagcgacgacgacatcgacctggacaacaccgaggtggacgagtacttcttcctgcagcccctgcccaccaagaagagaagagccctgctgagagccagcggcgtgaagaagatcgacgtggaggagaagcacgagctgagagccatcagactgagcagagaggactgcggctgcgactgcagagtgttctgcgaccccgacacctgcacctgcagcctggccggcatcaagtgccaggtggacagaatgagcttcccctgcggctgcaccaaggagggctgcagcaacaccgccggcagaatcgagttcaaccccatcagagtgagaacccacttcctgcacaccatcatgaagctggagctggagaagaacagagagcagcagatccccaccctgaacggctgccacagcgagatcagcgcccacagcagcagcatgggccccgtggcccacagcgtggagtacagcatcgccgacagcttcgagatcgagaccgagccccaggccgccgtgctgcacctgcagagcgccgaggagctggactgccagggcgaggaggaggaggaggaggaggacggcagcagcttctgcagcggcgtgaccgacagcagcacccagagcctggcccccagcgagagcgacgaggaggaggaggaggaggaggaggaggaggaggaggaggacgacgacgacgacaagggcgacggcttcgtggagggcctgggcacccacgccgaggtggtgcccctgcccagcgtgctgtgctacagcgacggcaccgccgtgcacgagagccacgccaagaacgccagcttctacgccaacagcagcaccctgtactactag

SEQ ID NO: 217592 - protein, 1566 aa, Artificial Sequence
  derived and/or modified sequence
MYVRVSFDTKPDLLLHLMTKEWQLELPKLLISVHGGLQNFELQPKLKQVFGKGLIKAAMTTGAWIFTGGVNTGVIRHVGDALKDHASKSRGKICTIGIAPWGIVENQEDLIGRDVVRPYQTMSNPMSKLTVLNSMHSHFILADNGTTGKYGAEVKLRRQLEKHISLQKINTRIGQGVPVVALIVEGGPNVISIVLEYLRDTPPVPVVVCDGSGRASDILAFGHKYSEEGGLINESLRDQLLVTIQKTFTYTRTQAQHLFIILMECMKKKELITVFRMGSEGHQDIDLAILTALLKGANASAPDQLSLALAWNRVDIARSQIFIYGQQWPVGSLEQAMLDALVLDRVDFVKLLIENGVSMHRFLTISRLEELYNTRHGPSNTLYHLVRDVKKREYPGFGWIYFKGNLPPDYRISLIDIGLVIEYLMGGAYRCNYTRKRFRTLYHNLFGPKRPKALKLLGMEDDIPLRRGRKTTKKREEEVDIDLDDPEINHFPFPFHELMVWAVLMKRQKMALFFWQHGEEAMAKALVACKLCKAMAHEASENDMVDDISQELNHNSRDFGQLAVELLDQSYKQDEQLAMKLLTYELKNWSNATCLQLAVAAKHRDFIAHTCSQMLLTDMWMGRLRMRKNSGLKVILGILLPPSILSLEFKNKDDMPYMSQAQEIHLQEKEAEEPEKPTKEKEEEDMELTAMLGRNNGESSRKKDEEEVQSKHRLIPLGRKIYEFYNAPIVKFWFYTLAYIGYLMLFNYIVLVKMERWPSTQEWIVISYIFTLGIEKMREILMSEPGKLLQKVKVWLQEYWNVTDLIAILLFSVGMILRLQDQPFRSDGRVIYCVNIIYWYIRLLDIFGVNKYLGPYVMMIGKMMIDMMYFVIIMLVVLMSFGVARQAILFPNEEPSWKLAKNIFYMPYWMIYGEVFADQIDPPCGQNETREDGKIIQLPPCKTGAWIVPAIMACYLLVANILLVNLLIAVFNNTFFEVKSISNQVWKFQRYQLIMTFHERPVLPPPLIIFSHMTMIFQHLCCRWRKHESDPDERDYGLKLFITDDELKKVHDFEEQCIEEYFREKDDRFNSSNDERIRVTSERVENMSMRLEEVNEREHSMKASLQTVDIRLAQLEDLIGRMATALERLTGLERAESNKIRSRTSSDCTDAAYIVRQSSFNSQEGNTFKLQESIDPAGEETMSPTSPTLMPRMRSHSFYSVNMKDKGGIEKLESIFKERSLSLHRATSSHSVAKEPKAPAAPANTLAIVPDSRRPSSCIDIYVSAMDELHCDIDPLDNSVNILGLGEPSFSTPVPSTAPSSSAYATLAPTDRPPSRSIDFEDITSMDTRSFSSDYTHLPECQNPWDSEPPMYHTIERSKSSRYLATTPFLLEEAPIVKSHSFMFSPSRSYYANFGVPVKTAEYTSITDCIDTRCVNAPQAIADRAAFPGGLGDKVEDLTCCHPEREAELSHPSSDSEENEAKGRRATIAISSQEGDNSERTLSNNITVPKIERANSYSAEEPSAPYAHTRKSFSISDKLDRQRNTASLRNPFQRSKSSKPEGRGDSLSMRRLSRTSAFQSFESKHN

SEQ ID NO: 217593 - protein, 1182 aa, Artificial Sequence
  derived and/or modified sequence
MARVESPVPAARASLTGSCVLGQAMPLRGGAGPSPASHGPTHGPSDPRTCLPGRGAGGMRPHGRGALGCCGLCSFYTCHGAAGDEIMHQDIVPLCAADIQDQLKKRFAYLSGGRGQDGSPVITFPDYPAFSEIPDKEFQNVMTYLTSIPSLQDAGIGFILVIDRRRDKWTSVKASVLRIAASFPANLQLVLVLRPTGFFQRTLSDIAFKFNRDDFKMKVPVIMLSSVPDLHGYIDKSQLTEDLGGTLDYCHSRWLCQRTAIESFALMVKQTAQMLQSFGTELAETELPNDVQSTSSVLCAHTEKKDKAKEDLRLALKEGHSVLESLRELQAEGSEPSVNQDQLDNQATVQRLLAQLNETEAAFDEFWAKHQQKLEQCLQLRHFEQGFREVKAILDAASQKIATFTDIGNSLAHVEHLLRDLASFEEKSGVAVERARALSLDGEQLIGNKHYAVDSIRPKCQELRHLCDQFSAEIARRRGLLSKSLELHRRLETSMKWCDEGIYLLASQPVDKCQSQDGAEAALQEIEKFLETGAENKIQELNAIYKEYESILNQDLMEHVRKVFQKQASMEEVFHRRQASLKKLAARQTRPVQPVAPRPEALAKSPCPSPGIRRGSENSSSEGGALRRGPYRRAKSEMSESRQGRGSAGEEEESLAILRRHVMSELLDTERAYVEELLCVLEGYAAEMDNPLMAHLLSTGLHNKKDVLFGNMEEIYHFHNRIFLRELENYTDCPELVGRCFLERMEDFQIYEKYCQNKPRSESLWRQCSDCPFFQECQRKLDHKLSLDSYLLKPVQRITKYQLLLKEMLKYSRNCEGAEDLQEALSSILGILKAVNDSMHLIAITGYDGNLGDLGKLLMQGSFSVWTDHKRGHTKVKELARFKPMQRHLFLHEKAVLFCKKREENGEGYEKAPSYSYKQSLNMAAVGITENVKGDAKKFEIWYNAREEVYIVQAPTPEIKAAWVNEIRKVLTSQLQACREASQHRALEQSQSLPLPAPTSTSPSRGNSRNIKKLEERKTDPLSLEGYVSSAPLTKPPEKGKGWSKTSHSLEAPEDDGGWSSAEEQINSSDAEEDGGLGPKKLVPGKYTVVADHEKGGPDALRVRSGDVVELVQEGDEGLWYVRDPTTGKEGWVPASSLSVRLGPSGSAQCLSSSESSPGSAVLSNSSSCSEGGQAPFSDLQG

SEQ ID NO: 217594 - protein, 1123 aa, Artificial Sequence
  derived and/or modified sequence
MTVRRLSLLCRDLWALWLLLKAGADEIMHQDIVPLCAADIQDQLKKRFAYLSGGRGQDGSPVITFPDYPAFSEIPDKEFQNVMTYLTSIPSLQDAGIGFILVIDRRRDKWTSVKASVLRIAASFPANLQLVLVLRPTGFFQRTLSDIAFKFNRDDFKMKVPVIMLSSVPDLHGYIDKSQLTEDLGGTLDYCHSRWLCQRTAIESFALMVKQTAQMLQSFGTELAETELPNDVQSTSSVLCAHTEKKDKAKEDLRLALKEGHSVLESLRELQAEGSEPSVNQDQLDNQATVQRLLAQLNETEAAFDEFWAKHQQKLEQCLQLRHFEQGFREVKAILDAASQKIATFTDIGNSLAHVEHLLRDLASFEEKSGVAVERARALSLDGEQLIGNKHYAVDSIRPKCQELRHLCDQFSAEIARRRGLLSKSLELHRRLETSMKWCDEGIYLLASQPVDKCQSQDGAEAALQEIEKFLETGAENKIQELNAIYKEYESILNQDLMEHVRKVFQKQASMEEVFHRRQASLKKLAARQTRPVQPVAPRPEALAKSPCPSPGIRRGSENSSSEGGALRRGPYRRAKSEMSESRQGRGSAGEEEESLAILRRHVMSELLDTERAYVEELLCVLEGYAAEMDNPLMAHLLSTGLHNKKDVLFGNMEEIYHFHNRIFLRELENYTDCPELVGRCFLERMEDFQIYEKYCQNKPRSESLWRQCSDCPFFQECQRKLDHKLSLDSYLLKPVQRITKYQLLLKEMLKYSRNCEGAEDLQEALSSILGILKAVNDSMHLIAITGYDGNLGDLGKLLMQGSFSVWTDHKRGHTKVKELARFKPMQRHLFLHEKAVLFCKKREENGEGYEKAPSYSYKQSLNMAAVGITENVKGDAKKFEIWYNAREEVYIVQAPTPEIKAAWVNEIRKVLTSQLQACREASQHRALEQSQSLPLPAPTSTSPSRGNSRNIKKLEERKTDPLSLEGYVSSAPLTKPPEKGKGWSKTSHSLEAPEDDGGWSSAEEQINSSDAEEDGGLGPKKLVPGKYTVVADHEKGGPDALRVRSGDVVELVQEGDEGLWYVRDPTTGKEGWVPASSLSVRLGPSGSAQCLSSSESSPGSAVLSNSSSCSEGGQAPFSDLQG

SEQ ID NO: 217595 - DNA, 3390 bp, Artificial Sequence
  derived and/or modified sequence
atggccgaaaaaggcgcatcacggggcactctgagaagactttggtcactgcccagaaggcgacgagggaccgccggccggtcccgcccagatgagattatgcaccaggacattgtccctttgtgtgctgccgacatccaggatcagctgaagaagcggtttgcctacctgtccggcggacgagggcaggacggttcccccgtaataacgttccccgattacccagccttctcagagatccctgacaaagagtttcagaacgtaatgacgtacctgactagcataccttccctgcaggatgctggcatcggtttcattttggtgatcgacaggcgcagagataaatggaccagcgtgaaagccagcgttctgcggatcgccgctagtttccctgctaaccttcaactagtgctagtgctgcgacctacaggtttttttcagcgaaccctgtccgatattgcctttaagtttaatagagatgatttcaaaatgaaagtccctgtcatcatgctctccagcgtgcctgacttacatgggtacatcgataaatcacaactgacggaggacctcggaggcactctggattactgccatagccgatggctgtgccagaggacagctattgaatcgtttgccctcatggtcaagcaaacagcccaaatgttacagtctttcggaacagagctggctgagaccgaattgccaaacgatgtgcagagcacaagttcagttttgtgcgctcataccgagaagaaggacaaggccaaggaggacctcaggctggctctgaaagaaggtcacagcgtacttgaatcactgagggaattacaggccgagggtagtgaaccgtccgtaaatcaggatcagttggataaccaagccactgtccaacgactcctcgctcagttaaatgagacagaagcggcattcgacgaattctgggcgaaacatcagcagaagttggagcagtgcctgcagcttcgccacttcgagcaagggttccgcgaagttaaggctattcttgacgccgcttcccaaaagattgctactttcacagatatcggcaacagcctggcgcacgtggaacacctgttaagagacctggcttctttcgaagaaaagagtggagtcgctgtagaacgcgccagggcactctcactcgacggagagcagctgataggcaacaagcactacgctgtggacagcatccgtccgaagtgtcaggaactaaggcacttatgtgatcagttctctgccgagatcgcaaggaggagagggctgctgtccaagtcactggagcttcataggaggctggaaactagtatgaagtggtgcgacgagggaatctacctgctcgcttcccagcctgtggacaagtgtcagtctcaggacggggccgaggctgcccttcaggaaatcgagaagttcctggagacaggcgccgaaaataaaattcaggagctgaacgccatctataaggagtacgaatccatcttaaatcaggacctgatggagcacgtgcgtaaagtctttcagaaacaggcttcaatggaggaagtatttcacagaagacaagcatcattgaagaaattagccgcccgacagactcgcccagtgcaaccggtggcgcccagacccgaggccttggctaagagtccatgccctagcccaggtatccgccggggatccgaaaactctagcagcgaaggaggggctttaaggagggggccttacaggagagccaagtctgaaatgtctgagtcaagacaaggcagaggctcggcaggggaagaagaggaatcactcgcgattcttcgaagacatgtgatgagtgagctgctagacacagaaagagcttacgtggaagagcttctgtgtgttcttgaggggtacgcggccgagatggataatccccttatggctcatctgctgtccaccggtctgcataataaaaaagacgtgctgttcggcaatatggaggaaatttatcatttccacaacaggatctttttgcgagagctggaaaattatacagattgtccggagctggttggccgttgcttcctggagcgcatggaggacttccagatctatgagaaatactgtcagaataaacccagatccgaaagtctgtggaggcagtgctctgactgcccatttttccaggagtgccagcgcaagctggatcataaattgagcctggactcatatctgctgaaacctgttcaacgtatcacaaagtaccagttgctactaaaagagatgctgaaatattcaagaaactgtgagggtgctgaagaccttcaagaagctcttagttctatactgggaatcctgaaggccgtgaatgactccatgcatctgattgctatcaccggctacgacggcaatctgggagacttggggaagctgttgatgcaaggtagtttctctgtttggactgaccataagcgaggacacaccaaagtcaaggagttggctcgtttcaagccaatgcaaagacacctgttcctccacgaaaaagccgtgttattctgcaagaaacgagaagaaaacggagaaggttacgaaaaagcacccagttacagttacaaacaatcacttaatatggctgctgtcggcatcaccgagaatgttaaaggggatgctaagaaattcgagatatggtataacgccagggaagaggtgtatatagtgcaagctcccacaccagagatcaaggctgcctgggtcaatgaaatacgcaaggtgctgacaagccagctccaggcctgccgcgaagcctcccagcatagggccctggaacagagccagagcctgccattgcccgcgcctaccagcacatctcccagccgtggaaacagcaggaacattaaaaaactcgaagaacggaaaactgaccctctcagcctcgagggctatgtaagcagcgccccactgaccaagcctcctgaaaagggcaaaggatggagcaagacttcccatagcctggaagcacctgaagatgatggcggctggtctagcgcagaggaacagattaactcttcagacgccgaagaggatggaggattgggaccgaagaagttagtacctgggaaatacaccgttgtggcggaccatgaaaaaggcggccctgatgcattgagggtgcgctctggcgacgttgtggaattggttcaggaaggcgacgagggcttgtggtacgtcagggacccgaccaccggaaaggaaggatgggtccctgcttcttctcttagcgtgaggcttggtccctcaggaagcgctcagtgtctctcctctagtgaatcatctcctggatccgcagtgcttagtaacagctcatcctgcagcgaagggggtcaggccccattcagcgacttgcagggttag

SEQ ID NO: 217596 - DNA, 3549 bp, Artificial Sequence
  derived and/or modified sequence
atggccagagttgagtcacccgtccccgcggccagagccagcctcacgggtagttgtgtgctgggacaggctatgcctctaaggggcggcgccggccctagccctgcctctcacggcccaacccacggcccctccgatcccaggacctgcctgcccggacggggtgctgggggcatgcggccacacggccggggcgcactaggctgctgtggcctgtgctccttttatacatgccacggtgcagctggggatgaaattatgcaccaggatattgttcctctttgcgccgctgatattcaggatcaactgaagaaacgttttgcttatctctcaggagggagaggacaggatggaagtcccgtgataacctttcccgattatccagctttttctgagatccctgacaaggagtttcagaacgtgatgacttatctcaccagtattccgtccctgcaagacgcaggtattggattcattttggtaattgataggcggagagataagtggacaagtgttaaagcatcagtattgcggatcgccgcaagctttcccgctaacctgcagcttgtacttgttctccgccccacgggctttttccaacgcaccttgagtgacatcgcttttaagttcaacagggatgatttcaagatgaaagtccccgtgatcatgctttcctcggttcctgacctccacggatacattgataagtcgcagcttacggaggacctgggggggactctggactattgtcattcccggtggctgtgtcagagaacagctattgaatccttcgctctgatggtgaaacagactgcccagatgctgcagagctttgggaccgagctggccgagacggagctccccaacgacgtgcaaagcaccagcagcgtattgtgtgcccacacagaaaagaaagacaaggccaaagaagatctgcgactcgccttaaaagaggggcactccgtcctcgaatccttaagggaactgcaagccgagggcagtgagccctcagtgaatcaagaccagctggataatcaagcgactgttcaaagactcctcgcccaacttaacgaaactgaagctgcatttgatgagttttgggcaaaacaccagcagaaactggaacaatgcctccagctgcggcatttcgaacaaggtttcagggaagttaaagccatcctggatgccgcgagtcagaaaatagctacattcacggatatcgggaattctctggcacacgtggaacatctgctgcgcgatctggcctcatttgaagagaaaagtggggtggccgtggaaagggcacgggccctgagtctagatggggaacaactgatcgggaacaaacactatgcggtggattcaattaggcctaaatgtcaggaacttaggcacctttgtgaccagttctccgccgaaattgctagacggcgtgggctcctatcaaagtcactggagttgcatcgacgcctggaaactagcatgaaatggtgtgacgaagggatatacctgctggcaagtcaaccagtggataagtgtcaaagccaggacggggcagaagccgcactgcaagagatagaaaagtttctggaaacaggcgcggagaacaaaatccaggagctgaatgctatatacaaggagtatgaatctattctcaaccaggatctgatggagcatgttcgaaaggtatttcagaagcaggcatctatggaggaggtgtttcaccgtagacaggcctcgctcaaaaaactcgccgcgcgccagacccggccagtgcagcccgtggccccccggcctgaggctctggcaaagagtccttgcccttctcccggcatccgccgaggttccgagaactccagcagtgagggaggggcactccgcagagggccttataggcgagctaagagcgagatgtccgagtcccgacagggccggggctcagccggggaagaagaagaaagcttagcgatactgcgacgccacgtaatgtcggagttgctggataccgagcgggcatacgtggaggaactcctttgtgtactggagggctatgctgccgagatggataatcctcttatggcccacctgctgagtaccggactccataataagaaggacgttctgtttggcaatatggaggaaatttaccactttcataatcgtatcttcctccgagagttggagaactacacagattgtccggagcttgtggggcgctgtttcctggaacggatggaggactttcaaatctatgagaaatactgccagaacaagcctaggtcagaatcactgtggagacaatgtagcgattgcccgttctttcaagagtgtcagcggaagctggaccacaaactgagcctagatagttacttactgaagccagtgcaacgcattacgaagtatcagcttctacttaaagagatgcttaagtattcacggaattgcgaaggagccgaagacttgcaggaggcactctcttcgattctgggcattctgaaagccgtcaacgactctatgcacctcatcgctatcacaggatacgatggaaacctgggagatctaggcaagttactgatgcaaggatcattcagtgtgtggaccgaccataaacggggacacactaaggtgaaagagcttgcaagatttaagcccatgcagaggcatctgttcctgcacgagaaagccgtcctgttctgcaagaagcgcgaagagaacggggagggctacgagaaagcgccctcctatagctataagcagtcactcaacatggccgccgtcgggatcactgaaaatgtaaagggagacgcaaagaagtttgaaatctggtataacgcaagggaggaagtctacattgtccaggctcccacaccagagataaaggccgcatgggttaatgagattcgcaaggtgttaacatctcagttacaggcctgcagagaggcatcccaacatagggcactggagcaatcccagtctctgcccttacctgcgccaactagcacctccccatcacggggcaactccagaaacatcaagaaactggaggaaagaaagaccgaccccctttccttggaaggctatgtttcttccgccccacttactaaacccccagagaagggaaaagggtggagcaagacgagtcactccctcgaggcgccagaggatgacggcggctggtcctccgcagaggagcagattaactcttcagatgctgaggaagatggggggctgggacctaagaagctggtgcctggaaaatacactgtagtagctgatcatgagaaaggtgggccagatgccttgcgagtccgttcaggcgacgtagtggagctggttcaagagggggatgaagggctctggtacgtcagggaccctacaaccggcaaagaaggctgggtccctgcatcttccttatcagtgcgtctgggaccctccggctccgcccagtgcctgtcctcttctgagtcctctccggggagcgccgtccttagtaattcttccagctgtagcgagggaggtcaagcacctttttcagacttacagggatag

SEQ ID NO: 217597 - DNA, 3372 bp, Artificial Sequence
  derived and/or modified sequence
atgaccgtacgccgcctctctctcctgtgcagagatctgtgggcactttggctcctactcaaagctggtgctgatgaaattatgcatcaagacattgtcccactgtgtgccgccgacatacaggaccagctaaagaagagattcgcctatctctcgggcgggcgcgggcaagatgggtcccccgttattacattccccgactacccggcattttccgagattcctgacaaggaattccagaacgttatgacttacttaaccagcatcccttccctgcaagatgctggcataggctttatactggttattgatagaaggcgcgataaatggacttcggtgaaagccagtgtgctgcgcattgctgcatcatttccagccaacctgcagctggtgttagtgttacgcccgacgggtttcttccagagaaccttaagtgatattgcgttcaagtttaacagagacgacttcaagatgaaggtccccgtcatcatgcttagcagtgtgcctgatctccacgggtacatcgataagagtcagctgactgaggatctggggggcaccctagactattgccattctagatggctctgtcagagaaccgccatagaatctttcgcgcttatggtgaagcagactgctcagatgctccagagctttggtactgagctggcggagacagaactgcccaacgatgtccaatcgacgagttccgttctttgtgcccacactgaaaagaaagacaaagcaaaggaggatctgagattggccctgaaggaaggacacagcgtgctggaaagcctgcgggagctacaggctgagggaagcgagcctagcgttaaccaggaccagctggacaaccaagcaacggtacaacgcctgctggcacagctgaacgaaacagaagcggcctttgacgagttttgggcaaaacatcagcaaaagttggaacagtgcttacaactgcgccattttgaacaggggtttcgcgaggtcaaagccatccttgatgctgcctcccaaaaaattgcgaccttcaccgacatcgggaattccctggcccacgtcgaacatctgctcagggatctggcttcattcgaggagaagtctggtgtagcagtcgagagggccagagccctgagtctggatggcgaacagctgatcgggaacaaacactatgccgttgactccattcggccgaaatgtcaggaacttagacacctgtgcgatcagtttagcgccgaaatcgctaggcgtcgcggactgctcagcaagagcttggagctccaccggcggttggagacttccatgaaatggtgtgacgagggaatctacttactggcctctcaaccggtggacaagtgccagagccaggacggggctgaggccgcgctgcaggaaatcgaaaaattcctagagactggcgccgaaaataagatccaggagttaaacgccatttacaaggagtatgagtctattctgaaccaggatttgatggaacacgttagaaaggtgtttcagaagcaggcctccatggaagaggtgtttcatcgacggcaagcatctctgaagaagctcgcagcaagacagacacgccctgtgcagcccgtcgctcccaggcccgaggctctagctaaaagcccatgtcccagtcccgggatccgccgaggctctgaaaacagctcaagcgagggaggcgcactccggaggggcccatacaggagggcgaagagcgagatgtctgagagcaggcaaggccgcggctccgcaggagaggaggaagagtctctcgccattctccgaaggcacgtcatgtctgaactactcgatacagagagggcttacgtcgaagagctactctgtgtgctggaggggtacgctgcggagatggacaaccctctgatggcccatcttctcagtactggccttcataataagaaagatgtgttattcggcaacatggaagaaatttaccacttccacaacaggatcttcttgagggaactcgagaattacacagattgccctgaattggtaggcagatgcttccttgaaaggatggaggactttcaaatttacgagaaatactgtcagaataaaccaagatctgagtcactgtggcgccagtgctccgattgcccctttttccaggagtgtcagagaaaactggatcacaagctttctctcgacagctacctgttaaaaccagtgcagcgcatcacaaaataccagctgctgttgaaggagatgctgaagtacagtcgtaactgtgagggtgcagaggatctgcaagaagcactatccagcattctggggatcttaaaagcagtgaacgacagcatgcacctcattgcgattacgggatatgatggcaacctaggggatctgggtaaactgctgatgcaggggtccttttccgtgtggaccgatcataagcggggccacacgaaggtcaaggagttggccaggttcaagcccatgcaaagacatctgttcctgcatgaaaaggcggtcttgttttgcaaaaagcgggaagagaatggagaggggtacgaaaaggctccatcctattcttacaagcaatcactgaatatggccgccgttggaatcaccgaaaacgtcaaaggggacgccaagaaattcgagatctggtacaatgctagagaggaggtatatattgtgcaagctccgactcccgaaatcaaagccgcatgggttaatgaaatcagaaaagtgttgacttctcagcttcaggcatgcagagaggcgtctcagcatcgggcccttgagcaaagtcaaagtttgcctctgcctgcaccaacttcaacatccccatcgaggggaaatagtcgaaatatcaagaagctggaggaacgcaagaccgacccactgtccctggaaggctacgtatccagcgctccactgaccaagcccccagaaaagggtaagggatggagcaaaaccagtcactccttggaggcccctgaagatgatggtggatggtctagtgctgaagagcaaataaatagctcagacgcggaggaggacgggggcctcgggccaaagaaactggtgcccggaaaatataccgtggttgccgatcatgagaagggcgggcctgatgccctgcgcgtgagatccggagacgtcgtcgaactggtccaggagggggacgaagggttgtggtatgttcgtgatccaactacgggtaaagagggctgggtcccagcatcttccctctccgtgaggctcggacccagtggttcagcgcagtgcctaagcagttctgaatcatcgcccggcagtgccgtcctctctaatagcagctcctgtagcgagggggggcaggccccattctccgaccttcagggctag

SEQ ID NO: 217598 - DNA, 3342 bp, Artificial Sequence
  derived and/or modified sequence
atgggggatgggaaggcagttcggatatctgtggcggaaatgaagagctactatctttattccgagtggtgtagctggctcctctccgttgcagaggatgaaatcatgcaccaggatattgtgccgctttgtgccgcagatatccaggatcaactgaaaaagaggttcgcgtacctgagtggaggcagaggtcaggacggttcacccgttatcactttccctgactaccctgccttcagcgagatccccgacaaggagttccagaacgtaatgacttacttgacctctatcccctccttgcaggacgctgggattggatttattctggtgattgaccgcaggagagataaatggacatccgtcaaggcttcagtcctgcgcatagccgcctctttccccgctaacctccagctggtgttggtgctcagacctactggatttttccagcggacactgtcagatatagcttttaaattcaatcgcgacgattttaagatgaaagtgcctgtcattatgctaagtagcgtccccgacctccacggctatattgacaagtcccagctaaccgaagacctgggtggaacacttgattactgtcacagcaggtggctttgccagcgcactgcaatagagtcattcgccctgatggttaaacagactgcccagatgttacagtccttcggcaccgaactcgccgagacagagctgcctaatgatgttcaatccacaagctcagtgttatgtgctcataccgagaagaaggataaagcaaaggaggacctgagactggccctcaaagagggacatagtgtgctcgagtcactgcgggaattgcaggccgagggcagtgaaccttccgtgaaccaagaccagctggataaccaggcaaccgtccagaggctgctggcccagctaaatgagacagaggctgccttcgacgaattctgggcaaaacatcagcaaaagttagagcaatgcttgcagctgcgacatttcgaacaaggatttagggaagtaaaagcaatactggatgccgcatctcagaaaattgcgacgttcacagatatcggaaattcgctggcccacgtggagcatcttttgagagacctggccagctttgaagaaaaatctggtgtggcggtggagcgtgccagagccctcagtttggacggtgagcagcttattggcaataagcactatgcagttgactccattaggccgaagtgtcaggaactgcgccatctatgcgatcagtttagcgcagagatcgcgcgtcggcgcggactgctgagcaaatctttggaactacaccgtaggctggagacatctatgaagtggtgcgatgaaggaatttacctgctggccagccaacctgttgataaatgtcagtcgcaggacggcgccgaagctgcacttcaggaaatcgagaagtttcttgagacaggcgctgagaacaaaatacaggaactaaatgctatctacaaagagtatgagtccattcttaatcaggacctgatggaacacgtgcgcaaagtattccagaaacaagcttccatggaggaagtgtttcaccggcgccaagcctccctgaagaagcttgcagctaggcaaactaggcctgtccagcccgtggccccacgtcccgaggctctggctaagtccccatgtcctagccctggtataaggcgaggcagcgagaacagcagctcggaggggggagcactccgtcgcggaccatatcgtagggctaagtccgaaatgagcgaatctcgccagggtagggggtctgcgggcgaagaagaagagtcccttgccatattgcgcaggcatgtgatgagcgaactgctggataccgagagggcatatgttgaggagctgctgtgcgtgctggagggatacgctgctgagatggataaccctctgatggcacatctactcagcaccggcctgcacaataaaaaggacgtgctgttcggaaatatggaggaaatataccacttccataatcgtatcttcttaagggagctggagaattatactgactgtcccgaactcgtcggacgctgcttcctggagcgaatggaggattttcagatctacgagaagtattgccaaaacaagccacggtcagaatctctgtggagacaatgttctgattgtccattttttcaagagtgccagcgcaagctggatcataaattaagcttagatagttatctgctgaagcccgtccagagaattacaaagtaccagctgctgttgaaggaaatgcttaaatatagtagaaattgtgagggagccgaggatctccaggaagctctctcctctatactgggaatcctgaaagcggtcaacgattcaatgcatttgatcgccattacagggtacgacgggaacctgggcgacctcggtaagctcctcatgcagggctctttcagcgtgtggaccgaccacaagcggggccacactaaggttaaggagctcgctaggttcaaaccaatgcaacgtcacctattccttcacgagaaggccgtcttgttttgtaaaaagcgcgaagaaaatggtgaggggtatgagaaagcaccatcgtactcctacaaacaatctcttaacatggctgccgttggaatcacagagaacgttaagggggatgcaaagaagttcgaaatctggtataacgctcgagaggaggtgtacatcgtgcaagcacccactcctgaaattaaagccgcctgggtgaacgagatccgcaaggtgctgacatctcaattgcaagcctgtcgcgaagcgtcacagcaccgcgccttggagcagtcacaatctctgccactgccagccccgacctctacaagcccctctcggggtaactcccgaaatatcaagaaattggaggagcggaagaccgacccactctcactggagggatatgtttcttctgccccactgaccaagccgcccgagaagggcaagggttggagcaagactagccattccctggaggctccggaagacgatggcggctggtctagtgccgaggagcagataaatagcagtgacgcagaagaggacggtggccttgggcccaaaaagctggtccctgggaagtacaccgtagtggccgaccatgagaaaggtggaccagatgccctccgcgtgagatctggagatgtcgtggaactcgtacaggagggagatgaaggcctatggtatgtgcgcgacccaaccactggcaaagaaggttgggtccctgcctctagcctaagcgtgagacttggtccatctggctctgcccagtgtctctcaagctcaggcaaagctcacgtaccacgcgcacatccatag

SEQ ID NO: 217599 - DNA, 2712 bp, Artificial Sequence
  derived and/or modified sequence
ttgaagatgcctgttatcatgctgagcagcgtaccagatctacatgggtatatcgacaaatcgcagctgactgaggacctaggaggtactctggattactgccatagcaggtggttgtgccagcggaccgccatagagtcctttgctcttatggtaaaacaaactgcccagatgctccaatcatttggcaccgagctcgccgagacagagctgcccaacgatgttcaatcaacctcatcagtactatgtgcccatacagagaagaaggacaaagccaaagaagaccttcggctcgctctgaaagaaggccactctgttctcgagtccctaagagagttgcaagccgaaggatcagaaccatctgtgaatcaggaccagttagacaatcaggcaactgttcaacgtctgctggctcagcttaatgaaaccgaagccgcatttgacgagttttgggctaagcaccagcaaaagctggaacaatgtctccaactgcggcatttcgagcagggcttcagagaagttaaagcgatactggacgccgcaagtcagaagattgctacttttaccgacatcggcaacagcctggcacatgtcgaacacctgctgagagacctggcgagctttgaggaaaaaagtggcgtggcggttgagcgagcacgggcactgtctctcgatggtgagcagctaattggcaataaacattacgctgtggactctattcgccctaagtgccaagagctacggcacctctgcgaccagttctcagctgaaatcgcgaggagacgcggactgctctctaaatctcttgaactccaccgtcgcctggagacttctatgaagtggtgtgacgaaggtatctacctcctggcatcgcagcccgtagacaagtgccagtcccaggatggggcggaagcagccttgcaggagatcgaaaaatttctggaaaccggggcagagaataaaatacaagagttgaacgctatctataaggagtacgaatctatactgaatcaggatctgatggaacacgtccgaaaggtgttccagaaacaggccagcatggaagaagtgttccacaggagacaagcaagtctcaagaagttagccgctcgtcagactcgacccgtgcagcctgtggcccccaggccggaggcgctggcgaagagcccatgccctagtccgggtatccgccgggggtcagagaacagttctagcgagggcggagctctacgcagaggcccttacaggagggccaagtctgagatgagcgaaagcaggcaaggacgcggtagcgctggtgaagaagaagagagcctcgctatccttcggcgccatgtgatgtcagagttattggataccgagcgcgcctatgtggaagagctgctctgcgtccttgaagggtatgccgccgaaatggacaacccacttatggcccacctacttagcacgggcctccataacaaaaaagatgtcttgtttgggaatatggaggaaatctaccatttccataaccgcatttttctccgggagcttgaaaactatacggattgtccagaactggttggccgctgcttcctcgaaaggatggaggacttccagatttacgaaaagtattgtcagaacaagccccggagcgaatccctgtggagacagtgttctgactgccccttcttccaggagtgtcaacgcaagttagatcacaaactgtccctcgactcatacctcctgaaacctgtacagaggattaccaagtaccagctccttctgaaagaaatgctaaaatattcccgtaactgtgagggtgccgaagaccttcaggaggccctctcctctattttaggtatcctcaaggcggtgaacgatagtatgcaccttatagccatcacagggtacgatggcaacctgggggacctcggcaaactcttaatgcaaggttcctttagcgtatggacagaccataagaggggacataccaaagtaaaggagctggcccgatttaaacccatgcagaggcacctctttctgcatgagaaggcagtgcttttctgcaagaagcgtgaagagaatggagaaggctacgaaaaagcaccttcatactcatataaacagtccctgaacatggccgccgtgggtattaccgagaatgtaaaaggagacgcaaagaagttcgaaatttggtataacgcaagggaagaggtctacattgttcaggccccaacaccagagatcaaggcagcctgggtgaatgagattagaaaagtcctgacgtcacagctccaggcttgtagggaagcttcccagcacagggctttagaacagtcacagagtctgcctctgccagcaccaacctcaacaagtccatctaggggaaatagccgaaacattaaaaagctggaggagcggaagacggaccctctgagtctcgagggctacgtctcgtccgcacccttgaccaagccacccgagaaaggtaagggatggtccaagacctctcactcactcgaggctccagaagatgacggcggctggagcagcgcagaggaacagattaacagcagcgatgccgaagaagacggtggccttggacctaagaagttggttccaggaaaatacaccgtcgtggctgatcatgaaaaaggcggtccagacgctttaagagtgagaagcggagatgtcgtcgaattggttcaggaaggtgatgaaggcctctag

SEQ ID NO: 217600 - DNA, 3390 bp, Artificial Sequence
  derived and/or modified sequence
atggccgagaagggggccagccggggcaccctgcggcggctgtggagcctgcccaggagaagaagaggaacagctggccgcagcaggccagatgagatcatgcaccaggacatcgtgcccctgtgtgccgctgacatccaggaccagctgaagaagagatttgcctacctgagcggcggccggggccaggacggcagccctgtgatcaccttcccagactacccagccttcagcgagatcccagacaaggagttccagaatgtgatgacctacctgaccagcatccccagcctgcaggatgctggcatcggcttcatcctggtgattgacagaagaagagacaagtggacctctgtgaaggcctctgtgctgagaattgctgccagcttccctgccaacctgcagctggtgctggtgctgcggcccaccggcttcttccagaggaccctgagtgacatcgccttcaagttcaacagagatgacttcaagatgaaggtgcctgtgatcatgctgagctctgtgcctgacctgcacggctacatcgacaagagccagctgacagaggacctgggcggcaccctggactactgccacagccgctggctgtgccagaggacagccatcgagagctttgccctgatggtgaagcagacagcccagatgctgcagagctttggaacagagctggccgagacagagctgcccaatgatgtgcagagcaccagctctgtgctgtgtgcccacacagagaagaaggacaaggccaaggaggacctgcggctggccctgaaggagggccacagcgtgctggagagcctgcgggagctgcaggccgagggcagcgagcccagcgtgaaccaggaccagctggacaaccaggccaccgtgcagaggctgctggcccagctgaatgaaacagaggccgcctttgatgagttctgggccaagcaccagcagaagctggagcagtgcctgcagctgcggcactttgagcagggcttccgggaggtgaaggccatcctggatgctgccagccagaagatcgccaccttcacagacatcggcaacagcctggcccacgtggagcacctgctgcgggacctggccagctttgaggagaagtctggagtggccgtggagcgggcccgggccctgagcctggatggagagcagctgattggcaacaagcactatgctgtggacagcatccggcccaagtgccaggagctgcggcacctgtgtgaccagttctctgctgagatcgcccggcggcggggcctgctgagcaagagcctggagctgcaccggcggctggagacctccatgaagtggtgtgatgagggcatctacctgctggccagccagcctgtggacaagtgccagagccaggatggagctgaggccgccctgcaggagattgagaagttcctggagactggagctgagaacaagatccaggagctgaatgccatctacaaggagtatgagagcatcctgaaccaggacctgatggagcacgtgaggaaggtgttccagaagcaggcctccatggaggaggtgttccaccggcggcaggccagcctgaagaagctggccgcccggcagaccaggcctgtgcagcctgtggcccccaggcctgaggccctggccaagagcccctgccccagccctggcatccggcggggcagcgagaacagcagcagcgagggcggggccctgcggcggggcccctacagaagagccaagtctgagatgtctgagagccggcagggccggggcagcgctggggaggaggaggagagcctggccatcctgcggcggcacgtgatgtctgagctgctggacacagagcgggcctacgtggaggagctgctgtgtgtgctggagggctacgccgctgagatggacaaccccctgatggcccacctgctgagcacaggcctgcacaacaagaaggatgtgctgtttggaaacatggaggagatctaccacttccacaaccgcatcttcctgcgggagctggagaactacacagactgcccagagctggtgggccgctgcttcctggagaggatggaggacttccagatctatgagaagtactgccagaacaagcccaggtctgagagcctgtggaggcagtgcagcgactgccccttcttccaggagtgccagaggaagctggaccacaagctgagcctggacagctacctgctgaagcctgtgcagaggatcaccaagtaccagctgctgctgaaggagatgctgaagtacagcaggaactgtgagggcgctgaggacctgcaggaggccctgagcagcatcctgggcatcctgaaggctgtgaatgacagcatgcacctgattgccatcaccggctatgatggcaacctgggggacctgggcaagctgctgatgcagggcagcttctctgtgtggacagaccacaagaggggccacaccaaggtgaaggagctggcccgcttcaagcccatgcagaggcacctgttcctgcacgagaaggctgtgctcttctgcaagaagcgggaggagaatggagagggctatgagaaggcccccagctacagctacaagcagagcctgaacatggctgctgtgggcatcacagaaaatgtgaagggagatgccaagaagtttgagatctggtacaatgcccgggaggaggtgtacatcgtgcaggcccccaccccagagatcaaggccgcctgggtgaatgagatcaggaaggtgctgaccagccagctgcaggcctgccgggaggccagccagcaccgggccctggagcagagccagagcctgcccctgcctgcccccaccagcaccagccccagccggggcaacagcaggaacatcaagaagctggaggagaggaagacagaccccctgagcctggagggctacgtgtcctctgcccccctgaccaagcccccagagaagggcaagggctggagcaagaccagccacagcctggaggccccagaagatgatggcggctggagcagcgctgaggagcagatcaacagcagtgatgctgaggaggatggcggcctgggccccaagaagctggtgcctgggaagtacacagtggtggccgaccacgagaagggcggcccagatgccctgcgggtgcgctctggagatgtggtggagctggtgcaggagggagatgagggcctgtggtacgtgcgggaccccaccaccgggaaggagggctgggtgcctgccagcagcctgtctgtgcggctgggccccagcggcagcgcccagtgcctgagcagcagcgagagcagccctggcagcgctgtgctgagcaacagcagcagctgcagcgagggcggccaggcccccttcagtgacctgcagggctag

SEQ ID NO: 217601 - DNA, 3549 bp, Artificial Sequence
  derived and/or modified sequence
atggcccgggtggagagccctgtgcctgctgcccgggccagcctgaccggcagctgtgtgctgggccaggccatgcccctgcggggcggggccggccccagccctgccagccacggccccacccacggccccagcgaccccaggacctgcctgcccggccgcggggccggcggcatgaggccccacggccgcggggccctgggctgctgcggcctgtgcagcttctacacctgccacggggctgctggagatgagatcatgcaccaggacatcgtgcccctgtgtgccgctgacatccaggaccagctgaagaagagatttgcctacctgagcggcggccggggccaggacggcagccctgtgatcaccttcccagactacccagccttcagcgagatcccagacaaggagttccagaatgtgatgacctacctgaccagcatccccagcctgcaggatgctggcatcggcttcatcctggtgattgacagaagaagagacaagtggacctctgtgaaggcctctgtgctgagaattgctgccagcttccctgccaacctgcagctggtgctggtgctgcggcccaccggcttcttccagaggaccctgagtgacatcgccttcaagttcaacagagatgacttcaagatgaaggtgcctgtgatcatgctgagctctgtgcctgacctgcacggctacatcgacaagagccagctgacagaggacctgggcggcaccctggactactgccacagccgctggctgtgccagaggacagccatcgagagctttgccctgatggtgaagcagacagcccagatgctgcagagctttggaacagagctggccgagacagagctgcccaatgatgtgcagagcaccagctctgtgctgtgtgcccacacagagaagaaggacaaggccaaggaggacctgcggctggccctgaaggagggccacagcgtgctggagagcctgcgggagctgcaggccgagggcagcgagcccagcgtgaaccaggaccagctggacaaccaggccaccgtgcagaggctgctggcccagctgaatgaaacagaagctgcctttgatgagttctgggccaagcaccagcagaagctggagcagtgcctgcagctgcggcactttgagcagggcttccgggaggtgaaggccatcctggatgctgccagccagaagatcgccaccttcacagacatcggcaacagcctggcccacgtggagcacctgctgcgggacctggccagctttgaggagaagagcggcgtggccgtggagcgggcccgggccctgagcctggatggagagcagctgattggcaacaagcactatgctgtggacagcatccggcccaagtgccaggagctgcggcacctgtgtgaccagttctctgctgagatcgccaggagaagaggcctgctgagcaagagcctggagctgcaccggcggctggagacctccatgaagtggtgtgatgagggcatctacctgctggccagccagcctgtggacaagtgccagagccaggatggagctgaggccgccctgcaggagattgagaagttcctggagaccggggctgagaacaagatccaggagctgaatgccatctacaaggagtatgagagcatcctgaaccaggacctgatggagcacgtgaggaaggtgttccagaagcaggcctccatggaggaggtgttccaccggcggcaggccagcctgaagaagctggccgcccggcagaccaggcctgtgcagcctgtggcccccaggcctgaggccctggccaagagcccctgccccagccctggcatcagaagaggcagcgagaacagcagcagcgagggcggggccctgcggcggggcccctaccgccgggccaagtctgagatgtctgagagccggcagggccggggcagcgctggggaggaggaggagagcctggccatcctgcggagacatgtgatgtctgagctgctggacacagagcgggcctacgtggaggagctgctgtgtgtgctggagggctatgctgctgagatggacaaccccctgatggcccacctgctgagcacaggcctgcacaacaagaaggatgtgctgtttggaaacatggaggagatctaccacttccacaaccgcatcttcctgcgggagctggagaactacacagactgcccagagctggtgggccgctgcttcctggagaggatggaggacttccagatctatgagaagtactgccagaacaagcccaggtctgagagcctgtggaggcagtgcagcgactgccccttcttccaggagtgccagaggaagctggaccacaagctgagcctggacagctacctgctgaagcctgtgcagaggatcaccaagtaccagctgctgctgaaggagatgctgaagtacagcaggaactgtgagggcgctgaggacctgcaggaggccctgagcagcatcctgggcatcctgaaggctgtgaatgacagcatgcacctgattgccatcaccggctatgatggcaacctgggggacctgggcaagctgctgatgcagggcagcttctctgtgtggacagaccacaagaggggccacaccaaggtgaaggagctggcccgcttcaagcccatgcagaggcacctgttcctgcacgagaaggctgtgctcttctgcaagaagcgggaggagaatggagagggctatgagaaggcccccagctacagctacaagcagagcctgaacatggctgctgtgggcatcacagaaaatgtgaagggagatgccaagaagtttgagatctggtacaatgcccgggaggaggtgtacatcgtgcaggcccccaccccagagatcaaggccgcctgggtgaatgagatcaggaaggtgctgaccagccagctgcaggcctgccgggaggccagccagcaccgggccctggagcagagccagagcctgcccctgcctgcccccaccagcaccagccccagccggggcaacagcaggaacatcaagaagctggaggagaggaagacagaccccctgagcctggagggctacgtgagcagcgcccccctgaccaagcccccagagaagggcaagggctggagcaagaccagccacagcctggaggccccagaagatgatggcggctggagcagcgctgaggagcagatcaacagcagtgatgctgaagaagatggcggcctgggccccaagaagctggtgcctgggaagtacacagtggtggccgaccacgagaagggcggcccagatgccctgcgggtgcgctctggagatgtggtggagctggtgcaggagggagatgagggcctgtggtacgtgcgggaccccaccaccgggaaggagggctgggtgcctgccagcagcctgtctgtgcggctgggccccagcggcagcgcccagtgcctgagcagcagcgagagcagccctggcagcgctgtgctgagcaacagcagcagctgcagcgagggcggccaggcccccttcagtgacctgcagggctag

SEQ ID NO: 217602 - DNA, 3372 bp, Artificial Sequence
  derived and/or modified sequence
atgacagtgcggcggctgagcctgctgtgccgggacctgtgggccctgtggctgctgctgaaggccggggctgatgagatcatgcaccaggacatcgtgcccctgtgtgccgctgacatccaggaccagctgaagaagagatttgcctacctgagcggcggccggggccaggacggcagccctgtgatcaccttcccagactacccagccttcagcgagatcccagacaaggagttccagaatgtgatgacctacctgaccagcatccccagcctgcaggatgctggcatcggcttcatcctggtgattgacagaagaagagacaagtggacctctgtgaaggcctctgtgctgagaattgctgccagcttccctgccaacctgcagctggtgctggtgctgcggcccaccggcttcttccagaggaccctgagtgacatcgccttcaagttcaacagagatgacttcaagatgaaggtgcctgtgatcatgctgagctctgtgcctgacctgcacggctacatcgacaagagccagctgacagaggacctgggcggcaccctggactactgccacagccgctggctgtgccagaggacagccatcgagagctttgccctgatggtgaagcagacagcccagatgctgcagagctttggaacagagctggccgagacagagctgcccaatgatgtgcagagcaccagctctgtgctgtgtgcccacacagagaagaaggacaaggccaaggaggacctgcggctggccctgaaggagggccacagcgtgctggagagcctgcgggagctgcaggccgagggcagcgagcccagcgtgaaccaggaccagctggacaaccaggccaccgtgcagaggctgctggcccagctgaatgaaacagaggccgcctttgatgagttctgggccaagcaccagcagaagctggagcagtgcctgcagctgcggcactttgagcagggcttccgggaggtgaaggccatcctggatgctgccagccagaagatcgccaccttcacagacatcggcaacagcctggcccacgtggagcacctgctgcgggacctggccagctttgaggagaagtctggagtggccgtggagcgggcccgggccctgagcctggatggagagcagctgattggcaacaagcactatgctgtggacagcatccggcccaagtgccaggagctgcggcacctgtgtgaccagttctctgctgagatcgcccggcggcggggcctgctgagcaagagcctggagctgcaccggcggctggagacctccatgaagtggtgtgatgagggcatctacctgctggccagccagcctgtggacaagtgccagagccaggatggagctgaggccgccctgcaggagattgagaagttcctggagactggagctgagaacaagatccaggagctgaatgccatctacaaggagtatgagagcatcctgaaccaggacctgatggagcacgtgaggaaggtgttccagaagcaggcctccatggaggaggtgttccaccggcggcaggccagcctgaagaagctggccgcccggcagaccaggcctgtgcagcctgtggcccccaggcctgaggccctggccaagagcccctgccccagccctggcatccggcggggcagcgagaacagcagcagcgagggcggggccctgcggcggggcccctacagaagagccaagtctgagatgtctgagagccggcagggccggggcagcgctggggaggaggaggagagcctggccatcctgcggcggcacgtgatgtctgagctgctggacacagagcgggcctacgtggaggagctgctgtgtgtgctggagggctacgccgctgagatggacaaccccctgatggcccacctgctgagcacaggcctgcacaacaagaaggatgtgctgtttggaaacatggaggagatctaccacttccacaaccgcatcttcctgcgggagctggagaactacacagactgcccagagctggtgggccgctgcttcctggagaggatggaggacttccagatctatgagaagtactgccagaacaagcccaggtctgagagcctgtggaggcagtgcagcgactgccccttcttccaggagtgccagaggaagctggaccacaagctgagcctggacagctacctgctgaagcctgtgcagaggatcaccaagtaccagctgctgctgaaggagatgctgaagtacagcaggaactgtgagggcgctgaggacctgcaggaggccctgagcagcatcctgggcatcctgaaggctgtgaatgacagcatgcacctgattgccatcaccggctatgatggcaacctgggggacctgggcaagctgctgatgcagggcagcttctctgtgtggacagaccacaagaggggccacaccaaggtgaaggagctggcccgcttcaagcccatgcagaggcacctgttcctgcacgagaaggctgtgctcttctgcaagaagcgggaggagaatggagagggctatgagaaggcccccagctacagctacaagcagagcctgaacatggctgctgtgggcatcacagaaaatgtgaagggagatgccaagaagtttgagatctggtacaatgcccgggaggaggtgtacatcgtgcaggcccccaccccagagatcaaggccgcctgggtgaatgagatcaggaaggtgctgaccagccagctgcaggcctgccgggaggccagccagcaccgggccctggagcagagccagagcctgcccctgcctgcccccaccagcaccagccccagccggggcaacagcaggaacatcaagaagctggaggagaggaagacagaccccctgagcctggagggctacgtgtcctctgcccccctgaccaagcccccagagaagggcaagggctggagcaagaccagccacagcctggaggccccagaagatgatggcggctggagcagcgctgaggagcagatcaacagcagtgatgctgaggaggatggcggcctgggccccaagaagctggtgcctgggaagtacacagtggtggccgaccacgagaagggcggcccagatgccctgcgggtgcgctctggagatgtggtggagctggtgcaggagggagatgagggcctgtggtacgtgcgggaccccaccaccgggaaggagggctgggtgcctgccagcagcctgtctgtgcggctgggccccagcggcagcgcccagtgcctgagcagcagcgagagcagccctggcagcgctgtgctgagcaacagcagcagctgcagcgagggcggccaggcccccttcagtgacctgcagggctag

SEQ ID NO: 217603 - DNA, 3342 bp, Artificial Sequence
  derived and/or modified sequence
atgggagatggcaaggctgtgcgcatctctgtggccgagatgaagagctactacctgtacagcgagtggtgctcctggctgctgtctgtggccgaggatgagatcatgcaccaggacatcgtgcccctgtgtgccgctgacatccaggaccagctgaagaagagatttgcctacctgagcggcggccggggccaggacggcagccctgtgatcaccttcccagactacccagccttcagcgagatcccagacaaggagttccagaatgtgatgacctacctgaccagcatccccagcctgcaggatgctggcatcggcttcatcctggtgattgacagaagaagagacaagtggacctctgtgaaggcctctgtgctgagaattgctgccagcttccctgccaacctgcagctggtgctggtgctgcggcccaccggcttcttccagaggaccctgagtgacatcgccttcaagttcaacagagatgacttcaagatgaaggtgcctgtgatcatgctgagctctgtgcctgacctgcacggctacatcgacaagagccagctgacagaggacctgggcggcaccctggactactgccacagccgctggctgtgccagaggacagccatcgagagctttgccctgatggtgaagcagacagcccagatgctgcagagctttggaacagagctggccgagacagagctgcccaatgatgtgcagagcaccagctctgtgctgtgtgcccacacagagaagaaggacaaggccaaggaggacctgcggctggccctgaaggagggccacagcgtgctggagagcctgcgggagctgcaggccgagggcagcgagcccagcgtgaaccaggaccagctggacaaccaggccaccgtgcagaggctgctggcccagctgaatgaaacagaggccgcctttgatgagttctgggccaagcaccagcagaagctggagcagtgcctgcagctgcggcactttgagcagggcttccgggaggtgaaggccatcctggatgctgccagccagaagatcgccaccttcacagacatcggcaacagcctggcccacgtggagcacctgctgcgggacctggccagctttgaggagaagtctggagtggccgtggagcgggcccgggccctgagcctggatggagagcagctgattggcaacaagcactatgctgtggacagcatccggcccaagtgccaggagctgcggcacctgtgtgaccagttctctgctgagatcgcccggcggcggggcctgctgagcaagagcctggagctgcaccggcggctggagacctccatgaagtggtgtgatgagggcatctacctgctggccagccagcctgtggacaagtgccagagccaggatggagctgaggccgccctgcaggagattgagaagttcctggagactggagctgagaacaagatccaggagctgaatgccatctacaaggagtatgagagcatcctgaaccaggacctgatggagcacgtgaggaaggtgttccagaagcaggcctccatggaggaggtgttccaccggcggcaggccagcctgaagaagctggccgcccggcagaccaggcctgtgcagcctgtggcccccaggcctgaggccctggccaagagcccctgccccagccctggcatccggcggggcagcgagaacagcagcagcgagggcggggccctgcggcggggcccctacagaagagccaagtctgagatgtctgagagccggcagggccggggcagcgctggggaggaggaggagagcctggccatcctgcggcggcacgtgatgtctgagctgctggacacagagcgggcctacgtggaggagctgctgtgtgtgctggagggctacgccgctgagatggacaaccccctgatggcccacctgctgagcacaggcctgcacaacaagaaggatgtgctgtttggaaacatggaggagatctaccacttccacaaccgcatcttcctgcgggagctggagaactacacagactgcccagagctggtgggccgctgcttcctggagaggatggaggacttccagatctatgagaagtactgccagaacaagcccaggtctgagagcctgtggaggcagtgcagcgactgccccttcttccaggagtgccagaggaagctggaccacaagctgagcctggacagctacctgctgaagcctgtgcagaggatcaccaagtaccagctgctgctgaaggagatgctgaagtacagcaggaactgtgagggcgctgaggacctgcaggaggccctgagcagcatcctgggcatcctgaaggctgtgaatgacagcatgcacctgattgccatcaccggctatgatggcaacctgggggacctgggcaagctgctgatgcagggcagcttctctgtgtggacagaccacaagaggggccacaccaaggtgaaggagctggcccgcttcaagcccatgcagaggcacctgttcctgcacgagaaggctgtgctcttctgcaagaagcgggaggagaatggagagggctatgagaaggcccccagctacagctacaagcagagcctgaacatggctgctgtgggcatcacagaaaatgtgaagggagatgccaagaagtttgagatctggtacaatgcccgggaggaggtgtacatcgtgcaggcccccaccccagagatcaaggccgcctgggtgaatgagatcaggaaggtgctgaccagccagctgcaggcctgccgggaggccagccagcaccgggccctggagcagagccagagcctgcccctgcctgcccccaccagcaccagccccagccggggcaacagcaggaacatcaagaagctggaggagaggaagacagaccccctgagcctggagggctacgtgtcctctgcccccctgaccaagcccccagagaagggcaagggctggagcaagaccagccacagcctggaggccccagaagatgatggcggctggagcagcgctgaggagcagatcaacagcagtgatgctgaggaggatggcggcctgggccccaagaagctggtgcctgggaagtacacagtggtggccgaccacgagaagggcggcccagatgccctgcgggtgcgctctggagatgtggtggagctggtgcaggagggagatgagggcctgtggtacgtgcgggaccccaccaccgggaaggagggctgggtgcctgccagcagcctgtctgtgcggctgggccccagcggcagcgcccagtgcctgagcagcagcggcaaggcccacgtgccccgggcccacccctag

SEQ ID NO: 217604 - DNA, 2712 bp, Artificial Sequence
  derived and/or modified sequence
ctgaagatgcctgtgatcatgctgagctctgtgcctgacctgcacggctacatcgacaagagccagctgacagaggacctgggcggcaccctggactactgccacagccgctggctgtgccagaggacagccatcgagagctttgccctgatggtgaagcagacagcccagatgctgcagagctttggaacagagctggccgagacagagctgcccaatgatgtgcagagcaccagctctgtgctgtgtgcccacacagagaagaaggacaaggccaaggaggacctgcggctggccctgaaggagggccacagcgtgctggagagcctgcgggagctgcaggccgagggcagcgagcccagcgtgaaccaggaccagctggacaaccaggccaccgtgcagaggctgctggcccagctgaatgaaacagaagctgcctttgatgagttctgggccaagcaccagcagaagctggagcagtgcctgcagctgcggcactttgagcagggcttccgggaggtgaaggccatcctggatgctgccagccagaagatcgccaccttcacagacatcggcaacagcctggcccacgtggagcacctgctgcgggacctggccagctttgaggagaagagcggcgtggccgtggagcgggcccgggccctgagcctggatggagagcagctgattggcaacaagcactatgctgtggacagcatccggcccaagtgccaggagctgcggcacctgtgtgaccagttctctgctgagatcgccaggagaagaggcctgctgagcaagagcctggagctgcaccggcggctggagacctccatgaagtggtgtgatgagggcatctacctgctggccagccagcctgtggacaagtgccagagccaggatggagctgaggccgccctgcaggagattgagaagttcctggagaccggggctgagaacaagatccaggagctgaatgccatctacaaggagtatgagagcatcctgaaccaggacctgatggagcacgtgaggaaggtgttccagaagcaggcctccatggaggaggtgttccaccggcggcaggccagcctgaagaagctggccgcccggcagaccaggcctgtgcagcctgtggcccccaggcctgaggccctggccaagagcccctgccccagccctggcatcagaagaggcagcgagaacagcagcagcgagggcggggccctgcggcggggcccctaccgccgggccaagtctgagatgtctgagagccggcagggccggggcagcgctggggaggaggaggagagcctggccatcctgcggagacatgtgatgtctgagctgctggacacagagcgggcctacgtggaggagctgctgtgtgtgctggagggctatgctgctgagatggacaaccccctgatggcccacctgctgagcacaggcctgcacaacaagaaggatgtgctgtttggaaacatggaggagatctaccacttccacaaccgcatcttcctgcgggagctggagaactacacagactgcccagagctggtgggccgctgcttcctggagaggatggaggacttccagatctatgagaagtactgccagaacaagcccaggtctgagagcctgtggaggcagtgcagcgactgccccttcttccaggagtgccagaggaagctggaccacaagctgagcctggacagctacctgctgaagcctgtgcagaggatcaccaagtaccagctgctgctgaaggagatgctgaagtacagcaggaactgtgagggcgctgaggacctgcaggaggccctgagcagcatcctgggcatcctgaaggctgtgaatgacagcatgcacctgattgccatcaccggctatgatggcaacctgggggacctgggcaagctgctgatgcagggcagcttctctgtgtggacagaccacaagaggggccacaccaaggtgaaggagctggcccgcttcaagcccatgcagaggcacctgttcctgcacgagaaggctgtgctcttctgcaagaagcgggaggagaatggagagggctatgagaaggcccccagctacagctacaagcagagcctgaacatggctgctgtgggcatcacagaaaatgtgaagggagatgccaagaagtttgagatctggtacaatgcccgggaggaggtgtacatcgtgcaggcccccaccccagagatcaaggccgcctgggtgaatgagatcaggaaggtgctgaccagccagctgcaggcctgccgggaggccagccagcaccgggccctggagcagagccagagcctgcccctgcctgcccccaccagcaccagccccagccggggcaacagcaggaacatcaagaagctggaggagaggaagacagaccccctgagcctggagggctacgtgagcagcgcccccctgaccaagcccccagagaagggcaagggctggagcaagaccagccacagcctggaggccccagaagatgatggcggctggagcagcgctgaggagcagatcaacagcagtgatgctgaagaagatggcggcctgggccccaagaagctggtgcctgggaagtacacagtggtggccgaccacgagaagggcggcccagatgccctgcgggtgcgctctggagatgtggtggagctggtgcaggagggagatgagggcctgtag

SEQ ID NO: 217605 - DNA, 3413 bp, Artificial Sequence
  derived and/or modified sequence
ggctgccctgcagaggccaggtctgcccagcaaacccaggaaggtgtggcgtccccgcttcgcggccaagatggtgctggtgctgcgccatcctttgtgtgcccgggaagggcgttccgggagccgggtcgggggctcctgactcgcactgggcagcatgacggtgcgccggctgtcactgctgtgccgggacctctgggcgctgtggctgctgctgaaggccggcgcagatgaaatcatgcaccaggacatcgtcccgctctgtgctgccgacatccaggaccagctaaagaagcgctttgcttacctgtccggtgggcgggggcaggacggaagcccggttatcaccttccctgactacccggccttcagcgagattccggacaaggagttccagaatgtcatgacctacctcaccagcatccccagcctgcaggacgctggcatcggattcatcctggtgatagaccggcgacgggacaaatggacctccgtgaaggcgtccgtcctgcgcatcgcagcatctttcccggcaaacctgcagctcgtcctcgtgcttcgcccgacgggttttttccaaaggactctctccgacatcgctttcaaattcaatagagatgactttaagatgaaggtgccggtcataatgctgagctccgtaccagacttacacggttacatcgataagtcgcagctgaccgaggacctgggtgggaccctggactactgccactcccggtggctgtgccagcgcacggccatcgaaagtttcgccctcatggtgaagcagacggctcagatgctgcagtccttcgggaccgagctggctgaaacagagctgcccaatgacgtccagtcgacaagctcagtgctgtgtgcgcacacagagaagaaggacaaggcgaaggaggatttgaggctggcactgaaagaggggcacagtgtcctggagagcctcagggagctgcaggctgagggctcagagcccagtgtgaaccaggaccagcttgacaaccaggccaccgtgcagaggctcctggcccagctgaacgaaaccgaggctgccttcgatgagttctgggcaaagcatcagcagaaactggagcagtgtctgcagctccggcactttgagcagggcttccgggaggtcaaagccatcttggacgcagcgtcccagaagatagcaaccttcacagacatcggcaacagcctggcgcatgtggagcacctgctgagggacctggccagcttcgaggagaaatcaggcgtggccgtggagagggcccgggccctgtctctggacggcgagcagctcattgggaacaagcactacgcggtagactccatccgcccaaagtgccaggagctccggcacctctgtgaccagttctctgcggagatcgcaaggaggagggggctgctcagcaagtccctggagctgcaccgccgcctggagacgtccatgaagtggtgtgatgaagggatttacctgctggcctcacaacctgtggacaagtgccagtcccaggacggcgcggaggctgccctccaggaaatcgagaagtttttggagaccggtgcggaaaataagatccaggagctcaacgcgatttacaaggaatacgaatccatcctcaaccaagatctcatggagcacgtgcgaaaggtcttccagaagcaggcaagcatggaggaggtgttccaccgcaggcaggccagcctgaagaagctggcggccaggcagacgcggcccgtgcagccggtggcccccagacccgaggcactggcaaagtcgccctgcccctccccaggcattcggcgaggctctgagaactccagctccgagggcggtgcgctccggagagggccctaccggagggccaagagtgagatgagtgagagccggcagggccgcggctcagcgggggaggaggaggaaagcctggccatcctgcgcaggcacgtgatgagcgagctcctggacacagaacgggcctacgtggaggagctgctgtgcgtcctggagggctacgccgcggagatggataacccactgatggctcacctcctgtcaacaggccttcacaacaagaaggatgttttgtttggaaacatggaggaaatctatcacttccacaacaggatattcctcagggagctggaaaactacactgactgcccagaactggttggaagatgctttctggagaggatggaagatttccagatctatgagaagtactgtcagaacaagccccgctctgagagcctgtggagacagtgctccgactgcccgtttttccaggaatgccagagaaagctggaccacaagctgagcctggactcctacctgctgaagccagtgcagaggatcaccaagtaccagctgctgctcaaggaaatgctgaaatacagcaggaactgcgagggggctgaggacctgcaggaggcgctgagctccatcctgggcatcctgaaggccgtgaacgactccatgcacctcatcgctatcaccggctatgacgggaatctcggcgacctgggcaagctgctgatgcagggctcgttcagcgtctggaccgaccacaagaggggccacaccaaggtgaaggagctggccaggttcaagcccatgcagcggcacctgttcctgcacgagaaggcagtgctcttctgcaagaagagggaggagaatggggaggggtatgagaaagctccctcctacagctacaagcagtccttaaacatggctgccgttggcattacggagaacgtgaagggagatgctaagaagttcgagatctggtacaacgcgcgcgaggaggtctacatcgtccaggcgccaactcctgagattaaagccgcgtgggtgaatgaaattcggaaagtgctgaccagccagctgcaggcttgtagagaagccagccagcaccgggcgctggagcagtcacagagcctgcccctgccggccccgaccagcaccagtccctcaagaggaaactcaaggaacatcaagaagctggaagaaaggaaaacagaccccctaagcctggagggatacgtcagctcagcgccactgacaaagccccccgaaaagggcaaagagccctaggaccccacagaagagcccctccctctccattgctctgcacccctgcatcagcaaggccagccccagaaggagcctcggccgagcgtgcaacccggagccgccttgggccctccctgcgacagccggacccgcctccgcatcgggttgcgatgccctctgcatagtttctttctcttccttcatagatgacacggtcactagctctgcctcagaaagctctgcgctttccagaaagcgctttaccctgcagggttttgctaacctcaaaggtcagaaaggtaaaagtagtgcctgccccaaa

SEQ ID NO: 217606 - DNA, 5406 bp, Artificial Sequence
  derived and/or modified sequence
ggctgggtttctctagcacctcggcattgtctgcctgctcttccaggcgtgcagggcagtggtggctcgggccaggctctgggaggccgggcactctgaggaggtggctcagccctcttgggttctttcttgtgagttggcgaagcccagagtcaccagggtcctgagcacctgtctcttgtgaccatgcggcacccgcccggcttttagctgtcgcagcagagacccgaaggctgtggctctagcatcagggggtcgcctgtggtccctgcgtgaagaaccagagctgcctccgctttgtagcagcctttgtgacagggcggttcgatggccgagaagggagcatcccggggaaccctgcggcggctgtggtcactgcccaggaggcgccggggaactgcagggcgctcgaggccagatgaaatcatgcaccaggacatcgtcccgctctgtgctgccgacatccaggaccagctaaagaagcgctttgcttacctgtccggtgggcgggggcaggacggaagcccggttatcaccttccctgactacccggccttcagcgagattccggacaaggagttccagaatgtcatgacctacctcaccagcatccccagcctgcaggacgctggcatcggattcatcctggtgatagaccggcgacgggacaaatggacctccgtgaaggcgtccgtcctgcgcatcgcagcatctttcccggcaaacctgcagctcgtcctcgtgcttcgcccgacgggttttttccaaaggactctctccgacatcgctttcaaattcaatagagatgactttaagatgaaggtgccggtcataatgctgagctccgtaccagacttacacggttacatcgataagtcgcagctgaccgaggacctgggtgggaccctggactactgccactcccggtggctgtgccagcgcacggccatcgaaagtttcgccctcatggtgaagcagacggctcagatgctgcagtccttcgggaccgagctggctgaaacagagctgcccaatgacgtccagtcgacaagctcagtgctgtgtgcgcacacagagaagaaggacaaggcgaaggaggatttgaggctggcactgaaagaggggcacagtgtcctggagagcctcagggagctgcaggctgagggctcagagcccagtgtgaaccaggaccagcttgacaaccaggccaccgtgcagaggctcctggcccagctgaacgaaaccgaggctgccttcgatgagttctgggcaaagcatcagcagaaactggagcagtgtctgcagctccggcactttgagcagggcttccgggaggtcaaagccatcttggacgcagcgtcccagaagatagcaaccttcacagacatcggcaacagcctggcgcatgtggagcacctgctgagggacctggccagcttcgaggagaaatcaggcgtggccgtggagagggcccgggccctgtctctggacggcgagcagctcattgggaacaagcactacgcggtagactccatccgcccaaagtgccaggagctccggcacctctgtgaccagttctctgcggagatcgcaaggaggagggggctgctcagcaagtccctggagctgcaccgccgcctggagacgtccatgaagtggtgtgatgaagggatttacctgctggcctcacaacctgtggacaagtgccagtcccaggacggcgcggaggctgccctccaggaaatcgagaagtttttggagaccggtgcggaaaataagatccaggagctcaacgcgatttacaaggaatacgaatccatcctcaaccaagatctcatggagcacgtgcgaaaggtcttccagaagcaggcaagcatggaggaggtgttccaccgcaggcaggccagcctgaagaagctggcggccaggcagacgcggcccgtgcagccggtggcccccagacccgaggcactggcaaagtcgccctgcccctccccaggcattcggcgaggctctgagaactccagctccgagggcggtgcgctccggagagggccctaccggagggccaagagtgagatgagtgagagccggcagggccgcggctcagcgggggaggaggaggaaagcctggccatcctgcgcaggcacgtgatgagcgagctcctggacacagaacgggcctacgtggaggagctgctgtgcgtcctggagggctacgccgcggagatggataacccactgatggctcacctcctgtcaacaggccttcacaacaagaaggatgttttgtttggaaacatggaggaaatctatcacttccacaacaggatattcctcagggagctggaaaactacactgactgcccagaactggttggaagatgctttctggagaggatggaagatttccagatctatgagaagtactgtcagaacaagccccgctctgagagcctgtggagacagtgctccgactgcccgtttttccaggaatgccagagaaagctggaccacaagctgagcctggactcctacctgctgaagccagtgcagaggatcaccaagtaccagctgctgctcaaggaaatgctgaaatacagcaggaactgcgagggggctgaggacctgcaggaggcgctgagctccatcctgggcatcctgaaggccgtgaacgactccatgcacctcatcgctatcaccggctatgacgggaatctcggcgacctgggcaagctgctgatgcagggctcgttcagcgtctggaccgaccacaagaggggccacaccaaggtgaaggagctggccaggttcaagcccatgcagcggcacctgttcctgcacgagaaggcagtgctcttctgcaagaagagggaggagaatggggaggggtatgagaaagctccctcctacagctacaagcagtccttaaacatggctgccgttggcattacggagaacgtgaagggagatgctaagaagttcgagatctggtacaacgcgcgcgaggaggtctacatcgtccaggcgccaactcctgagattaaagccgcgtgggtgaatgaaattcggaaagtgctgaccagccagctgcaggcttgtagagaagccagccagcaccgggcgctggagcagtcacagagcctgcccctgccggccccgaccagcaccagtccctcaagaggaaactcaaggaacatcaagaagctggaagaaaggaaaacagaccccctaagcctggagggatacgtcagctcagcgccactgacaaagccccccgaaaagggcaaaggttggagcaaaacgtcccactcactggaggcacctgaggacgacgggggctggtcaagtgcagaggagcagattaactcgtccgacgcagaggaggacggcgggttgggccccaagaagctggttccaggtaaatacacggtcgtggcggaccacgagaagggaggccccgatgcgctgcgcgtgaggagcggggacgtggtggagctggtgcaggagggcgacgagggcctctggtacgtcagggacccgaccactggcaaggagggctgggtgccggccagcagcctgtccgtccggctcggcccgtccggctcggcccagtgcctgagcagctcagagtcgagcccggggtcggccgtgctgagcaactcgtccagctgcagcgagggcggccaggcccccttctccgacctgcaggggtagcgcggcctcggcgccggagacccgcgcgctgtctggggctgcggtggcgtggggagggcgcggcccccggacgccccgaggaaggggcacctcaccgcccccacccagagcgcctggccgtgcgggctgcagaggacccctccggggcagaggcaggttccacggaagaccccggcccgctggggcttccccggagactccagagcccacagaggaggggccgcagggaacagccccgggcggcaggcgccgggcagcggcatctcgtcctggctccaccgtgctgcttctgcctctggacggtgctttcaggggacgcgcggaccgtggtggagctgcttccggagaagtggaggatcctctggccaacggcctgaggagagcggggcacggggtctctttagcttttacaagttttaggattttttcaagcagggatcaatcccgtggccattttttgtggtactttggcctcaattcttcaccaggaatcactgtgtttacatgaaatgacaatttgatactgtatttgatagaaaactatttttttgttaccggggtttacatagaagcacgttgtttataccactaagtgactttgggggggctctcccatggaaacggatggcactccctgaagctccctggtcacaggtggatgaaaacgtgtccgtgggtgacatcaggtggtgtctccaccaccaaaagcagttagaagccaaggagattcctttatctacctagggttcattttcaaaagaaaatttaaactataatttaaacaattaacgttcttttctacaaaaaaaatgcagggacttgatttttttaaagagcttcactgaattaggatatttttattgcttttaaagaaaatacaaagatgcagtttctgcagggtgtggcgtggaccagtgctgccgaccatagctcagagagccctgcccctgcctcactgcactgcagcctcctcggaggccgcacctccactccactccccacgcgccccctgcctcccacccaggtccacctgccacctggtgaccaccttgagtacagaagtgaaagtggggagagtattttattcaagtcacagcagaactggaaaaaaactcttctgttttaccaacttcttgtgtttcagaaacatattctgttcaaaacttttgaagccctttcggtgtctagtctgcagatgtttttgtatgtgtgcacctctgaccatgtgtgtacatatgtgtcttgctggaaaggacatattcgctgtccccgtgctgctgggagggccgcctcacagcctcacggttcccagccccagcacagtggaggcaggcgtggctgcattcccctcacgctaccctcccagcggcttgtagccgtcactggccagacctccagggtgcggaatcaaataggaagcatgcagagactcggcagcttttcctctgatgtgtaagttatttggaacgcgtgctgtgtcccgcgatgtccctgatgtactgtgcaggcgcggtgcctccgtctcgtcgcacagctgcgcgcccttgtgtgaccctccccataaaggcactttacagcttcatgtttcatccactgtcacttttttttaactgctgatgtaaatggaattttaaaagcagagttctttattgtatggatgacgtttgaataaatatcagcaactcctgc

SEQ ID NO: 217607 - DNA, 5260 bp, Artificial Sequence
  derived and/or modified sequence
acagtgtggcttggtgccaaccatggcgagggtggagagccccgtgcctgcagcgcgcgcttccctcactgggtcctgcgtccttgggcaggcgatgcccctgcggggaggggctggtccatccccggccagccacggacccacgcatggacccagcgacccacggacctgcttacctgggcgcggcgcgggtggcatgcggccacacggaaggggcgcgctgggctgctgcggcctctgcagcttctacacctgccacggggcggccggagatgaaatcatgcaccaggacatcgtcccgctctgtgctgccgacatccaggaccagctaaagaagcgctttgcttacctgtccggtgggcgggggcaggacggaagcccggttatcaccttccctgactacccggccttcagcgagattccggacaaggagttccagaatgtcatgacctacctcaccagcatccccagcctgcaggacgctggcatcggattcatcctggtgatagaccggcgacgggacaaatggacctccgtgaaggcgtccgtcctgcgcatcgcagcatctttcccggcaaacctgcagctcgtcctcgtgcttcgcccgacgggttttttccaaaggactctctccgacatcgctttcaaattcaatagagatgactttaagatgaaggtgccggtcataatgctgagctccgtaccagacttacacggttacatcgataagtcgcagctgaccgaggacctgggtgggaccctggactactgccactcccggtggctgtgccagcgcacggccatcgaaagtttcgccctcatggtgaagcagacggctcagatgctgcagtccttcgggaccgagctggctgaaacagagctgcccaatgacgtccagtcgacaagctcagtgctgtgtgcgcacacagagaagaaggacaaggcgaaggaggatttgaggctggcactgaaagaggggcacagtgtcctggagagcctcagggagctgcaggctgagggctcagagcccagtgtgaaccaggaccagcttgacaaccaggccaccgtgcagaggctcctggcccagctgaacgaaaccgaggctgccttcgatgagttctgggcaaagcatcagcagaaactggagcagtgtctgcagctccggcactttgagcagggcttccgggaggtcaaagccatcttggacgcagcgtcccagaagatagcaaccttcacagacatcggcaacagcctggcgcatgtggagcacctgctgagggacctggccagcttcgaggagaaatcaggcgtggccgtggagagggcccgggccctgtctctggacggcgagcagctcattgggaacaagcactacgcggtagactccatccgcccaaagtgccaggagctccggcacctctgtgaccagttctctgcggagatcgcaaggaggagggggctgctcagcaagtccctggagctgcaccgccgcctggagacgtccatgaagtggtgtgatgaagggatttacctgctggcctcacaacctgtggacaagtgccagtcccaggacggcgcggaggctgccctccaggaaatcgagaagtttttggagaccggtgcggaaaataagatccaggagctcaacgcgatttacaaggaatacgaatccatcctcaaccaagatctcatggagcacgtgcgaaaggtcttccagaagcaggcaagcatggaggaggtgttccaccgcaggcaggccagcctgaagaagctggcggccaggcagacgcggcccgtgcagccggtggcccccagacccgaggcactggcaaagtcgccctgcccctccccaggcattcggcgaggctctgagaactccagctccgagggcggtgcgctccggagagggccctaccggagggccaagagtgagatgagtgagagccggcagggccgcggctcagcgggggaggaggaggaaagcctggccatcctgcgcaggcacgtgatgagcgagctcctggacacagaacgggcctacgtggaggagctgctgtgcgtcctggagggctacgccgcggagatggataacccactgatggctcacctcctgtcaacaggccttcacaacaagaaggatgttttgtttggaaacatggaggaaatctatcacttccacaacaggatattcctcagggagctggaaaactacactgactgcccagaactggttggaagatgctttctggagaggatggaagatttccagatctatgagaagtactgtcagaacaagccccgctctgagagcctgtggagacagtgctccgactgcccgtttttccaggaatgccagagaaagctggaccacaagctgagcctggactcctacctgctgaagccagtgcagaggatcaccaagtaccagctgctgctcaaggaaatgctgaaatacagcaggaactgcgagggggctgaggacctgcaggaggcgctgagctccatcctgggcatcctgaaggccgtgaacgactccatgcacctcatcgctatcaccggctatgacgggaatctcggcgacctgggcaagctgctgatgcagggctcgttcagcgtctggaccgaccacaagaggggccacaccaaggtgaaggagctggccaggttcaagcccatgcagcggcacctgttcctgcacgagaaggcagtgctcttctgcaagaagagggaggagaatggggaggggtatgagaaagctccctcctacagctacaagcagtccttaaacatggctgccgttggcattacggagaacgtgaagggagatgctaagaagttcgagatctggtacaacgcgcgcgaggaggtctacatcgtccaggcgccaactcctgagattaaagccgcgtgggtgaatgaaattcggaaagtgctgaccagccagctgcaggcttgtagagaagccagccagcaccgggcgctggagcagtcacagagcctgcccctgccggccccgaccagcaccagtccctcaagaggaaactcaaggaacatcaagaagctggaagaaaggaaaacagaccccctaagcctggagggatacgtcagctcagcgccactgacaaagccccccgaaaagggcaaaggttggagcaaaacgtcccactcactggaggcacctgaggacgacgggggctggtcaagtgcagaggagcagattaactcgtccgacgcagaggaggacggcgggttgggccccaagaagctggttccaggtaaatacacggtcgtggcggaccacgagaagggaggccccgatgcgctgcgcgtgaggagcggggacgtggtggagctggtgcaggagggcgacgagggcctctggtacgtcagggacccgaccactggcaaggagggctgggtgccggccagcagcctgtccgtccggctcggcccgtccggctcggcccagtgcctgagcagctcagagtcgagcccggggtcggccgtgctgagcaactcgtccagctgcagcgagggcggccaggcccccttctccgacctgcaggggtagcgcggcctcggcgccggagacccgcgcgctgtctggggctgcggtggcgtggggagggcgcggcccccggacgccccgaggaaggggcacctcaccgcccccacccagagcgcctggccgtgcgggctgcagaggacccctccggggcagaggcaggttccacggaagaccccggcccgctggggcttccccggagactccagagcccacagaggaggggccgcagggaacagccccgggcggcaggcgccgggcagcggcatctcgtcctggctccaccgtgctgcttctgcctctggacggtgctttcaggggacgcgcggaccgtggtggagctgcttccggagaagtggaggatcctctggccaacggcctgaggagagcggggcacggggtctctttagcttttacaagttttaggattttttcaagcagggatcaatcccgtggccattttttgtggtactttggcctcaattcttcaccaggaatcactgtgtttacatgaaatgacaatttgatactgtatttgatagaaaactatttttttgttaccggggtttacatagaagcacgttgtttataccactaagtgactttgggggggctctcccatggaaacggatggcactccctgaagctccctggtcacaggtggatgaaaacgtgtccgtgggtgacatcaggtggtgtctccaccaccaaaagcagttagaagccaaggagattcctttatctacctagggttcattttcaaaagaaaatttaaactataatttaaacaattaacgttcttttctacaaaaaaaatgcagggacttgatttttttaaagagcttcactgaattaggatatttttattgcttttaaagaaaatacaaagatgcagtttctgcagggtgtggcgtggaccagtgctgccgaccatagctcagagagccctgcccctgcctcactgcactgcagcctcctcggaggccgcacctccactccactccccacgcgccccctgcctcccacccaggtccacctgccacctggtgaccaccttgagtacagaagtgaaagtggggagagtattttattcaagtcacagcagaactggaaaaaaactcttctgttttaccaacttcttgtgtttcagaaacatattctgttcaaaacttttgaagccctttcggtgtctagtctgcagatgtttttgtatgtgtgcacctctgaccatgtgtgtacatatgtgtcttgctggaaaggacatattcgctgtccccgtgctgctgggagggccgcctcacagcctcacggttcccagccccagcacagtggaggcaggcgtggctgcattcccctcacgctaccctcccagcggcttgtagccgtcactggccagacctccagggtgcggaatcaaataggaagcatgcagagactcggcagcttttcctctgatgtgtaagttatttggaacgcgtgctgtgtcccgcgatgtccctgatgtactgtgcaggcgcggtgcctccgtctcgtcgcacagctgcgcgcccttgtgtgaccctccccataaaggcactttacagcttcatgtttcatccactgtcacttttttttaactgctgatgtaaatggaattttaaaagcagagttctttattgtatggatgacgtttgaataaatatcagcaactcctgc

SEQ ID NO: 217608 - DNA, 6580 bp, Artificial Sequence
  derived and/or modified sequence
cgcttccctcactgggtcctgcgtccttgggcaggcgatgcccctgcggggaggggctggtccatccccggccagccacggacccacgcatggacccagcgacccacggacctgcttacctgggcgcggcgcgggtggcatgcggccacacggaaggggcgcgctgggctgctgcggcctctgcagcttctacacctgccacggggcggccggagatgaaatcatgcaccaggacatcgtcccgctctgtgctgccgacatccaggaccagctaaagaagcgctttgcttacctgtccggtgggcgggggcaggacggaagcccggttatcaccttccctgactacccggccttcagcgagattccggacaaggagttccagaatgtcatgacctacctcaccagcatccccagcctgcaggacgctggcatcggattcatcctggtgatagaccggcgacgggacaaatggacctccgtgaaggcgtccgtcctgcgcatcgcagcatctttcccggcaaacctgcagctcgtcctcgtgcttcgcccgacgggttttttccaaaggactctctccgacatcgctttcaaattcaatagagatgactttaagatgaaggtgccggtcataatgctgagctccgtaccagacttacacggttacatcgataagtcgcagctgaccgaggacctgggtgggaccctggactactgccactcccggtggctgtgccagcgcacggccatcgaaagtttcgccctcatggtgaagcagacggctcagatgctgcagtccttcgggaccgagctggctgaaacagagctgcccaatgacgtccagtcgacaagctcagtgctgtgtgcgcacacagagaagaaggacaaggcgaaggaggatttgaggctggcactgaaagaggggcacagtgtcctggagagcctcagggagctgcaggctgagggctcagagcccagtgtgaaccaggaccagcttgacaaccaggccaccgtgcagaggctcctggcccagctgaacgaaaccgaggctgccttcgatgagttctgggcaaagcatcagcagaaactggagcagtgtctgcagctccggcactttgagcagggcttccgggaggtcaaagccatcttggacgcagcgtcccagaagatagcaaccttcacagacatcggcaacagcctggcgcatgtggagcacctgctgagggacctggccagcttcgaggagaaatcaggcgtggccgtggagagggcccgggccctgtctctggacggcgagcagctcattgggaacaagcactacgcggtagactccatccgcccaaagtgccaggagctccggcacctctgtgaccagttctctgcggagatcgcaaggaggagggggctgctcagcaagtccctggagctgcaccgccgcctggagacgtccatgaagtggtgtgatgaagggatttacctgctggcctcacaacctgtggacaagtgccagtcccaggacggcgcggaggctgccctccaggaaatcgagaagtttttggagaccggtgcggaaaataagatccaggagctcaacgcgatttacaaggaatacgaatccatcctcaaccaagatctcatggagcacgtgcgaaaggtcttccagaagcaggcaagcatggaggaggtgttccaccgcaggcaggccagcctgaagaagctggcggccaggcagacgcggcccgtgcagccggtggcccccagacccgaggcactggcaaagtcgccctgcccctccccaggcattcggcgaggctctgagaactccagctccgagggcggtgcgctccggagagggccctaccggagggccaagagtgagatgagtgagagccggcagggccgcggctcagcgggggaggaggaggaaagcctggccatcctgcgcaggcacgtgatgagcgagctcctggacacagaacgggcctacgtggaggagctgctgtgcgtcctggagggctacgccgcggagatggataacccactgatggctcacctcctgtcaacaggccttcacaacaagaaggatgttttgtttggaaacatggaggaaatctatcacttccacaacaggatattcctcagggagctggaaaactacactgactgcccagaactggttggaagatgctttctggagaggatggaagatttccagatctatgagaagtactgtcagaacaagccccgctctgagagcctgtggagacagtgctccgactgcccgtttttccaggaatgccagagaaagctggaccacaagctgagcctggactcctacctgctgaagccagtgcagaggatcaccaagtaccagctgctgctcaaggaaatgctgaaatacagcaggaactgcgagggggctgaggacctgcaggaggcgctgagctccatcctgggcatcctgaaggccgtgaacgactccatgcacctcatcgctatcaccggctatgacgggaatctcggcgacctgggcaagctgctgatgcagggctcgttcagcgtctggaccgaccacaagaggggccacaccaaggtgaaggagctggccaggttcaagcccatgcagcggcacctgttcctgcacgagaaggcagtgctcttctgcaagaagagggaggagaatggggaggggtatgagaaagctccctcctacagctacaagcagtccttaaacatggctgccgttggcattacggagaacgtgaagggagatgctaagaagttcgagatctggtacaacgcgcgcgaggaggtctacatcgtccaggcgccaactcctgagattaaagccgcgtgggtgaatgaaattcggaaagtgctgaccagccagctgcaggcttgtagagaagccagccagcaccgggcgctggagcagtcacagagcctgcccctgccggccccgaccagcaccagtccctcaagaggaaactcaaggaacatcaagaagctggaagaaaggaaaacagaccccctaagcctggagggatacgtcagctcagcgccactgacaaagccccccgaaaagggcaaaggttggagcaaaacgtcccactcactggaggcacctgaggacgacgggggctggtcaagtgcagaggagcagattaactcgtccgacgcagaggaggacggcgggttgggccccaagaagctggttccaggtaaatacacggtcgtggcggaccacgagaagggaggccccgatgcgctgcgcgtgaggagcggggacgtggtggagctggtgcaggagggcgacgagggcctctggtaagaccccgcgctcagccccggactgccccgcacgtggctgccgctgaccctcgccccttgcaggtacgtcagggacccgaccactggcaaggagggctgggtgccggccagcagcctgtccgtccggctcggcccgtccggctcggcccagtgcctgagcagctcaggtaaggcccacgtgccccgagcccacccgtgacgctgccaagggcccgggcgaggaagctgccccgtgtgtgcccggcagagccgacgccgaagcccgtccccgcctgatctccccgcagagtcgagcccggggtcggccgtgctgagcaactcgtccagctgcagcgagggcggccaggcccccttctccgacctgcaggggtagcgcggcctcggcgccggagacccgcgcgctgtctggggctgcggtggcgtggggagggcgcggcccccggacgccccgaggaaggggcacctcaccgcccccacccagagcgcctggccgtgcgggctgcagaggacccctccggggcagaggcaggttccacggaagaccccggcccgctggggcttccccggagactccagagcccacagaggaggggccgcagggaacagccccgggcggcaggcgccgggcagcggcatctcgtcctggctccaccgtgctgcttctgcctctggacggtgctttcaggggacgcgcggaccgtggtggagctgcttccggagaagtggaggatcctctggccaacggcctgaggagagcggggcacggggtctctttagcttttacaagttttaggattttttcaagcagggatcaatcccgtggccattttttgtggtactttggcctcaattcttcaccaggaatcactgtgtttacatgaaatgacaatttgatactgtatttgatagaaaactatttttttgttaccggggtttacatagaagcacgttgtttataccactaagtgactttgggggggctctcccatggaaacggatggcactccctgaagctccctggtcacaggtggatgaaaacgtgtccgtgggtgacatcaggtggtgtctccaccaccaaaagcagttagaagccaaggagattcctttatctacctagggttcattttcaaaagaaaatttaaactataatttaaacaattaacgttcttttctacaaaaaaaatgcagggacttgatttttttaaagagcttcactgaattaggatatttttattgcttttaaagaaaatacaaagatgcagtttctgcagggtgtggcgtggaccagtgctgccgaccatagctcagagagccctgcccctgcctcactgcactgcagcctcctcggaggccgcacctccactccactccccacgcgccccctgcctcccacccaggtccacctgccacctggtgaccaccttgagtacagaagtgaaagtggggagagtattttattcaagtcacagcagaactggaaaaaaactcttctgttttaccaacttcttgtgtttcagaaacatattctgttcaaaacttttgaagccctttcggtgtctagtctgcagatgtttttgtatgtgtgcacctctgaccatgtgtgtacatatgtgtcttgctggaaaggacatattcgctgtccccgtgctgctgggagggccgcctcacagcctcacggttcccagccccagcacagtggaggcaggcgtggctgcattcccctcacgctaccctcccagcggcttgtagccgtcactggccagacctccagggtgcggaatcaaataggaagcatgcagagactcggcagcttttcctctgatgtgtaagttatttggaacgcgtgctgtgtcccgcgatgtccctgatgtactgtgcaggcgcggtgcctccgtctcgtcgcacagctgcgcgcccttgtgtgaccctccccataaaggcactttacagcttcatgtttcatccactgtcacttttttttaactgctgatgtaaatggaattttaaaagcagagttctttattgtatggatgacgtttgaataaatatcagcaactcctgccatctgcctttgtctgtcaagacacagaacgtctcagcagtcggggtttccagggccgcagtgcactgtgcttgcacatggtaagtcattgttgggacggaaaagaagccggcagtgggcagggcccagcgtgcggctcaggcaccgagcaaccgctttgctttcttctgtcagacggcgatgatgacaaaatagcaacaaggttgtgcgtgtcagaaacgcaaaggcagcagaggaagcgtagtggaaccattacagaatcacaatgcagccgacactctccagaccagaaaagggagcataaagaaagggtattgatccaatagaagaagggaagggtggagaaaggggaaagcatggttaacaggaaacaacatgtaacggaagagacagcccagatgtgtctggctcacaacagacgtgatcatgttatgctggcctggaagagcatcggatcagacgtgacaagtcactgcttagagaccatcaagcaaatttatatatagattggagatttaaaataaaagaagacagaacagacaaacaccataagaaagctggtgtagcagtatcgatgacctgaaatgggattcaggacagttcatagagtaaagggggctgcgtggcaatcaggaactcataagccactgactataaagctcaaaacacagcaaagttggcagtcggcagacagcaatgttgactgtcatgaaaagtgatccctgtttgcccctaaacgtagagaaatctgcgttattttccagcacacatggagcacaaacaaaatatttgcaaaacaatgggaagatcattgaaacactgtttggcaatttaaaagcttgtttctaactcacgggatgcgggcagtctgctctctagaactggacagcgtgcacagagccacgggagggagcagccacggccagctcagattggtgtcgacagcttagtggtgtctgattttatacatgacaaaatgaacgagttaaccatttaagccaaaaaaataagactagcgtaacccaaagaaagtatttaaatacttctgtcaattaggacagttgagaaaagagaataacaaaatcaaaagcaaaactcaaactttgtacctgaaaaatctaataaaactgactaatttatagaaaacctaagaaactccatatcaaataaaaaattttaaatatgagagaa

SEQ ID NO: 217609 - DNA, 3617 bp, Artificial Sequence
  derived and/or modified sequence
gacatcgaatcggaggccctgggaggagcagccggctggctgccctgcagaggccaggtctgcccagcaaacccaggaaggtgtggcgtccccgcttcgcggccaagatggtgctggtgctgcgccatcctttgtgtgcccgggaagggcgttccgggagccgggtcgggggctcctgactcgcactgggcagcatgacggtgcgccggctgtcactgctgtgccgggacctctgggcgctgtggctgctgctgaaggccggcgcagatgaaatcatgcaccaggacatcgtcccgctctgtgctgccgacatccaggaccagctaaagaagcgctttgcttacctgtccggtgggcgggggcaggacggaagcccggttatcaccttccctgactacccggccttcagcgagattccggacaaggagttccagaatgtcatgacctacctcaccagcatccccagcctgcaggacgctggcatcggattcatcctggtgatagaccggcgacgggacaaatggacctccgtgaaggcgtccgtcctgcgcatcgcagcatctttcccggcaaacctgcagctcgtcctcgtgcttcgcccgacgggttttttccaaaggactctctccgacatcgctttcaaattcaatagagatgactttaagatgaaggtgccggtcataatgctgagctccgtaccagacttacacggttacatcgataagtcgcagctgaccgaggacctgggtgggaccctggactactgccactcccggtggctgtgccagcgcacggccatcgaaagtttcgccctcatggtgaagcagacggctcagatgctgcagtccttcgggaccgagctggctgaaacagagctgcccaatgacgtccagtcgacaagctcagtgctgtgtgcgcacacagagaagaaggacaaggcgaaggaggatttgaggctggcactgaaagaggggcacagtgtcctggagagcctcagggagctgcaggctgagggctcagagcccagtgtgaaccaggaccagcttgacaaccaggccaccgtgcagaggctcctggcccagctgaacgaaaccgaggctgccttcgatgagttctgggcaaagcatcagcagaaactggagcagtgtctgcagctccggcactttgagcagggcttccgggaggtcaaagccatcttggacgcagcgtcccagaagatagcaaccttcacagacatcggcaacagcctggcgcatgtggagcacctgctgagggacctggccagcttcgaggagaaatcaggcgtggccgtggagagggcccgggccctgtctctggacggcgagcagctcattgggaacaagcactacgcggtagactccatccgcccaaagtgccaggagctccggcacctctgtgaccagttctctgcggagatcgcaaggaggagggggctgctcagcaagtccctggagctgcaccgccgcctggagacgtccatgaagtggtgtgatgaagggatttacctgctggcctcacaacctgtggacaagtgccagtcccaggacggcgcggaggctgccctccaggaaatcgagaagtttttggagaccggtgcggaaaataagatccaggagctcaacgcgatttacaaggaatacgaatccatcctcaaccaagatctcatggagcacgtgcgaaaggtcttccagaagcaggcaagcatggaggaggtgttccaccgcaggcaggccagcctgaagaagctggcggccaggcagacgcggcccgtgcagccggtggcccccagacccgaggcactggcaaagtcgccctgcccctccccaggcattcggcgaggctctgagaactccagctccgagggcggtgcgctccggagagggccctaccggagggccaagagtgagatgagtgagagccggcagggccgcggctcagcgggggaggaggaggaaagcctggccatcctgcgcaggcacgtgatgagcgagctcctggacacagaacgggcctacgtggaggagctgctgtgcgtcctggagggctacgccgcggagatggataacccactgatggctcacctcctgtcaacaggccttcacaacaagaaggatgttttgtttggaaacatggaggaaatctatcacttccacaacaggatattcctcagggagctggaaaactacactgactgcccagaactggttggaagatgctttctggagaggatggaagatttccagatctatgagaagtactgtcagaacaagccccgctctgagagcctgtggagacagtgctccgactgcccgtttttccaggaatgccagagaaagctggaccacaagctgagcctggactcctacctgctgaagccagtgcagaggatcaccaagtaccagctgctgctcaaggaaatgctgaaatacagcaggaactgcgagggggctgaggacctgcaggaggcgctgagctccatcctgggcatcctgaaggccgtgaacgactccatgcacctcatcgctatcaccggctatgacgggaatctcggcgacctgggcaagctgctgatgcagggctcgttcagcgtctggaccgaccacaagaggggccacaccaaggtgaaggagctggccaggttcaagcccatgcagcggcacctgttcctgcacgagaaggcagtgctcttctgcaagaagagggaggagaatggggaggggtatgagaaagctccctcctacagctacaagcagtccttaaacatggctgccgttggcattacggagaacgtgaagggagatgctaagaagttcgagatctggtacaacgcgcgcgaggaggtctacatcgtccaggcgccaactcctgagattaaagccgcgtgggtgaatgaaattcggaaagtgctgaccagccagctgcaggcttgtagagaagccagccagcaccgggcgctggagcagtcacagagcctgcccctgccggccccgaccagcaccagtccctcaagaggaaactcaaggaacatcaagaagctggaagaaaggaaaacagaccccctaagcctggagggatacgtcagctcagcgccactgacaaagccccccgaaaagggcaaaggttggagcaaaacgtcccactcactggaggcacctgaggacgacgggggctggtcaagtgcagaggagcagattaactcgtccgacgcagaggaggacggcgggttgggccccaagaagctggttccaggtaaatacacggtcgtggcggaccacgagaagggaggccccgatgcgctgcgcgtgaggagcggggacgtggtggagctggtgcaggagggcgacgagggcctctggtacgtcagggacccgaccactggcaaggagggctgggtgccggccagcagcctgtccgtccggctcggcccgtccggctcggcccagtgcctgagcagctcagagtcgagcccggggtcggccgtgctgagcaactcgtccagctgcagcgagggcggccaggcccccttctccgacctgcaggggtagcgcggcctcggcgccggagacccgcgcgctgtctggggctgcggtggcgtg

SEQ ID NO: 217610 - DNA, 3602 bp, Artificial Sequence
  derived and/or modified sequence
cctcaagttcctctcgggcgggcacggtgtgtcgcctggacctgcatgtaaacatcagggcggagcaggaatcggcctccaggagggtaattgcctggcgtactctgtcccaggtagtgggtgaaatgaaagtaaaaagccagctggtccctcatgcagattttaggggacaaagttcagcatagaaaggtcctgttacaaggagagggttgtggcgagcccagggcagcgcgcgtcctccccggcagctgatcctcgccatgggggacggaaaggctgtccggatttccgtggcggaaatgaaaagctactacctgtattctgagtggtgctcctggctgctgtccgtggctgaggatgaaatcatgcaccaggacatcgtcccgctctgtgctgccgacatccaggaccagctaaagaagcgctttgcttacctgtccggtgggcgggggcaggacggaagcccggttatcaccttccctgactacccggccttcagcgagattccggacaaggagttccagaatgtcatgacctacctcaccagcatccccagcctgcaggacgctggcatcggattcatcctggtgatagaccggcgacgggacaaatggacctccgtgaaggcgtccgtcctgcgcatcgcagcatctttcccggcaaacctgcagctcgtcctcgtgcttcgcccgacgggttttttccaaaggactctctccgacatcgctttcaaattcaatagagatgactttaagatgaaggtgccggtcataatgctgagctccgtaccagacttacacggttacatcgataagtcgcagctgaccgaggacctgggtgggaccctggactactgccactcccggtggctgtgccagcgcacggccatcgaaagtttcgccctcatggtgaagcagacggctcagatgctgcagtccttcgggaccgagctggctgaaacagagctgcccaatgacgtccagtcgacaagctcagtgctgtgtgcgcacacagagaagaaggacaaggcgaaggaggatttgaggctggcactgaaagaggggcacagtgtcctggagagcctcagggagctgcaggctgagggctcagagcccagtgtgaaccaggaccagcttgacaaccaggccaccgtgcagaggctcctggcccagctgaacgaaaccgaggctgccttcgatgagttctgggcaaagcatcagcagaaactggagcagtgtctgcagctccggcactttgagcagggcttccgggaggtcaaagccatcttggacgcagcgtcccagaagatagcaaccttcacagacatcggcaacagcctggcgcatgtggagcacctgctgagggacctggccagcttcgaggagaaatcaggcgtggccgtggagagggcccgggccctgtctctggacggcgagcagctcattgggaacaagcactacgcggtagactccatccgcccaaagtgccaggagctccggcacctctgtgaccagttctctgcggagatcgcaaggaggagggggctgctcagcaagtccctggagctgcaccgccgcctggagacgtccatgaagtggtgtgatgaagggatttacctgctggcctcacaacctgtggacaagtgccagtcccaggacggcgcggaggctgccctccaggaaatcgagaagtttttggagaccggtgcggaaaataagatccaggagctcaacgcgatttacaaggaatacgaatccatcctcaaccaagatctcatggagcacgtgcgaaaggtcttccagaagcaggcaagcatggaggaggtgttccaccgcaggcaggccagcctgaagaagctggcggccaggcagacgcggcccgtgcagccggtggcccccagacccgaggcactggcaaagtcgccctgcccctccccaggcattcggcgaggctctgagaactccagctccgagggcggtgcgctccggagagggccctaccggagggccaagagtgagatgagtgagagccggcagggccgcggctcagcgggggaggaggaggaaagcctggccatcctgcgcaggcacgtgatgagcgagctcctggacacagaacgggcctacgtggaggagctgctgtgcgtcctggagggctacgccgcggagatggataacccactgatggctcacctcctgtcaacaggccttcacaacaagaaggatgttttgtttggaaacatggaggaaatctatcacttccacaacaggatattcctcagggagctggaaaactacactgactgcccagaactggttggaagatgctttctggagaggatggaagatttccagatctatgagaagtactgtcagaacaagccccgctctgagagcctgtggagacagtgctccgactgcccgtttttccaggaatgccagagaaagctggaccacaagctgagcctggactcctacctgctgaagccagtgcagaggatcaccaagtaccagctgctgctcaaggaaatgctgaaatacagcaggaactgcgagggggctgaggacctgcaggaggcgctgagctccatcctgggcatcctgaaggccgtgaacgactccatgcacctcatcgctatcaccggctatgacgggaatctcggcgacctgggcaagctgctgatgcagggctcgttcagcgtctggaccgaccacaagaggggccacaccaaggtgaaggagctggccaggttcaagcccatgcagcggcacctgttcctgcacgagaaggcagtgctcttctgcaagaagagggaggagaatggggaggggtatgagaaagctccctcctacagctacaagcagtccttaaacatggctgccgttggcattacggagaacgtgaagggagatgctaagaagttcgagatctggtacaacgcgcgcgaggaggtctacatcgtccaggcgccaactcctgagattaaagccgcgtgggtgaatgaaattcggaaagtgctgaccagccagctgcaggcttgtagagaagccagccagcaccgggcgctggagcagtcacagagcctgcccctgccggccccgaccagcaccagtccctcaagaggaaactcaaggaacatcaagaagctggaagaaaggaaaacagaccccctaagcctggagggatacgtcagctcagcgccactgacaaagccccccgaaaagggcaaaggttggagcaaaacgtcccactcactggaggcacctgaggacgacgggggctggtcaagtgcagaggagcagattaactcgtccgacgcagaggaggacggcgggttgggccccaagaagctggttccaggtaaatacacggtcgtggcggaccacgagaagggaggccccgatgcgctgcgcgtgaggagcggggacgtggtggagctggtgcaggagggcgacgagggcctctggtacgtcagggacccgaccactggcaaggagggctgggtgccggccagcagcctgtccgtccggctcggcccgtccggctcggcccagtgcctgagcagctcaggtaaggcccacgtgccccgagcccacccgtga

SEQ ID NO: 217611 - DNA, 4590 bp, Artificial Sequence
  derived and/or modified sequence
ttgaagatgccggtcataatgctgagctccgtaccagacttacacggttacatcgataagtcgcagctgaccgaggacctgggtgggaccctggactactgccactcccggtggctgtgccagcgcacggccatcgaaagtttcgccctcatggtgaagcagacggctcagatgctgcagtccttcgggaccgagctggctgaaacagagctgcccaatgacgtccagtcgacaagctcagtgctgtgtgcgcacacagagaagaaggacaaggcgaaggaggatttgaggctggcactgaaagaggggcacagtgtcctggagagcctcagggagctgcaggctgagggctcagagcccagtgtgaaccaggaccagcttgacaaccaggccaccgtgcagaggctcctggcccagctgaacgaaaccgaggctgccttcgatgagttctgggcaaagcatcagcagaaactggagcagtgtctgcagctccggcactttgagcagggcttccgggaggtcaaagccatcttggacgcagcgtcccagaagatagcaaccttcacagacatcggcaacagcctggcgcatgtggagcacctgctgagggacctggccagcttcgaggagaaatcaggcgtggccgtggagagggcccgggccctgtctctggacggcgagcagctcattgggaacaagcactacgcggtagactccatccgcccaaagtgccaggagctccggcacctctgtgaccagttctctgcggagatcgcaaggaggagggggctgctcagcaagtccctggagctgcaccgccgcctggagacgtccatgaagtggtgtgatgaagggatttacctgctggcctcacaacctgtggacaagtgccagtcccaggacggcgcggaggctgccctccaggaaatcgagaagtttttggagaccggtgcggaaaataagatccaggagctcaacgcgatttacaaggaatacgaatccatcctcaaccaagatctcatggagcacgtgcgaaaggtcttccagaagcaggcaagcatggaggaggtgttccaccgcaggcaggccagcctgaagaagctggcggccaggcagacgcggcccgtgcagccggtggcccccagacccgaggcactggcaaagtcgccctgcccctccccaggcattcggcgaggctctgagaactccagctccgagggcggtgcgctccggagagggccctaccggagggccaagagtgagatgagtgagagccggcagggccgcggctcagcgggggaggaggaggaaagcctggccatcctgcgcaggcacgtgatgagcgagctcctggacacagaacgggcctacgtggaggagctgctgtgcgtcctggagggctacgccgcggagatggataacccactgatggctcacctcctgtcaacaggccttcacaacaagaaggatgttttgtttggaaacatggaggaaatctatcacttccacaacaggatattcctcagggagctggaaaactacactgactgcccagaactggttggaagatgctttctggagaggatggaagatttccagatctatgagaagtactgtcagaacaagccccgctctgagagcctgtggagacagtgctccgactgcccgtttttccaggaatgccagagaaagctggaccacaagctgagcctggactcctacctgctgaagccagtgcagaggatcaccaagtaccagctgctgctcaaggaaatgctgaaatacagcaggaactgcgagggggctgaggacctgcaggaggcgctgagctccatcctgggcatcctgaaggccgtgaacgactccatgcacctcatcgctatcaccggctatgacgggaatctcggcgacctgggcaagctgctgatgcagggctcgttcagcgtctggaccgaccacaagaggggccacaccaaggtgaaggagctggccaggttcaagcccatgcagcggcacctgttcctgcacgagaaggcagtgctcttctgcaagaagagggaggagaatggggaggggtatgagaaagctccctcctacagctacaagcagtccttaaacatggctgccgttggcattacggagaacgtgaagggagatgctaagaagttcgagatctggtacaacgcgcgcgaggaggtctacatcgtccaggcgccaactcctgagattaaagccgcgtgggtgaatgaaattcggaaagtgctgaccagccagctgcaggcttgtagagaagccagccagcaccgggcgctggagcagtcacagagcctgcccctgccggccccgaccagcaccagtccctcaagaggaaactcaaggaacatcaagaagctggaagaaaggaaaacagaccccctaagcctggagggatacgtcagctcagcgccactgacaaagccccccgaaaagggcaaaggttggagcaaaacgtcccactcactggaggcacctgaggacgacgggggctggtcaagtgcagaggagcagattaactcgtccgacgcagaggaggacggcgggttgggccccaagaagctggttccaggtaaatacacggtcgtggcggaccacgagaagggaggccccgatgcgctgcgcgtgaggagcggggacgtggtggagctggtgcaggagggcgacgagggcctctggtacgtcagggacccgaccactggcaaggagggctgggtgccggccagcagcctgtccgtccggctcggcccgtccggctcggcccagtgcctgagcagctcagagtcgagcccggggtcggccgtgctgagcaactcgtccagctgcagcgagggcggccaggcccccttctccgacctgcaggggtagcgcggcctcggcgccggagacccgcgcgctgtctggggctgcggtggcgtggggagggcgcggcccccggacgccccgaggaaggggcacctcaccgcccccacccagagcgcctggccgtgcgggctgcagaggacccctccggggcagaggcaggttccacggaagaccccggcccgctggggcttccccggagactccagagcccacagaggaggggccgcagggaacagccccgggcggcaggcgccgggcagcggcatctcgtcctggctccaccgtgctgcttctgcctctggacggtgctttcaggggacgcgcggaccgtggtggagctgcttccggagaagtggaggatcctctggccaacggcctgaggagagcggggcacggggtctctttagcttttacaagttttaggattttttcaagcagggatcaatcccgtggccattttttgtggtactttggcctcaattcttcaccaggaatcactgtgtttacatgaaatgacaatttgatactgtatttgatagaaaactatttttttgttaccggggtttacatagaagcacgttgtttataccactaagtgactttgggggggctctcccatggaaacggatggcactccctgaagctccctggtcacaggtggatgaaaacgtgtccgtgggtgacatcaggtggtgtctccaccaccaaaagcagttagaagccaaggagattcctttatctacctagggttcattttcaaaagaaaatttaaactataatttaaacaattaacgttcttttctacaaaaaaaatgcagggacttgatttttttaaagagcttcactgaattaggatatttttattgcttttaaagaaaatacaaagatgcagtttctgcagggtgtggcgtggaccagtgctgccgaccatagctcagagagccctgcccctgcctcactgcactgcagcctcctcggaggccgcacctccactccactccccacgcgccccctgcctcccacccaggtccacctgccacctggtgaccaccttgagtacagaagtgaaagtggggagagtattttattcaagtcacagcagaactggaaaaaaactcttctgttttaccaacttcttgtgtttcagaaacatattctgttcaaaacttttgaagccctttcggtgtctagtctgcagatgtttttgtatgtgtgcacctctgaccatgtgtgtacatatgtgtcttgctggaaaggacatattcgctgtccccgtgctgctgggagggccgcctcacagcctcacggttcccagccccagcacagtggaggcaggcgtggctgcattcccctcacgctaccctcccagcggcttgtagccgtcactggccagacctccagggtgcggaatcaaataggaagcatgcagagactcggcagcttttcctctgatgtgtaagttatttggaacgcgtgctgtgtcccgcgatgtccctgatgtactgtgcaggcgcggtgcctccgtctcgtcgcacagctgcgcgcccttgtgtgaccctccccataaaggcactttacagcttcatgtttcatccactgtcacttttttttaactgctgatgtaaatggaattttaaaagcagagttctttattgtatggatgacgtttgaataaatatcagcaactcctgc

SEQ ID NO: 217612 - DNA, 3390 bp, Artificial Sequence
  derived and/or modified sequence
atggccgagaagggcgccagccggggcaccctgcggcggctgtggtctttgcctaggcgaaggcgcggaacggcaggccgcagcagaccggatgaaattatgcatcaggacatcgttcccctgtgcgcagcagacatccaggaccagcttaagaaacgattcgcgtacctatctggcgggaggggacaggacggcagccccgtcataacttttccagactacccagccttcagcgagatccctgacaaggaatttcagaatgttatgacgtaccttacgtccatcccttctcttcaagatgcgggcataggattcatactggtgattgacaggagacgcgacaagtggacgtccgtgaaggcgtccgtgctgcggatagccgcatccttcccagcaaacctgcagctggtattagtactcagacccactggcttcttccagcgtaccctgagcgacatcgccttcaaatttaaccgggacgattttaagatgaaggtacctgtcatcatgctgtcgagcgttcccgaccttcacgggtatatagataagtcccagctcactgaggacctgggcggcacattggactattgtcacagtcggtggctctgtcagaggacagccatcgagtcatttgctcttatggtcaaacagaccgcgcagatgctgcagtccttcgggacagagcttgccgagaccgagcttcctaacgacgtccaatccacctcctctgtgctgtgcgcacacacggaaaagaaagacaaggcaaaggaggatttgcgactggcattgaaggaaggacactctgtgctggaatctctgcgagagttacaggccgaaggcagcgaaccttcggtgaatcaggaccagctggacaatcaagctacagtgcagcgcctgctggcccagctgaatgagactgaagcagcttttgatgagttctgggccaagcaccagcagaaactggagcagtgcctccagctcaggcattttgaacagggttttcgagaggtcaaggcaattctagacgccgccagtcagaagatcgccacattcaccgatattggcaacagtctggcccatgtggagcacctgctgcgggatctcgcaagttttgaggagaaaagcggggtggccgtcgaacgagccagggccctgagcctggacggcgagcagctgatagggaacaaacactacgcagtggattcaatccgtccgaagtgccaggaattacgtcatctgtgcgatcagtttagcgccgagatcgcacgacggaggggcttgctgtcaaagtcattagaactgcataggagactagaaacctcaatgaaatggtgcgacgaggggatctacttgctggcttctcagcctgtggacaagtgtcagtcccaggacggcgctgaagccgcgcttcaggagattgagaaatttctcgaaacaggcgccgagaataaaatccaggagcttaacgcaatttataaggaatacgagagtatcctaaatcaagatcttatggaacatgtccgcaaagtgtttcagaaacaggcgagcatggaagaagtcttccatcggcgccaggccagtctgaaaaaactggctgcacggcaaactaggcccgtccagcccgttgccccgaggccagaagcactggcgaaaagtccctgcccaagccctggtatcagaagaggatccgaaaatagtagttccgaaggaggggctttgcggcgcggcccctatcgccgcgcaaagtccgaaatgagtgaaagcagacagggcaggggaagtgccggggaggaggaggagtccctggcaatccttcggcggcacgtgatgtctgaactcttggacaccgagagagcttacgtcgaggagcttctctgcgtgctggagggttatgcagccgagatggataatccactgatggctcatcttttgagcacggggctgcataataagaaagacgtcttgttcggaaatatggaagaaatctaccactttcacaatcggattttcctgcgtgagttggagaattacacggattgccccgagctggtggggcggtgtttccttgagaggatggaagacttccaaatctacgagaaatattgccagaataagcctagatctgaaagtctctggagacagtgctcggactgtccttttttccaggagtgtcaacgcaagctggatcataaactatccctggattcctaccttttgaagcccgtgcagagaatcactaagtatcagctactgttgaaggaaatgcttaaatattccagaaactgtgagggcgccgaagatctgcaggaggctctatctagtatcctcggaattctgaaagcagttaacgatagcatgcacctgattgccattaccggctatgatgggaacttaggcgacttggggaaacttctgatgcagggatccttcagtgtgtggaccgaccacaagagaggtcacaccaaggttaaggagctggctaggttcaagcccatgcagcgccacttgtttctccacgaaaaggcggttctattctgtaagaaaagggaagagaacggcgagggatacgagaaagcccctagttatagctacaaacagagccttaatatggctgctgtgggcattactgaaaacgtaaagggcgacgctaaaaagttcgagatttggtacaatgcccgggaggaagtttacattgtgcaggccccaacacctgagataaaagcagcgtgggtcaacgagatcagaaaagtgctgacctcgcagttgcaggcctgtcgcgaggcttctcaacaccgagcgctcgaacaaagtcagagcctgcctctgcccgcacccacgagcacttcaccttcgcgtggcaactcccgcaacatcaaaaagttggaggaaagaaagactgatcctctctcactcgagggttacgtctctagcgcccccctgaccaaacccccggagaaaggaaaaggatggtccaaaacaagtcattcactggaggcccccgaggatgatggcggttggtccagtgccgaggagcagattaattcctccgacgctgaggaggatggcgggttaggtcctaagaagttggttcctgggaagtatactgtagtagctgatcacgagaaaggcgggcctgacgcattaagagttagatctggagatgtggtggagctggtgcaagagggagatgagggactgtggtacgtcagggacccaactacgggtaaggaaggatgggtccctgcctcatccttgtcagtgaggcttgggccatccgggtccgcgcagtgcctgtcatctagcgagtcctcccccggcagcgctgtactgagcaattcaagctcttgctcagaaggcggtcaggcccccttttccgaccttcagggatag

SEQ ID NO: 217613 - DNA, 3549 bp, Artificial Sequence
  derived and/or modified sequence
atggcccgggtggagagccccgtgcccgccgcccgggccagcctgactggaagctgcgtgctcggccaggcaatgccgttgaggggaggcgccgggccctcccccgcgtcacacggccctacgcatggcccatccgaccctcgcacctgtctccctggacgcggcgccggcggcatgaggccacacgggaggggagccttgggatgctgcggattgtgctctttttacacatgccatggcgccgccggagatgagatcatgcaccaggatattgttcctttgtgcgcagctgatatccaggatcaactcaagaagaggttcgcatatctttccggtggtcggggtcaggacggaagtcctgttattacatttcctgactaccccgccttcagcgaaattccagacaaagagtttcagaatgtgatgacttatctgacctctattccatccctgcaggacgccggaatcgggttcattctcgttatagataggcggagggataagtggaccagcgtgaaggcttcggtgctgcgaatagccgctagttttccagccaatcttcagctggtgctagtcctgcgcccaactggatttttccaaagaaccctgtctgacatcgcttttaagtttaacagagatgacttcaaaatgaaggtaccagtaattatgctgtcgagcgtccctgacttacatggctacatcgacaagtcacaattaacagaagacctgggcggcaccttggattactgccacagtaggtggctgtgccaaaggacagctatcgaatctttcgctctcatggtgaaacagacagcacagatgctgcagtcatttggcaccgaactggccgaaacggaactccctaatgatgttcagtctaccagctccgtattgtgtgcacacacagaaaagaaggataaggcaaaggaggatctgaggctagccctcaaggagggacattcggtcctcgagagtctccgcgaactccaagcagagggcagcgagcctagtgtgaaccaggatcagcttgataatcaagctactgtacagaggctgcttgcccaattgaatgagaccgaggctgcattcgatgagttctgggccaaacaccaacagaaactggaacagtgcctgcagcttcgccactttgagcagggattccgggaggttaaggccatcctggacgctgcttctcagaagatcgccacgttcacggatatcggcaattctctggcacacgtggaacacctgttgagggatctggcctccttcgaggaaaagagtggagtagctgtcgagcgcgcgagagccctgtctttggatggtgaacagttgattggcaataaacactacgcagtagactctattaggcctaagtgccaggagctacgtcatctttgcgaccagtttagtgcagagattgcacgtaggcgtggtttgctgagcaagtcactagaactgcatagacgtcttgaaacctcaatgaagtggtgtgatgaggggatctatcttttagcctcgcaacccgtcgataaatgccaaagtcaagacggagcagaagccgcactgcaagagatcgaaaagtttttggagacaggcgccgagaacaaaatacaagagctcaacgctatttataaggagtatgagagtattctgaatcaggacttgatggaacacgtcagaaaggtttttcagaagcaggcgtctatggaggaagtctttcaccggaggcaggcttctctgaaaaaactggccgcgagacagacaaggcccgtacagcccgtagctccaagacctgaggccctggcaaaaagcccctgtcctagccctggtatccggagagggtccgagaatagttcttccgaaggaggcgctttaagaagaggcccatataggcgcgcaaaatcggagatgtctgagagcagacaaggccgggggtcagcgggcgaagaggaggaatctctcgctattctccgcaggcatgttatgtcggaactcttagatactgaaagggcgtatgtggaggagttgttgtgtgtgttggaggggtatgctgccgaaatggacaatcctctgatggcccacctcttgtcaaccggactgcacaataaaaaagacgtgctattcggaaatatggaagagatatatcacttccacaacagaatcttcctgagggaactggagaactatactgactgtcctgagctagtgggccggtgcttcctagagagaatggaagacttccaaatctatgaaaaatactgtcaaaacaagcccaggtctgagtcattgtggcggcagtgcagtgattgccccttcttccaggagtgccaaaggaagctcgatcacaagttatcactggatagctatctgcttaagccagtacagagaattacgaaataccagttattgttaaaagagatgttgaagtacagccgcaattgtgaaggtgctgaagatcttcaggaggctctttcttccattctcggcatattgaaagcagtgaatgacagcatgcatctgattgcaatcacagggtatgatgggaacttgggcgatctcgggaagctgttgatgcaagggagtttcagcgtatggactgaccacaaacggggacacactaaggtgaaagaacttgcccgcttcaaaccaatgcaacgacacctgttcctgcacgagaaagctgtactgttttgcaaaaagcgggaagagaatggagaaggctatgaaaaagcaccgtcctactcatataaacaatccttgaatatggctgctgtcgggatcaccgagaatgttaaaggcgacgccaagaagtttgaaatttggtacaacgccagagaggaagtctatattgtgcaggcacccaccccggagatcaaggccgcatgggtgaatgaaattaggaaggtgctgacctctcaactccaagcatgccgagaagcatcccaacatagagcactagagcaatctcagagtctgcctctgcccgcaccaacgtctacctcaccaagtcgtgggaatagtcggaacattaaaaagctggaggagcggaaaacagaccccctgtctctagaggggtacgtttccagcgccccgctgactaagccacccgagaagggcaagggctggtccaagacgtcgcactcgctagaagcgcctgaagatgacggggggtggtctagcgccgaggagcagatcaactctagcgacgctgaggaggatggaggtctcgggcccaaaaaactggtgcccggaaagtacactgtagtagccgaccatgaaaagggcgggcccgatgcactgcgggtaagatctggcgacgtggtggagttagtccaagagggggacgaagggctatggtatgtcagggatccaaccaccgggaaagagggttgggtccccgcctcttcactttccgtaagacttgggcccagtgggagcgcgcagtgtttaagtagcagcgaatcttcacctggatccgcggtgctcagcaactcttctagttgcagcgagggcggacaggccccgttcagcgacctgcaaggatag

SEQ ID NO: 217614 - DNA, 3372 bp, Artificial Sequence
  derived and/or modified sequence
atgaccgtgcggcggctgagcctgctgtgccgggacctgtgggccctgtggctgcttctgaaagctggcgctgacgaaatcatgcaccaggacatcgtgccattgtgcgccgccgacatccaggatcagttgaagaaaaggtttgcctacttgtcagggggaaggggccaggatgggtcacccgtaatcacttttcctgactacccagccttcagtgaaatcccagataaagagttccagaatgtcatgacatacctaacgtctatcccgagcctgcaggacgctggtattggtttcattcttgtcatcgaccgccgtcgggataaatggacctcggtgaaggcatcggtactgcgcattgccgctagctttcccgccaatcttcaactggtgctcgtgctgcgaccaacaggtttcttccagagaaccctttcggatatagcatttaaattcaaccgcgatgacttcaagatgaaggtccctgtgattatgctttccagcgtgcccgacttacatggctacatagataagtcgcagttaactgaagacttgggtggcacgctcgattactgccacagtcgatggttgtgccagaggactgctatcgaatcattcgctctaatggtgaagcagaccgcccagatgttacagtcttttggtacagaactagccgagaccgagcttccaaacgatgtacagtcaacctcatcagtgctttgtgctcatacagagaagaaggataaagctaaagaggacctcaggctggccttaaaggagggacattcagtgctggagagtctgagggaattacaggccgaaggttctgaacccagtgtaaaccaggaccagctggacaaccaagccaccgtccaacggttattggcccagcttaatgaaaccgaagctgcttttgacgaattttgggccaaacatcaacaaaagctggagcagtgcctgcagctgaggcacttcgagcaaggatttagagaagtgaaggccatactggatgcagctagccagaagatcgctacgtttactgacataggaaatagcctggctcatgtggaacacctgttgagggatttggcctcatttgaggagaaaagcggtgtcgccgtggagcgagctagggcgctgagcctcgacggcgaacagttaatcggcaataaacactacgcggtcgatagcatacggcctaaatgtcaggagctgcgccatctttgcgaccagtttagtgccgaaattgcccgcaggcgagggctcctgagcaaatctctcgaattacataggcgccttgagacgtctatgaaatggtgtgatgaaggaatttacctcctggcttcccaaccagtggataagtgccaatcgcaggacggggcagaggccgctctgcaagaaattgaaaagttcctggagactggcgctgagaacaagatccaagagctgaatgccatctataaggaatatgaatccatcctcaaccaagaccttatggaacacgtgagaaaagtcttccagaagcaagcctccatggaggaggtgttccacagacgccaggcctccctcaaaaaactggccgccagacagacccggcctgttcagccggttgctccaagacccgaagccttagctaagtctccatgtcccagtcccggcatcagacggggcagtgagaatagttccagcgaagggggtgcccttcggagagggccctataggagagcgaagagcgagatgtctgaaagcagacaggggaggggaagtgccggcgaagaggaggaatctctggctattctgcggcgtcatgttatgtctgaacttctggatacagagcgcgcttacgtcgaagagctgctctgtgtactggaggggtacgccgccgagatggacaatcctctcatggcacatctgttgtccacaggactccacaacaaaaaggatgtcctcttcggaaacatggaggagatttaccacttccacaatagaatttttctgcgggagctggaaaactataccgattgccctgagctcgtcggtaggtgtttcttggaacggatggaggattttcagatctacgagaagtattgtcaaaataagccccgctctgaatcgctgtggaggcagtgcagcgactgcccattttttcaggagtgtcagcggaaactggatcataaactgtctcttgactcatatttacttaaaccggtgcagcggatcaccaaatatcagttgcttctcaaagagatgctaaaatactcccgcaattgtgagggggccgaagaccttcaggaagctcttagcagtatccttggcattctgaaggccgtgaatgattccatgcatttaatagcaatcactggatatgatggaaatctgggtgacttgggaaagctcctgatgcagggatctttcagcgtttggacagatcacaagagaggtcacaccaaggtgaaagagctcgcccggtttaagcctatgcagcgccatctgttccttcacgaaaaggccgtgctgttttgtaaaaaaagagaagagaatggagaaggatatgagaaggcccctagctattcttacaagcagtcattaaatatggctgcagtgggcattaccgaaaacgtgaaaggagacgccaaaaaattcgaaatttggtataatgcgagagaagaagtatacattgttcaggcccccaccccagagataaaagcagcatgggtaaacgagatcaggaaagtgctgactagtcagctgcaggcatgccgagaggccagccagcacagagctttggaacagtcgcagtcgcttcccctgcctgcccctacctctacgagccccagcagaggcaattcccggaacatcaaaaaactggaggaaaggaagacagatcccctgagcctggaggggtacgtcagctcagcgccactaacgaagcccccagagaaaggcaaggggtggtctaaaacttctcatagcttggaggcgccagaggatgatggcggctggtcctctgctgaagagcaaatcaactcaagcgacgcagaggaggacgggggattgggacccaaaaagctggttcccggcaaatacacagtggttgccgaccacgagaagggtggccccgatgcgcttcgcgtgaggagtggcgacgtagttgagttagtgcaggagggcgacgagggtctgtggtatgtcagggatcctaccacagggaaagaagggtgggtgcccgcaagctctctatctgtccgactggggccttctggcagcgctcaatgccttagctcctctgaatcttcacctggctcagctgtgctatcaaattcttcgtcttgctccgagggtggccaagccccattcagcgacctccagggctag

SEQ ID NO: 217615 - DNA, 3342 bp, Artificial Sequence
  derived and/or modified sequence
atgggcgacggcaaggccgtgcggatcagcgtggccgagatgaagagttattatctgtacagcgagtggtgcagctggcttctcagcgttgccgaggatgagatcatgcaccaggacatcgtgcctctgtgcgcagccgacatccaggatcagctcaagaagcgctttgcctatctctccggcggcagaggccaagacggctctcccgtgattacttttccagattaccccgcttttagcgagattcctgataaggaattccagaatgttatgacttatctgacaagtataccctctttgcaggacgccgggatcggcttcatcctcgtaatcgacagacgtcgtgataagtggacgagcgttaaggcatctgtgctgaggatcgctgcatcgttccccgcaaatctacagctggtgctggttctccggcctaccgggttcttccagcgtactctgtctgacatcgcattcaagtttaatcgggacgatttcaagatgaaggtgcctgtgattatgttgagttccgtcccggatcttcacggttacatcgacaagagccagttaaccgaggatcttgggggtaccctggattattgccactccagatggctctgtcaacgcaccgccatagagtcatttgccctgatggtcaagcagacagcacagatgctgcaatcattcggaactgagctggccgagacggaactacccaatgacgtacagtctacctcaagcgtgctttgtgcacatactgaaaagaaggacaaggccaaagaggatctgaggcttgcgctcaaagaggggcacagtgttctggagagcctcagagagttacaggcagaaggtagcgagccttccgtcaaccaggaccagcttgacaatcaagccacagttcagcggctgttggctcagctgaatgagactgaggctgctttcgacgaattctgggccaaacaccagcagaaattggagcagtgtctgcagttgagacatttcgaacagggatttagagaggtcaaggcaatactggacgcagcgagccaaaaaatcgccactttcacggacatagggaactcactagcacacgtcgaacacttgttgcgggatcttgcctctttcgaggaaaaatccggggttgcagtggagcgggccagggccctgtccctcgatggtgaacagctcattgggaataagcattatgccgtggactcaatccgacccaagtgccaagagctgcgccacctgtgtgatcagttttccgctgagatcgctaggaggcggggcctgctctcgaaatctcttgagttacatagacgactcgagaccagcatgaaatggtgcgacgagggaatctatcttctcgcgagtcagcccgtggacaagtgtcagtcccaggacggcgctgaagccgcactccaggagatcgaaaaattcctcgagacgggtgcggaaaacaagatacaggagttaaacgccatctataaagagtacgaaagcatcctgaaccaagacctcatggagcacgtccgcaaagtcttccagaagcaggcctctatggaggaggtatttcatagacggcaggcctccctcaaaaaattagctgcgcgccagaccaggccagtccaacctgtggcccctcgacccgaagcactggcaaaatccccgtgtccttcacctggtattcggagaggcagtgagaacagcagcagcgaaggcggtgccctgagaagaggcccctacagacgcgctaagagtgagatgagcgagtcaagacaaggaaggggttccgctggagaggaggaggagagtcttgcaatcctacggcgtcacgttatgtcggagcttctcgatactgaacgggcttatgtggaagaactgctgtgtgtgctggagggatacgcagctgagatggataacccacttatggcccatctgctgtccaccggattacacaacaaaaaggatgtgttgtttgggaacatggaagaaatttaccatttccataacaggatttttctgcgagaactagaaaactatactgactgccctgagctagttgggagatgttttctggagcggatggaggacttccagatctacgagaaatattgccagaataagccacgcagcgagagcttgtggaggcagtgcagcgactgtccattcttccaagaatgtcaaaggaagttagatcacaagctgtccctggattcttatttattgaaacccgttcaaagaattaccaagtaccagctgttgctgaaggaaatgctcaagtactcccgtaattgcgaaggggccgaggatctacaggaagcgctttcctctatactgggcatcctcaaagcggtcaacgatagcatgcacctcatagctattacagggtacgacgggaacctgggagatctcggtaagctgctgatgcaggggtcattttccgtatggaccgaccacaagaggggacacaccaaagtgaaggagctggcgcggttcaaacctatgcagcgtcacctgttcctccacgaaaaggctgttctgttttgtaaaaagcgggaagagaatggcgaaggatatgagaaggctcccagttattcatataagcagtcgctgaacatggcagccgtcgggattaccgaaaatgtgaagggagatgctaaaaagttcgagatctggtataatgctcgtgaagaagtgtatatcgttcaggcaccaaccccagaaatcaaggccgcctgggttaatgaaatccgcaaggtcctcacatctcaactgcaggcctgccgagaggcaagccagcacagagcccttgaacaaagccagagtctcccgcttcctgcccccacgtccactagcccctcacgtgggaactcccggaatataaagaaattggaagaacggaaaaccgatccattaagcctggaaggttacgtgagttccgcacccctaacgaaaccacctgagaaagggaagggctggagcaagacctcccactccctggaagctccggaggatgatggcggttggagctcagccgaggagcagatcaacagtagtgatgctgaagaggacggcgggttaggccccaaaaaactggtgcccggaaagtacacagtggtagccgaccacgagaagggcggcccagacgccctccgcgtgcggagtggtgatgttgtggagctcgtgcaggagggggatgagggcttgtggtacgtacgcgaccccaccacaggcaaggagggctgggtgccagcatcatcgctgagcgtgcggctgggacccagcggatctgcacaatgtctaagcagctccggaaaggcccatgtccctagagcacacccttag

SEQ ID NO: 217616 - DNA, 2712 bp, Artificial Sequence
  derived and/or modified sequence
ctgaagatgcccgtgatcatgctgagcagcgtgcccgacctgcacggatatatcgacaagtctcagctgaccgaggatttgggaggcacgctggattactgccatagtcgctggttatgccagcggacagccatagagtcttttgcactgatggtcaagcagactgcccagatgttgcagagctttggcaccgagcttgccgaaacagagctgccaaatgacgtccagtcaacaagttctgttttatgcgcccacactgagaagaaagacaaggccaaggaggatctgcggttggcactcaaggagggtcacagcgttctggagagtcttcgcgaattgcaggccgaaggcagcgagccctcagttaaccaggaccagctcgacaatcaggcaaccgttcagcgcctattggcccaactgaacgaaaccgaggcagctttcgatgaattttgggcgaaacatcagcagaaacttgaacagtgcctccagctgcggcactttgaacagggcttccgtgaggtgaaggctatcctggatgccgccagtcagaagatcgccacattcacggacattggtaactctttggctcacgtggagcatctcctccgcgatttggcatcgtttgaagaaaagtccggagtggccgtcgaacgagctcgtgcgctgtccctggatggcgagcagctgataggcaacaagcattatgctgttgactcgatacgccccaagtgccaggaattgaggcatctgtgtgaccagtttagtgccgagatcgcccgccgccgagggctcctttcgaagtcgctcgagctgcacagaaggctggagacatccatgaagtggtgcgacgaaggcatttatcttcttgcctctcagcccgttgacaaatgtcaatcccaagacggagccgaggccgccttacaggagatcgaaaaatttttggaaacaggagccgagaataagattcaagaacttaatgctatctacaaggaatatgagtctatattaaatcaagacctgatggagcacgtgcgcaaagtgtttcaaaagcaagcatccatggaagaagttttccacaggagacaggcttcactgaagaagctggcagcgcggcagactcggccagtgcaaccagttgccccccgccctgaagccctggctaaatcaccctgtccctccccaggaattcgacgcggaagtgaaaattccagcagcgagggcggtgccctgagacggggcccataccggcgggccaagagcgagatgtcggagagtcggcaggggcggggtagtgcgggcgaagaggaagaatctctggccatcctgcgacggcatgtgatgagtgagctgctcgatactgagagagcttacgtggaggagctgctctgcgtcctggaaggatacgcagccgagatggataaccccctgatggcccacctcctctccacgggacttcacaacaaaaaggatgtactctttggcaacatggaagaaatctatcatttccacaacagaatattcctccgggagcttgaaaattacacagattgcccggagctggtgggacggtgttttttagagagaatggaagatttccaaatttatgagaaatactgccagaacaagccacgcagtgaatctctatggaggcagtgttcagactgccctttctttcaggagtgtcaacggaagctcgatcataagttgagcttggactcatacttgctgaagcccgtccagcgaattacaaaataccagctactgttaaaagaaatgctgaaatactctagaaattgcgagggcgccgaagacctgcaggaggccctctcgtcaatcctgggaatcctgaaggcagttaatgactcgatgcacctaatagctattacaggatacgatggcaacctcggtgatctcggtaagctgctaatgcagggtagcttcagcgtgtggactgaccataaacggggccataccaaggtgaaagaactggcccgctttaagcccatgcagagacatctcttcctgcacgagaaagcagtcttattttgcaaaaagagagaagagaacggcgaggggtatgagaaagcccctagctactcctacaagcagagcctgaatatggccgccgtggggataaccgagaacgtcaagggagacgccaagaagttcgaaatatggtacaatgccagagaggaagtctacatcgtacaggcccctacacctgagatcaaagcagcctgggtgaacgagattcgcaaggttcttacctcccaattgcaagcatgtagggaggcgagccagcacagggctcttgagcagtctcaatctttacctctgccagccccaactagtaccagccccagtaggggtaacagcagaaatatcaagaaacttgaggagagaaaaacggaccccctatcattagaagggtacgtgagctcagcaccactcacaaaacctcccgaaaagggcaagggatggtcaaagacatcccattccttagaggcccccgaggatgacgggggatggtcctctgcggaggagcagatcaatagtagcgatgctgaggaagatggtggactggggcctaagaaattggttccaggaaagtacaccgtggtggcagatcatgagaagggaggcccagatgcactcagggttcggtcgggtgatgtcgtggagcttgtccaagaaggggacgaaggactgtag

SEQ ID NO: 217617 - DNA, 3390 bp, Artificial Sequence
  derived and/or modified sequence
atggccgagaagggcgcttccagaggaactctgaggcgcctgtggtcgttgccaaggagaaggcgtggtaccgcaggaaggtcacgccctgatgagatcatgcatcaggatatagtgcctctgtgtgcagctgacatccaggatcaactgaagaaacggtttgcatatctctctggcggaagagggcaggatggctcacccgtcatcacttttcccgattaccccgcatttagcgagattccggacaaagaattccagaacgtgatgacctatctcaccagcatcccatccttgcaggacgcgggaatcgggtttatccttgtcatcgaccgcagacgggacaagtggactagcgtcaaagcctctgtccttcgcatcgctgcttctttcccagcaaacttgcagctggtattagtccttcgcccaaccggattctttcagagaactctctcagatatcgcttttaaattcaaccgtgacgacttcaagatgaaagtgccagtgattatgctgagcagtgttcccgacctccatggatacattgacaagtcccagctgactgaggacctcggaggcacacttgattactgccattcgcgatggctgtgccagaggaccgctattgagtccttcgctctgatggtgaagcagactgcccagatgctgcaaagtttcggaacggaacttgccgaaacagagttgcccaacgacgtgcaaagcacttcgagcgttctgtgtgctcatacggagaagaaagataaagctaaagaagatctgagattggctctcaaggaaggccactccgtgctcgagagtctgcgcgaactccaggctgagggcagcgaacccagcgtcaaccaggatcagcttgacaaccaggctacagtgcagcgtctcctcgcacagctcaatgagaccgaagcagcgttcgacgagttttgggctaagcatcagcaaaaactggagcagtgcttacaactacgccatttcgaacagggattccgggaagtaaaagccatcctggacgcagctagccagaaaatcgccactttcaccgacatcggaaactcactagcacacgtggagcatttgctgagggatctggctagcttcgaagagaagtccggcgtggctgtggagagggcgcgagcactgtctctggacggcgagcagctgattgggaataaacactacgctgtcgactcaattaggccaaaatgtcaggagttgcgacatctttgcgatcagttctctgccgaaattgcccgtaggagaggcttgttgagtaagagcctcgagctccaccgcaggctagagaccagtatgaaatggtgcgatgaaggcatttatttgctggcatcccagccggtggacaagtgccaaagccaggacggcgctgaagcagctctgcaggaaatcgaaaaatttttagaaaccggggctgagaacaaaatacaggagctcaacgccatctataaggagtacgaaagcatcctcaatcaggatttaatggagcacgtgaggaaagtatttcagaagcaagcctccatggaggaggtgtttcacagacgacaggcctctcttaagaaactggcagcccgacagacccgtcccgtacaaccagttgccccaaggccagaagcactggctaaaagtccatgtccttctccgggaataaggcgtggttctgaaaactcttcctcagagggcggagctctgcgcaggggaccctaccgcagagccaaatctgaaatgtccgaaagccgccagggtaggggatctgctggggaagaagaagaatcgctggccatcctgcggaggcatgtcatgagcgagctgctggacaccgagagggcatatgtcgaggagctcttgtgcgtcctcgaggggtatgctgccgagatggataacccactgatggcacacctgctgtcaactggcctgcataataaaaaggacgtgctatttggtaatatggaagagatttatcattttcacaaccggatattcctacgcgagttggaaaattatactgattgcccggagctggtgggacgatgtttcctcgaaagaatggaggatttccaaatttacgaaaaatactgtcagaataagcccaggtctgagtccctatggcgtcagtgctctgattgccctttctttcaggaatgccagcgtaagctggatcataaattaagtctggacagctatctacttaagcccgtccagagaatcactaaatatcagttactgctgaaagagatgctgaagtacagcaggaattgtgaaggcgcagaggaccttcaagaggctttaagctctatcctgggcatccttaaagccgtcaacgatagtatgcatttgattgctatcactggttacgatggaaacctgggagaccttggaaaactcctaatgcaggggagttttagcgtgtggacagaccacaagcgtggccacactaaagtcaaggagctcgcaagattcaaaccaatgcagcggcacttatttctccatgagaaagctgtgttattttgtaaaaagagggaagagaatggcgaaggttacgagaaagcaccttcgtactcttacaagcagtccttgaacatggctgcagtgggcatcactgagaacgtaaagggggacgcaaagaaatttgagatttggtacaacgccagggaggaagtctacatcgtccaagcacccacccctgagatcaaggctgcgtgggtgaatgaaatacggaaggtcctgactagccagctgcaggcctgcagggaggcgagccagcatcgcgcacttgagcagagtcagtcattgccactcccggctcctactagcaccagcccaagccgtggtaactcccgcaatatcaagaagctggaggaacggaagactgacccactctctttggaaggatatgtctcttctgccccacttactaagccccctgagaaggggaagggctggagcaagactagccactcactggaggctccagaggatgatgggggttggtcctctgccgaagagcaaattaattcctccgacgcagaggaggacgggggtctaggccctaaaaaattggtgccaggaaaatatactgttgtggccgaccacgaaaagggcggtcccgacgctctacgggtgcgctccggtgacgttgtggagctcgtgcaggagggcgacgaagggctctggtacgtgagagacccgactaccgggaaggagggttgggtacctgcctcatctcttagtgtacgtctgggcccaagtggttcagcccagtgtctgagcagctccgagtcatctcctggttcagcagtcctgagtaactcgtcaagctgctctgaaggaggccaggctccattcagcgacctgcagggatag

SEQ ID NO: 217618 - DNA, 3549 bp, Artificial Sequence
  derived and/or modified sequence
atggctcgtgttgagagcccagtccccgcagctcgggcatccttaactggaagttgcgttttgggccaggctatgccgctgaggggaggcgcaggcccttctcccgcatctcatggccctacgcatggcccttcggaccctcgcacatgtcttccaggaagaggagcagggggaatgaggccccacggccgaggtgccctcgggtgttgtgggctgtgctctttttacacttgtcacggcgcagctggagatgagataatgcaccaggacatcgtgccactttgcgcagccgacatccaggatcagttaaaaaaaaggttcgcttacctgtcaggaggtcgcggtcaggacggctccccagtgataaccttcccagattaccctgcattctccgaaataccagacaaggaatttcagaacgtgatgacctaccttacgagtattccaagccttcaggacgcgggaataggctttatattggtgatcgatcggcgaagggacaagtggacttccgtgaaagcttccgttctgcgcatcgccgcttccttcccggctaacttgcagctggtgctagttttaaggccaacggggttttttcagcgcacattgtcagacattgcatttaaattcaatagggacgatttcaaaatgaaggtgcccgtgattatgttatcttcagtaccagacctgcatggttacattgataagagccagctcacagaggaccttggcggaactctcgactactgccattcacgatggttatgccaaagaacagccattgagagttttgcactgatggtgaaacagactgctcagatgctccagagctttgggacggagcttgccgagactgagttgccaaacgacgtccagtctacctcttccgtactgtgcgcccatactgaaaaaaaagataaggcaaaggaagatctgcgcttggccttgaaggaaggccatagcgtcttggaaagcctgagggagctccaggccgaggggtccgaaccctcagtcaaccaggaccagcttgataaccaggccacggtgcagagactgctggcccagctgaacgaaacagaagcagccttcgacgaattctgggcaaagcaccagcaaaaactggagcaatgtctacagctacgccactttgagcaaggatttagggaggtaaaggcaattcttgacgcagctagtcagaagatcgcgactttcactgacattggcaacagtctcgcacacgtggaacacctgctgcgcgatctggcttcctttgaagagaagagcggggtggccgtagaacgggctcgtgcacttagcctggatggcgaacaactgatcggaaacaagcactatgccgttgatagtatccgaccaaaatgccaggagctgagacacctgtgtgaccagttttctgcggaaatagctcgccgacggggactactctccaaaagtctggagttacatagaagattagagacttctatgaaatggtgcgatgaaggaatctatctactcgccagtcagcctgtggataagtgccagagtcaagacggagcagaagcagcattacaggagatcgagaaatttctggagaccggagccgagaataagatacaggagctgaatgctatttacaaagaatacgagtcaatccttaatcaagatctgatggaacatgtgaggaaagtgttccaaaagcaagctagcatggaagaggtgttccatagaagacaggcaagcctgaaaaagttagcagccaggcagacacgcccagtgcaacctgtggctccccgaccagaagcactggcaaaatccccttgccctagccctgggattagaagagggagtgaaaacagctcgagtgaaggtggtgcactgcgacggggtccttatcgccgagctaagagcgagatgtccgaatcacgacaaggcaggggttccgccggtgaggaagaagaatcactcgcgattttgcggagacatgtcatgagcgaactgcttgatacagaaagagcatacgtcgaagaattgctgtgcgtactagaaggttacgccgcagaaatggataaccctcttatggcacatctgctgagcaccggcctgcataataagaaagacgtcctcttcggcaacatggaggagatataccacttccacaatagaatctttctgcgcgagttggaaaactatactgactgccctgagctggtcggtaggtgcttcctagaacgaatggaggacttccaaatttatgagaagtactgtcaaaacaaaccacgctccgaatctctttggcggcagtgctccgattgtccattctttcaggagtgccagcggaaactggatcataaattaagtcttgactcttacctgcttaaacccgtacagcgaattacaaaataccagctgctcctcaaggagatgctgaaatattctcgcaactgcgaaggagccgaggatctgcaggaggccctgtctagtattctgggaatcctgaaggcggtaaatgactcaatgcatcttatcgccattacaggatatgacgggaatctaggggacctcggtaagctgttaatgcaggggtcgttctccgtctggaccgaccataaacgcggacacactaaggtgaaggaactcgccaggtttaagcccatgcaacggcacctgttcttgcacgaaaaggcagtcctgttttgtaagaagcgagaagagaacggggaaggatacgaaaaggcaccaagctatagctacaaacagtccctgaatatggcggctgtgggtattaccgagaacgttaagggagacgccaagaagtttgaaatctggtataacgccagagaagaggtgtacatcgtgcaggctccaacaccggagattaaggcagcttgggtgaacgaaatccgcaaggtcctgacatctcaattacaggcctgtcgggaggccagccagcaccgtgctttggaacagtcgcaaagcctgccccttcctgcaccgacctcaaccagcccgagcagaggtaacagccgcaacatcaagaagctggaggagagaaaaacagacccattaagtctcgaaggctacgtgagtagcgcgcctctgaccaaacccccagagaagggcaaagggtggagcaaaacctctcatagcttggaggcccctgaggacgatggaggatggtctagtgctgaggagcaaatcaatagttccgatgcggaggaggatgggggactgggacctaaaaagcttgtgcctgggaagtacactgtcgtcgccgaccacgagaagggaggccctgacgcactaagagttaggagcggtgatgtcgtagaactggtgcaggagggagatgaggggctgtggtacgtgcgagaccctaccaccggaaaggaggggtgggtgcccgctagttccctgagtgtgcgcctgggcccaagtggctcagcccagtgtctgtcatcgtccgagagcagtcccggttctgctgtcttatcaaattccagctcatgcagcgaagggggacaggcaccttttagtgatctccagggctag

SEQ ID NO: 217619 - DNA, 3372 bp, Artificial Sequence
  derived and/or modified sequence
atgacagtccgcaggctgtctctcctgtgcagggacctgtgggccctctggctcctgttgaaagcgggagcagacgagataatgcatcaggacatcgtcccactgtgtgcagcggacatacaggaccagcttaagaagagatttgcctatctctcagggggtaggggccaggacgggagtccggtgatcacttttcccgactaccccgctttttcagagatccccgacaaagagtttcaaaacgttatgacttatctcacatccatccctagccttcaggacgctgggatcggcttcattctggttatcgacaggagaagggacaaatggacatccgtcaaggcttccgtccttcgaattgccgcatcctttccagcaaatttgcagctcgtcctggtcctcaggccaaccggctttttccagcggacactcagtgatatcgcctttaagttcaacagagacgattttaaaatgaaagtacccgtcataatgctctcctctgtccccgatttacatggatacattgataaaagtcaacttaccgaggatctgggtgggactctagattactgtcattcacggtggctgtgccaaaggactgccatcgaaagcttcgcattaatggtgaagcaaaccgcacagatgttacagtcttttggaacggagttggccgagacggagctacccaacgatgtccagtcaaccagctcagtgttgtgcgctcacacggagaagaaagacaaagccaaagaagaccttagattggctctgaaagaaggtcattctgtcctggagtccctcagagagctccaggccgagggaagcgaacccagcgttaatcaagatcagctggacaatcaggctactgtgcagagactgctggcccagctgaacgaaactgaagccgcttttgatgagttctgggccaaacaccagcaaaagctcgagcagtgtctccagctgagacattttgagcagggcttccgggaagtgaaggcgattttagatgcagctagtcagaaaattgctacgtttacagatatagggaactccctggctcatgtggaacatctcctgagagatctggctagtttcgaggagaagagcggggtagcagtggaacgggctagggccctttccctagacggcgaacagcttatcggaaacaaacactacgctgtcgactcgatacgacctaaatgtcaggagctcagacacctctgtgatcagtttagcgccgagatcgcaagaaggaggggtctcctgagcaaaagcctggaactgcacaggcgccttgagacgtcaatgaaatggtgcgacgaggggatttacctgctggcctcccagccagtggacaagtgccagtcgcaggacggcgctgaggcagcactccaagaaattgaaaagtttcttgagaccggggcagaaaataagatccaagaattgaacgcaatctacaaagagtacgaatccatcctgaatcaggacttgatggagcacgtacgcaaagtctttcagaaacaggcaagtatggaagaagttttccaccgcagacaggcttctcttaagaagctggccgctaggcaaacacggccagttcagcccgtggcgcctcgcccagaggctcttgccaaaagcccatgcccaagccccggaatccgacggggttccgaaaattcctccagcgaaggcggagccctcaggcgtggaccgtaccggagagctaagtccgaaatgagcgagtctcggcagggaaggggctctgcgggtgaagaggaagaaagcctggcaatcctgaggaggcacgtgatgagtgagctgctggacaccgagcgagcgtacgttgaagaactgttatgcgtgctggaggggtacgcagctgaaatggacaatcccttgatggctcacctcttaagcacaggcctgcacaataagaaggatgtgttatttggcaacatggaggagatttaccacttccacaaccggatcttccttagggagctcgaaaattacactgactgccctgaactggtcggaagatgttttttagagcgtatggaagacttccagatctacgagaagtactgccagaacaagccacgttcagagagtctgtggcgtcagtgcagcgattgtcctttctttcaggagtgccagcgaaaactggatcataagctatcgttggatagctatcttttgaagccggtccagcggataacaaaatatcagctgctcctcaaggaaatgctaaagtattcaagaaattgtgagggcgcagaagacttgcaggaagctctatctagcattctcggaatcctgaaagcagtgaatgactccatgcacctaatcgccattaccggttatgacggtaacctcggcgacctaggaaagctgctgatgcagggatcctttagtgtctggaccgaccacaaaaggggccataccaaggtgaaggagcttgccaggttcaaacctatgcagagacatctgttccttcacgaaaaagccgttctcttttgcaaaaagcgagaagagaatggggaggggtatgagaaagcgccaagctacagctacaaacagagcttgaatatggctgctgtgggtatcaccgaaaatgtcaagggcgacgccaagaagttcgagatttggtataatgccagggaggaagtgtacatcgttcaggcgccaacgccagagattaaggccgcatgggtgaacgagatcaggaaggtgctgacgagccagctgcaggcatgccgtgaggcctcacagcatagagcgctggagcagtcccaatccctccccctgcctgcgcctacctccacttcaccatcacgaggcaattcacgaaatatcaaaaaactggaagagcgcaaaactgatccactatcactggagggctatgtgagctccgcaccactgacgaagcctccagaaaagggcaagggctggtctaagacctctcattccctagaagctcccgaagacgacggcggttggagtagtgcagaggaacagattaatagctctgatgcagaggaagatggcggactgggcccaaaaaaacttgtgcccggaaaatacactgtggtcgctgaccatgagaagggcggaccagatgccctgcgcgtgaggtcaggtgacgtggttgagctcgtccaagaaggagacgagggcctgtggtacgtgcgggatccgaccaccgggaaagagggatgggtacccgcatcttctctgtcagtgagactgggtccatccggttcagcacaatgtctcagtagctcagaatcttcgccaggcagcgcggtgctaagtaatagctcctcttgctcagaggggggacaggcccctttttcagatttacagggatag

SEQ ID NO: 217620 - DNA, 3342 bp, Artificial Sequence
  derived and/or modified sequence
atgggagatggcaaggccgtaagaatatccgtcgctgagatgaaatcctattacctatactctgaatggtgttcgtggctcctgagcgtggctgaggacgaaatcatgcatcaggatatcgtacctctgtgcgccgctgacattcaggaccagctgaagaagcgcttcgcgtatctcagcggtggtcgcggacaggacggctcacccgtaattacattccccgattatcctgcgtttagcgagatccctgataaggagtttcagaatgtcatgacatacctgaccagcattccctccctacaggacgctggaattggtttcattctggtgatcgataggcgtcgagacaagtggacatcagtgaaagctagcgttcttcggatcgcggcaagcttccccgcaaatctgcagctggtcttggtcttacggcctactggcttcttccagcgcacgctgtctgatatcgcttttaaattcaatcgggacgacttcaagatgaaggtgccagtgattatgttgtcctcagtccccgatttacatggctacatagacaagagtcagctgacagaggatctgggcggaactttggactattgtcacagccggtggctttgccagagaacagcgatcgaatccttcgccctgatggtgaagcagactgcccagatgttgcagtccttcgggaccgagctggccgagacagagctgcccaacgatgttcagagcacctcctccgtcctgtgtgcccacaccgagaaaaaggataaggccaaggaagatttgcgcctggcactgaaagagggacatagcgtgcttgagtccctgagagagttacaggccgaggggagcgaaccatctgtgaatcaagaccaattggataaccaggccaccgtacagcgtctgctcgcacagctgaatgagacagaggcagcatttgatgaattctgggccaagcatcagcagaagttagagcaatgcctgcagctccgacacttcgaacagggatttagagaagtcaaggctattctcgatgctgcgtcacagaaaattgccactttcacagatataggaaactctctggcccatgtggaacatctgctgcgggatctggcctctttcgaagagaagagtggggtcgccgtggagagagcgagagccctgtcactcgacggagagcagctgattggcaataagcactatgcagtggactctattcggccaaagtgtcaagagctgaggcacctgtgtgaccaattctcagcagagatagcaaggcggagaggcctcctctcaaagagcctggagctgcacaggagacttgaaacttccatgaagtggtgtgacgagggcatctaccttctcgccagccagcctgttgacaagtgccagtctcaggacggtgctgaagctgccctccaagagattgagaagtttctggagacaggcgctgagaataagattcaggagctcaatgcgatatataaggagtacgaatctatcctaaaccaggacctgatggagcatgtcagaaaagttttccagaaacaagcctctatggaggaggtgttccatcggagacaggccagcttgaagaaactggccgcaagacaaacaaggcctgtgcaacctgtggcccctcggccagaggctctggctaaatccccctgcccgtcccctggcattcggcgaggatctgagaactccagctcggaaggtggtgcccttcggcgtggcccttatcggagggccaagagcgagatgagtgaatcccgacaaggtcgcggatcagctggagaggaggaagagtcccttgctattcttcgtcggcatgtcatgagcgagctcttggacaccgaaagagcctatgtggaggaactcctgtgcgttctcgagggctacgcagccgagatggataatcctctgatggcccatctattgtccactgggctccacaacaagaaggatgtgctctttggtaacatggaggagatttaccacttccacaatagaatatttctcagggagttagaaaactacactgactgtccagagttagtgggacggtgtttcctggaaagaatggaggatttccagatctacgaaaagtattgtcagaacaagccacgcagcgagagtctttggcgtcagtgtagtgactgtccattcttccaggaatgtcagcgtaagcttgatcacaagctgtcactcgactcttatctgctgaagcccgtccagagaattacaaaatatcaactcctcctgaaggagatgctaaagtatagtcgcaactgtgagggtgccgaagatttacaggaagcccttagctcaattctggggatcctaaaggccgtcaacgacagcatgcatttaattgctatcaccggatacgacgggaatctgggtgatttaggcaagctccttatgcaaggatctttcagcgtctggacggaccacaagcgcggtcacaccaaagtgaaagaactggctcgcttcaaacccatgcagcggcacctgttcctgcatgagaaggcggtcttattttgcaagaaacgggaagaaaacggggaagggtacgagaaggctcccagttacagctataagcagagcctaaacatggccgctgtgggtattacagaaaatgtgaagggagatgcaaagaagttcgagatatggtataatgctagggaagaggtgtacattgtccaggcccctactcctgagattaaagccgcatgggtgaatgaaattaggaaagtgcttacctcccaactgcaggcatgtagagaagccagtcagcatcgggctctggaacaatcccaatctttgccattgccggcacctactagtaccagcccctcccggggtaacagccggaatattaagaagcttgaggagcggaaaaccgatccactgagcctcgagggatacgtgagcagtgccccactgactaagccacctgagaagggcaagggatggagcaaaacttcacacagcctagaagcacctgaggatgacggaggctggtcatccgcagaagagcaaattaattccagcgatgccgaagaagatgggggactaggcccaaaaaagctggtgccaggcaagtatacagtcgtcgctgaccacgagaagggtgggcctgatgcactgagagtgcgtagcggggacgtggtagagctggtgcaggaaggagacgaggggctctggtacgtgcgggaccccaccaccggtaaagagggttgggtgcctgcgtcttcgttgagcgtgcggcttggaccatcaggaagtgcacaatgtctgagttcatcagggaaagcacacgtgcctagggcccacccctag

SEQ ID NO: 217621 - DNA, 2712 bp, Artificial Sequence
  derived and/or modified sequence
ttgaagatgcccgtgattatgctcagctccgtgcccgatctccacggctatattgacaaatcccagctgactgaggacctgggaggaactctcgactattgtcattccagatggttgtgccagaggacagctatcgaatctttcgccctcatggtaaaacagactgcccagatgctgcagtcctttggaaccgagctggctgagaccgaactgcctaatgatgttcagagcacttcaagcgtgttgtgcgcgcacaccgaaaagaaggacaaggccaaggaagaccttcgcctggctcttaaagaaggacactccgtgctcgagagtttgcgagagcttcaagcagaggggagcgagccatcagttaaccaggatcagctagataaccaggccacagtccagcgcctgcttgcgcagcttaatgaaactgaagccgctttcgatgagttttgggccaagcatcagcaaaagctcgagcaatgcttacaactgcgccatttcgagcagggcttccgcgaagtcaaggccatcttggacgcagcttctcaaaaaattgccacatttaccgatatagggaattctttggcccacgtggaacatctattgcgcgatctggcttctttcgaggagaagagcggcgtcgctgtagagcgggcacgcgctctgtccctagacggcgagcagctgattggaaacaaacattacgctgttgactcgatcaggccgaaatgccaagagctccgccacctctgcgatcagttctcggctgaaattgccagaagacggggactgttatccaagagcctcgagttacatcgaagattggagacatccatgaagtggtgtgacgagggaatctatctgctggcttctcaacccgtggacaaatgtcagtctcaggatggagccgaggcagcattgcaggagatagaaaagtttttggaaacaggagctgaaaataagatccaggaactgaacgcaatctataaggagtatgagagtatcttaaaccaagacctcatggaacatgtgcgtaaggtgttccagaagcaggcatcgatggaagaggtgttccaccggaggcaggctagcttgaagaaactggccgctaggcaaacaagacctgttcagcctgtggcaccacggcctgaagcactggccaagtccccatgcccatctccaggaatccgcagaggaagtgagaacagctcatccgaaggtggcgcactccgcagaggtccatataggcgggctaaatcagagatgagtgaaagtagacaaggccgaggctctgctggggaagaagaagagtcgctagcaatccttagaaggcacgtaatgagtgagctgctggataccgaaagagcttacgtcgaggagcttctatgcgtgctagaaggatatgcagcagagatggataaccctctcatggcccatttgttgagcacagggctgcacaataagaaggacgttttatttgggaacatggaagagatctaccactttcataaccgaatattcctgcgggagctagaaaattatactgattgcccagagctggtgggcagatgcttcctggaacggatggaggattttcagatctacgagaaatactgtcagaataagcctaggagtgagtccctctggaggcagtgcagtgactgcccattcttccaggaatgccaacgtaagctcgaccacaaactttccctagattcttacctgttgaaaccggtccagcgtatcacaaaataccagctgttactaaaggagatgcttaagtatagtcgaaattgcgagggagccgaggatcttcaggaggctctgagttcaattctcggtatcctcaaagccgtcaacgacagtatgcacctcattgcaattacaggctacgacggtaatttgggagatctgggtaaactccttatgcaggggagctttagcgtatggactgatcacaaaagaggacatacgaaggtgaaagagttagctcgattcaaaccaatgcagaggcacctgttcctccacgaaaaagcagttcttttttgtaagaagcgggaggagaacggcgagggatacgagaaggctccttcatattcatataagcagtccctaaacatggcggcagtcggcatcaccgagaatgttaagggcgatgccaagaagttcgagatttggtacaatgctcgggaagaagtgtacatcgtccaagccccaacccccgagataaaggctgcatgggtcaacgaaattcgcaaggtgctgacttcccaactccaggcatgtcgtgaagcctcacagcacagggccttagagcaatcccaaagtctgcccctgcctgctccaacttcgaccagcccatcccggggaaacagccgcaacattaagaaactggaggaaagaaaaacagatccgctgagtctggagggttacgtcagctcagccccactcacgaaaccaccagaaaagggtaaaggctggtctaagaccagccacagtctagaagctcctgaggacgatggtggctggtcctccgctgaagagcaaatcaactcatccgatgctgaagaagacggcggtttagggccaaaaaaacttgtacccggaaagtacactgtcgtggctgaccatgaaaagggtgggccagatgccctgcgtgtgcggtctggcgacgtggtcgagctggtccaggagggcgacgagggcctttag

SEQ ID NO: 217622 - DNA, 3390 bp, Artificial Sequence
  derived and/or modified sequence
atggccgagaagggcgccagcagaggcaccctgagaagactgtggagcctgcccagaagaagaagaggcaccgccggcagaagcagacccgacgagatcatgcaccaggacatcgtgcccctgtgcgccgccgacatccaggaccagctgaagaagagattcgcctacctgagcggcggcagaggccaggacggcagccccgtgatcaccttccccgactaccccgccttcagcgagatccccgacaaggagttccagaacgtgatgacctacctgaccagcatccccagcctgcaggacgccggcatcggcttcatcctggtgatcgacagaagaagagacaagtggaccagcgtgaaggccagcgtgctgagaatcgccgccagcttccccgccaacctgcagctggtgctggtgctgagacccaccggcttcttccagagaaccctgagcgacatcgccttcaagttcaacagagacgacttcaagatgaaggtgcccgtgatcatgctgagcagcgtgcccgacctgcacggctacatcgacaagagccagctgaccgaggacctgggcggcaccctggactactgccacagcagatggctgtgccagagaaccgccatcgagagcttcgccctgatggtgaagcagaccgcccagatgctgcagagcttcggcaccgagctggccgagaccgagctgcccaacgacgtgcagagcaccagcagcgtgctgtgcgcccacaccgagaagaaggacaaggccaaggaggacctgagactggccctgaaggagggccacagcgtgctggagagcctgagagagctgcaggccgagggcagcgagcccagcgtgaaccaggaccagctggacaaccaggccaccgtgcagagactgctggcccagctgaacgagaccgaggccgccttcgacgagttctgggccaagcaccagcagaagctggagcagtgcctgcagctgagacacttcgagcagggcttcagagaggtgaaggccatcctggacgccgccagccagaagatcgccaccttcaccgacatcggcaacagcctggcccacgtggagcacctgctgagagacctggccagcttcgaggagaagagcggcgtggccgtggagagagccagagccctgagcctggacggcgagcagctgatcggcaacaagcactacgccgtggacagcatcagacccaagtgccaggagctgagacacctgtgcgaccagttcagcgccgagatcgccagaagaagaggcctgctgagcaagagcctggagctgcacagaagactggagaccagcatgaagtggtgcgacgagggcatctacctgctggccagccagcccgtggacaagtgccagagccaggacggcgccgaggccgccctgcaggagatcgagaagttcctggagaccggcgccgagaacaagatccaggagctgaacgccatctacaaggagtacgagagcatcctgaaccaggacctgatggagcacgtgagaaaggtgttccagaagcaggccagcatggaggaggtgttccacagaagacaggccagcctgaagaagctggccgccagacagaccagacccgtgcagcccgtggcccccagacccgaggccctggccaagagcccctgccccagccccggcatcagaagaggcagcgagaacagcagcagcgagggcggcgccctgagaagaggcccctacagaagagccaagagcgagatgagcgagagcagacagggcagaggcagcgccggcgaggaggaggagagcctggccatcctgagaagacacgtgatgagcgagctgctggacaccgagagagcctacgtggaggagctgctgtgcgtgctggagggctacgccgccgagatggacaaccccctgatggcccacctgctgagcaccggcctgcacaacaagaaggacgtgctgttcggcaacatggaggagatctaccacttccacaacagaatcttcctgagagagctggagaactacaccgactgccccgagctggtgggcagatgcttcctggagagaatggaggacttccagatctacgagaagtactgccagaacaagcccagaagcgagagcctgtggagacagtgcagcgactgccccttcttccaggagtgccagagaaagctggaccacaagctgagcctggacagctacctgctgaagcccgtgcagagaatcaccaagtaccagctgctgctgaaggagatgctgaagtacagcagaaactgcgagggcgccgaggacctgcaggaggccctgagcagcatcctgggcatcctgaaggccgtgaacgacagcatgcacctgatcgccatcaccggctacgacggcaacctgggcgacctgggcaagctgctgatgcagggcagcttcagcgtgtggaccgaccacaagagaggccacaccaaggtgaaggagctggccagattcaagcccatgcagagacacctgttcctgcacgagaaggccgtgctgttctgcaagaagagagaggagaacggcgagggctacgagaaggcccccagctacagctacaagcagagcctgaacatggccgccgtgggcatcaccgagaacgtgaagggcgacgccaagaagttcgagatctggtacaacgccagagaggaggtgtacatcgtgcaggcccccacccccgagatcaaggccgcctgggtgaacgagatcagaaaggtgctgaccagccagctgcaggcctgcagagaggccagccagcacagagccctggagcagagccagagcctgcccctgcccgcccccaccagcaccagccccagcagaggcaacagcagaaacatcaagaagctggaggagagaaagaccgaccccctgagcctggagggctacgtgagcagcgcccccctgaccaagccccccgagaagggcaagggctggagcaagaccagccacagcctggaggcccccgaggacgacggcggctggagcagcgccgaggagcagatcaacagcagcgacgccgaggaggacggcggcctgggccccaagaagctggtgcccggcaagtacaccgtggtggccgaccacgagaagggcggccccgacgccctgagagtgagaagcggcgacgtggtggagctggtgcaggagggcgacgagggcctgtggtacgtgagagaccccaccaccggcaaggagggctgggtgcccgccagcagcctgagcgtgagactgggccccagcggcagcgcccagtgcctgagcagcagcgagagcagccccggcagcgccgtgctgagcaacagcagcagctgcagcgagggcggccaggcccccttcagcgacctgcagggctag

SEQ ID NO: 217623 - DNA, 3549 bp, Artificial Sequence
  derived and/or modified sequence
atggccagagtggagagccccgtgcccgccgccagagccagcctgaccggcagctgcgtgctgggccaggccatgcccctgagaggcggcgccggccccagccccgccagccacggccccacccacggccccagcgaccccagaacctgcctgcccggcagaggcgccggcggcatgagaccccacggcagaggcgccctgggctgctgcggcctgtgcagcttctacacctgccacggcgccgccggcgacgagatcatgcaccaggacatcgtgcccctgtgcgccgccgacatccaggaccagctgaagaagagattcgcctacctgagcggcggcagaggccaggacggcagccccgtgatcaccttccccgactaccccgccttcagcgagatccccgacaaggagttccagaacgtgatgacctacctgaccagcatccccagcctgcaggacgccggcatcggcttcatcctggtgatcgacagaagaagagacaagtggaccagcgtgaaggccagcgtgctgagaatcgccgccagcttccccgccaacctgcagctggtgctggtgctgagacccaccggcttcttccagagaaccctgagcgacatcgccttcaagttcaacagagacgacttcaagatgaaggtgcccgtgatcatgctgagcagcgtgcccgacctgcacggctacatcgacaagagccagctgaccgaggacctgggcggcaccctggactactgccacagcagatggctgtgccagagaaccgccatcgagagcttcgccctgatggtgaagcagaccgcccagatgctgcagagcttcggcaccgagctggccgagaccgagctgcccaacgacgtgcagagcaccagcagcgtgctgtgcgcccacaccgagaagaaggacaaggccaaggaggacctgagactggccctgaaggagggccacagcgtgctggagagcctgagagagctgcaggccgagggcagcgagcccagcgtgaaccaggaccagctggacaaccaggccaccgtgcagagactgctggcccagctgaacgagaccgaggccgccttcgacgagttctgggccaagcaccagcagaagctggagcagtgcctgcagctgagacacttcgagcagggcttcagagaggtgaaggccatcctggacgccgccagccagaagatcgccaccttcaccgacatcggcaacagcctggcccacgtggagcacctgctgagagacctggccagcttcgaggagaagagcggcgtggccgtggagagagccagagccctgagcctggacggcgagcagctgatcggcaacaagcactacgccgtggacagcatcagacccaagtgccaggagctgagacacctgtgcgaccagttcagcgccgagatcgccagaagaagaggcctgctgagcaagagcctggagctgcacagaagactggagaccagcatgaagtggtgcgacgagggcatctacctgctggccagccagcccgtggacaagtgccagagccaggacggcgccgaggccgccctgcaggagatcgagaagttcctggagaccggcgccgagaacaagatccaggagctgaacgccatctacaaggagtacgagagcatcctgaaccaggacctgatggagcacgtgagaaaggtgttccagaagcaggccagcatggaggaggtgttccacagaagacaggccagcctgaagaagctggccgccagacagaccagacccgtgcagcccgtggcccccagacccgaggccctggccaagagcccctgccccagccccggcatcagaagaggcagcgagaacagcagcagcgagggcggcgccctgagaagaggcccctacagaagagccaagagcgagatgagcgagagcagacagggcagaggcagcgccggcgaggaggaggagagcctggccatcctgagaagacacgtgatgagcgagctgctggacaccgagagagcctacgtggaggagctgctgtgcgtgctggagggctacgccgccgagatggacaaccccctgatggcccacctgctgagcaccggcctgcacaacaagaaggacgtgctgttcggcaacatggaggagatctaccacttccacaacagaatcttcctgagagagctggagaactacaccgactgccccgagctggtgggcagatgcttcctggagagaatggaggacttccagatctacgagaagtactgccagaacaagcccagaagcgagagcctgtggagacagtgcagcgactgccccttcttccaggagtgccagagaaagctggaccacaagctgagcctggacagctacctgctgaagcccgtgcagagaatcaccaagtaccagctgctgctgaaggagatgctgaagtacagcagaaactgcgagggcgccgaggacctgcaggaggccctgagcagcatcctgggcatcctgaaggccgtgaacgacagcatgcacctgatcgccatcaccggctacgacggcaacctgggcgacctgggcaagctgctgatgcagggcagcttcagcgtgtggaccgaccacaagagaggccacaccaaggtgaaggagctggccagattcaagcccatgcagagacacctgttcctgcacgagaaggccgtgctgttctgcaagaagagagaggagaacggcgagggctacgagaaggcccccagctacagctacaagcagagcctgaacatggccgccgtgggcatcaccgagaacgtgaagggcgacgccaagaagttcgagatctggtacaacgccagagaggaggtgtacatcgtgcaggcccccacccccgagatcaaggccgcctgggtgaacgagatcagaaaggtgctgaccagccagctgcaggcctgcagagaggccagccagcacagagccctggagcagagccagagcctgcccctgcccgcccccaccagcaccagccccagcagaggcaacagcagaaacatcaagaagctggaggagagaaagaccgaccccctgagcctggagggctacgtgagcagcgcccccctgaccaagccccccgagaagggcaagggctggagcaagaccagccacagcctggaggcccccgaggacgacggcggctggagcagcgccgaggagcagatcaacagcagcgacgccgaggaggacggcggcctgggccccaagaagctggtgcccggcaagtacaccgtggtggccgaccacgagaagggcggccccgacgccctgagagtgagaagcggcgacgtggtggagctggtgcaggagggcgacgagggcctgtggtacgtgagagaccccaccaccggcaaggagggctgggtgcccgccagcagcctgagcgtgagactgggccccagcggcagcgcccagtgcctgagcagcagcgagagcagccccggcagcgccgtgctgagcaacagcagcagctgcagcgagggcggccaggcccccttcagcgacctgcagggctag

SEQ ID NO: 217624 - DNA, 3372 bp, Artificial Sequence
  derived and/or modified sequence
atgaccgtgagaagactgagcctgctgtgcagagacctgtgggccctgtggctgctgctgaaggccggcgccgacgagatcatgcaccaggacatcgtgcccctgtgcgccgccgacatccaggaccagctgaagaagagattcgcctacctgagcggcggcagaggccaggacggcagccccgtgatcaccttccccgactaccccgccttcagcgagatccccgacaaggagttccagaacgtgatgacctacctgaccagcatccccagcctgcaggacgccggcatcggcttcatcctggtgatcgacagaagaagagacaagtggaccagcgtgaaggccagcgtgctgagaatcgccgccagcttccccgccaacctgcagctggtgctggtgctgagacccaccggcttcttccagagaaccctgagcgacatcgccttcaagttcaacagagacgacttcaagatgaaggtgcccgtgatcatgctgagcagcgtgcccgacctgcacggctacatcgacaagagccagctgaccgaggacctgggcggcaccctggactactgccacagcagatggctgtgccagagaaccgccatcgagagcttcgccctgatggtgaagcagaccgcccagatgctgcagagcttcggcaccgagctggccgagaccgagctgcccaacgacgtgcagagcaccagcagcgtgctgtgcgcccacaccgagaagaaggacaaggccaaggaggacctgagactggccctgaaggagggccacagcgtgctggagagcctgagagagctgcaggccgagggcagcgagcccagcgtgaaccaggaccagctggacaaccaggccaccgtgcagagactgctggcccagctgaacgagaccgaggccgccttcgacgagttctgggccaagcaccagcagaagctggagcagtgcctgcagctgagacacttcgagcagggcttcagagaggtgaaggccatcctggacgccgccagccagaagatcgccaccttcaccgacatcggcaacagcctggcccacgtggagcacctgctgagagacctggccagcttcgaggagaagagcggcgtggccgtggagagagccagagccctgagcctggacggcgagcagctgatcggcaacaagcactacgccgtggacagcatcagacccaagtgccaggagctgagacacctgtgcgaccagttcagcgccgagatcgccagaagaagaggcctgctgagcaagagcctggagctgcacagaagactggagaccagcatgaagtggtgcgacgagggcatctacctgctggccagccagcccgtggacaagtgccagagccaggacggcgccgaggccgccctgcaggagatcgagaagttcctggagaccggcgccgagaacaagatccaggagctgaacgccatctacaaggagtacgagagcatcctgaaccaggacctgatggagcacgtgagaaaggtgttccagaagcaggccagcatggaggaggtgttccacagaagacaggccagcctgaagaagctggccgccagacagaccagacccgtgcagcccgtggcccccagacccgaggccctggccaagagcccctgccccagccccggcatcagaagaggcagcgagaacagcagcagcgagggcggcgccctgagaagaggcccctacagaagagccaagagcgagatgagcgagagcagacagggcagaggcagcgccggcgaggaggaggagagcctggccatcctgagaagacacgtgatgagcgagctgctggacaccgagagagcctacgtggaggagctgctgtgcgtgctggagggctacgccgccgagatggacaaccccctgatggcccacctgctgagcaccggcctgcacaacaagaaggacgtgctgttcggcaacatggaggagatctaccacttccacaacagaatcttcctgagagagctggagaactacaccgactgccccgagctggtgggcagatgcttcctggagagaatggaggacttccagatctacgagaagtactgccagaacaagcccagaagcgagagcctgtggagacagtgcagcgactgccccttcttccaggagtgccagagaaagctggaccacaagctgagcctggacagctacctgctgaagcccgtgcagagaatcaccaagtaccagctgctgctgaaggagatgctgaagtacagcagaaactgcgagggcgccgaggacctgcaggaggccctgagcagcatcctgggcatcctgaaggccgtgaacgacagcatgcacctgatcgccatcaccggctacgacggcaacctgggcgacctgggcaagctgctgatgcagggcagcttcagcgtgtggaccgaccacaagagaggccacaccaaggtgaaggagctggccagattcaagcccatgcagagacacctgttcctgcacgagaaggccgtgctgttctgcaagaagagagaggagaacggcgagggctacgagaaggcccccagctacagctacaagcagagcctgaacatggccgccgtgggcatcaccgagaacgtgaagggcgacgccaagaagttcgagatctggtacaacgccagagaggaggtgtacatcgtgcaggcccccacccccgagatcaaggccgcctgggtgaacgagatcagaaaggtgctgaccagccagctgcaggcctgcagagaggccagccagcacagagccctggagcagagccagagcctgcccctgcccgcccccaccagcaccagccccagcagaggcaacagcagaaacatcaagaagctggaggagagaaagaccgaccccctgagcctggagggctacgtgagcagcgcccccctgaccaagccccccgagaagggcaagggctggagcaagaccagccacagcctggaggcccccgaggacgacggcggctggagcagcgccgaggagcagatcaacagcagcgacgccgaggaggacggcggcctgggccccaagaagctggtgcccggcaagtacaccgtggtggccgaccacgagaagggcggccccgacgccctgagagtgagaagcggcgacgtggtggagctggtgcaggagggcgacgagggcctgtggtacgtgagagaccccaccaccggcaaggagggctgggtgcccgccagcagcctgagcgtgagactgggccccagcggcagcgcccagtgcctgagcagcagcgagagcagccccggcagcgccgtgctgagcaacagcagcagctgcagcgagggcggccaggcccccttcagcgacctgcagggctag

SEQ ID NO: 217625 - DNA, 3342 bp, Artificial Sequence
  derived and/or modified sequence
atgggcgacggcaaggccgtgagaatcagcgtggccgagatgaagagctactacctgtacagcgagtggtgcagctggctgctgagcgtggccgaggacgagatcatgcaccaggacatcgtgcccctgtgcgccgccgacatccaggaccagctgaagaagagattcgcctacctgagcggcggcagaggccaggacggcagccccgtgatcaccttccccgactaccccgccttcagcgagatccccgacaaggagttccagaacgtgatgacctacctgaccagcatccccagcctgcaggacgccggcatcggcttcatcctggtgatcgacagaagaagagacaagtggaccagcgtgaaggccagcgtgctgagaatcgccgccagcttccccgccaacctgcagctggtgctggtgctgagacccaccggcttcttccagagaaccctgagcgacatcgccttcaagttcaacagagacgacttcaagatgaaggtgcccgtgatcatgctgagcagcgtgcccgacctgcacggctacatcgacaagagccagctgaccgaggacctgggcggcaccctggactactgccacagcagatggctgtgccagagaaccgccatcgagagcttcgccctgatggtgaagcagaccgcccagatgctgcagagcttcggcaccgagctggccgagaccgagctgcccaacgacgtgcagagcaccagcagcgtgctgtgcgcccacaccgagaagaaggacaaggccaaggaggacctgagactggccctgaaggagggccacagcgtgctggagagcctgagagagctgcaggccgagggcagcgagcccagcgtgaaccaggaccagctggacaaccaggccaccgtgcagagactgctggcccagctgaacgagaccgaggccgccttcgacgagttctgggccaagcaccagcagaagctggagcagtgcctgcagctgagacacttcgagcagggcttcagagaggtgaaggccatcctggacgccgccagccagaagatcgccaccttcaccgacatcggcaacagcctggcccacgtggagcacctgctgagagacctggccagcttcgaggagaagagcggcgtggccgtggagagagccagagccctgagcctggacggcgagcagctgatcggcaacaagcactacgccgtggacagcatcagacccaagtgccaggagctgagacacctgtgcgaccagttcagcgccgagatcgccagaagaagaggcctgctgagcaagagcctggagctgcacagaagactggagaccagcatgaagtggtgcgacgagggcatctacctgctggccagccagcccgtggacaagtgccagagccaggacggcgccgaggccgccctgcaggagatcgagaagttcctggagaccggcgccgagaacaagatccaggagctgaacgccatctacaaggagtacgagagcatcctgaaccaggacctgatggagcacgtgagaaaggtgttccagaagcaggccagcatggaggaggtgttccacagaagacaggccagcctgaagaagctggccgccagacagaccagacccgtgcagcccgtggcccccagacccgaggccctggccaagagcccctgccccagccccggcatcagaagaggcagcgagaacagcagcagcgagggcggcgccctgagaagaggcccctacagaagagccaagagcgagatgagcgagagcagacagggcagaggcagcgccggcgaggaggaggagagcctggccatcctgagaagacacgtgatgagcgagctgctggacaccgagagagcctacgtggaggagctgctgtgcgtgctggagggctacgccgccgagatggacaaccccctgatggcccacctgctgagcaccggcctgcacaacaagaaggacgtgctgttcggcaacatggaggagatctaccacttccacaacagaatcttcctgagagagctggagaactacaccgactgccccgagctggtgggcagatgcttcctggagagaatggaggacttccagatctacgagaagtactgccagaacaagcccagaagcgagagcctgtggagacagtgcagcgactgccccttcttccaggagtgccagagaaagctggaccacaagctgagcctggacagctacctgctgaagcccgtgcagagaatcaccaagtaccagctgctgctgaaggagatgctgaagtacagcagaaactgcgagggcgccgaggacctgcaggaggccctgagcagcatcctgggcatcctgaaggccgtgaacgacagcatgcacctgatcgccatcaccggctacgacggcaacctgggcgacctgggcaagctgctgatgcagggcagcttcagcgtgtggaccgaccacaagagaggccacaccaaggtgaaggagctggccagattcaagcccatgcagagacacctgttcctgcacgagaaggccgtgctgttctgcaagaagagagaggagaacggcgagggctacgagaaggcccccagctacagctacaagcagagcctgaacatggccgccgtgggcatcaccgagaacgtgaagggcgacgccaagaagttcgagatctggtacaacgccagagaggaggtgtacatcgtgcaggcccccacccccgagatcaaggccgcctgggtgaacgagatcagaaaggtgctgaccagccagctgcaggcctgcagagaggccagccagcacagagccctggagcagagccagagcctgcccctgcccgcccccaccagcaccagccccagcagaggcaacagcagaaacatcaagaagctggaggagagaaagaccgaccccctgagcctggagggctacgtgagcagcgcccccctgaccaagccccccgagaagggcaagggctggagcaagaccagccacagcctggaggcccccgaggacgacggcggctggagcagcgccgaggagcagatcaacagcagcgacgccgaggaggacggcggcctgggccccaagaagctggtgcccggcaagtacaccgtggtggccgaccacgagaagggcggccccgacgccctgagagtgagaagcggcgacgtggtggagctggtgcaggagggcgacgagggcctgtggtacgtgagagaccccaccaccggcaaggagggctgggtgcccgccagcagcctgagcgtgagactgggccccagcggcagcgcccagtgcctgagcagcagcggcaaggcccacgtgcccagagcccacccctag

SEQ ID NO: 217626 - DNA, 2712 bp, Artificial Sequence
  derived and/or modified sequence
ctgaagatgcccgtgatcatgctgagcagcgtgcccgacctgcacggctacatcgacaagagccagctgaccgaggacctgggcggcaccctggactactgccacagcagatggctgtgccagagaaccgccatcgagagcttcgccctgatggtgaagcagaccgcccagatgctgcagagcttcggcaccgagctggccgagaccgagctgcccaacgacgtgcagagcaccagcagcgtgctgtgcgcccacaccgagaagaaggacaaggccaaggaggacctgagactggccctgaaggagggccacagcgtgctggagagcctgagagagctgcaggccgagggcagcgagcccagcgtgaaccaggaccagctggacaaccaggccaccgtgcagagactgctggcccagctgaacgagaccgaggccgccttcgacgagttctgggccaagcaccagcagaagctggagcagtgcctgcagctgagacacttcgagcagggcttcagagaggtgaaggccatcctggacgccgccagccagaagatcgccaccttcaccgacatcggcaacagcctggcccacgtggagcacctgctgagagacctggccagcttcgaggagaagagcggcgtggccgtggagagagccagagccctgagcctggacggcgagcagctgatcggcaacaagcactacgccgtggacagcatcagacccaagtgccaggagctgagacacctgtgcgaccagttcagcgccgagatcgccagaagaagaggcctgctgagcaagagcctggagctgcacagaagactggagaccagcatgaagtggtgcgacgagggcatctacctgctggccagccagcccgtggacaagtgccagagccaggacggcgccgaggccgccctgcaggagatcgagaagttcctggagaccggcgccgagaacaagatccaggagctgaacgccatctacaaggagtacgagagcatcctgaaccaggacctgatggagcacgtgagaaaggtgttccagaagcaggccagcatggaggaggtgttccacagaagacaggccagcctgaagaagctggccgccagacagaccagacccgtgcagcccgtggcccccagacccgaggccctggccaagagcccctgccccagccccggcatcagaagaggcagcgagaacagcagcagcgagggcggcgccctgagaagaggcccctacagaagagccaagagcgagatgagcgagagcagacagggcagaggcagcgccggcgaggaggaggagagcctggccatcctgagaagacacgtgatgagcgagctgctggacaccgagagagcctacgtggaggagctgctgtgcgtgctggagggctacgccgccgagatggacaaccccctgatggcccacctgctgagcaccggcctgcacaacaagaaggacgtgctgttcggcaacatggaggagatctaccacttccacaacagaatcttcctgagagagctggagaactacaccgactgccccgagctggtgggcagatgcttcctggagagaatggaggacttccagatctacgagaagtactgccagaacaagcccagaagcgagagcctgtggagacagtgcagcgactgccccttcttccaggagtgccagagaaagctggaccacaagctgagcctggacagctacctgctgaagcccgtgcagagaatcaccaagtaccagctgctgctgaaggagatgctgaagtacagcagaaactgcgagggcgccgaggacctgcaggaggccctgagcagcatcctgggcatcctgaaggccgtgaacgacagcatgcacctgatcgccatcaccggctacgacggcaacctgggcgacctgggcaagctgctgatgcagggcagcttcagcgtgtggaccgaccacaagagaggccacaccaaggtgaaggagctggccagattcaagcccatgcagagacacctgttcctgcacgagaaggccgtgctgttctgcaagaagagagaggagaacggcgagggctacgagaaggcccccagctacagctacaagcagagcctgaacatggccgccgtgggcatcaccgagaacgtgaagggcgacgccaagaagttcgagatctggtacaacgccagagaggaggtgtacatcgtgcaggcccccacccccgagatcaaggccgcctgggtgaacgagatcagaaaggtgctgaccagccagctgcaggcctgcagagaggccagccagcacagagccctggagcagagccagagcctgcccctgcccgcccccaccagcaccagccccagcagaggcaacagcagaaacatcaagaagctggaggagagaaagaccgaccccctgagcctggagggctacgtgagcagcgcccccctgaccaagccccccgagaagggcaagggctggagcaagaccagccacagcctggaggcccccgaggacgacggcggctggagcagcgccgaggagcagatcaacagcagcgacgccgaggaggacggcggcctgggccccaagaagctggtgcccggcaagtacaccgtggtggccgaccacgagaagggcggccccgacgccctgagagtgagaagcggcgacgtggtggagctggtgcaggagggcgacgagggcctgtag

SEQ ID NO: 217627 - protein, 922 aa, Artificial Sequence
  derived and/or modified sequence
MFLHSVNLWNLAFYVFMVFLATLGLWDVFFGFEENKCSMSYMFEYPEYQKIELPKKLAKRYPAYELYLYGEGSYAEEHKILPLTGIPVLFLPGNAGSYKQVRSIGSIALRKAEDIDFKYHFDFFSVNFNEELVALYGGSLQKQTKFVHECIKTILKLYKGQEFAPKSVAIIGHSMGGLVARALLTLKNFKHDLINLLITQATPHVAPVMPLDRFITDFYTTVNNYWILNARHINLTTLSVAGGFRDYQVRSGLTFLPKLSHHTSALSVVSSAVPKTWVSTDHLSIVWCKQLQLTTVRAFFDLIDADTKQITQNSKKKLSVLYHHFIRHPSKHFEENPAIISDLTGTSMWVLVKVSKWTYVAYNESEKIYFTFPLENHRKIYTHVYCQSTMLDTNSWIFACINSTSMCLQGVDLSWKAELLPTIKYLTLRLQDYPSLSHLVVYVPSVRGSKFVVDCEFFKKEKRYIQLPVTHLFSFGLSSRKVVLNTNGLYYNLELLNFGQIYQAFKINVVSKCSAVKEEITSIYRLHIPWSYEDSLTIAQAPSSTEISLKLHIAQPENNTHVALFKMYTSSDCRYEVTVKTSFSQILGQVVRFHGGALPAYVVSNILLAYRGQLYSLFSTGCCLEYATMLDKEAKPYKVDPFVIIIKFLLGYKWFKELWDVLLLPELDAVILTCQSMCFPLISLILFLFGTCTAYWSGLLSSASVRLLSSLWLALKRPSELPKDIKMISPDLPFLTIVLIIVSWTTCGALAILLSYLYYVFKVVHLQASLTTFKNSQPVNPKHSRRSEKKSNHHKDSSIHHLRLSANDAEDSLRMHSTVINLLTWIVLLSMPSLIYWLKNLRYYFKLNPDPCKPLAFILIPTMAILGNTYTVSIKSSKLLKTTSQFPLPLAVGVIAFGSAHLYRLPCFVFIPLLLHALCNFM

SEQ ID NO: 217628 - DNA, 2769 bp, Artificial Sequence
  derived and/or modified sequence
atgttcttgcactctgtgaatctgtggaacttagccttctatgtgtttatggttttcctagccacactgggactatgggacgtcttttttggtttcgaagagaacaaatgttctatgagctatatgttcgagtaccctgaataccagaagatcgagttacccaaaaagctggccaagcgctatcccgcatacgagctctacctatacggcgagggatcgtatgccgaggagcacaaaatactgcccctgaccggcatccctgtgctcttcctaccaggaaatgcggggtcttataagcaggttcgcagcatcggttctattgctcttagaaaggccgaggacatcgacttcaaataccacttcgacttcttcagtgtaaactttaacgaggaattagtcgccctttatggcggctcactgcagaagcagactaagttcgtgcatgaatgcatcaagaccatcctcaaactctataaggggcaggagtttgccccaaagagtgtcgccattattgggcactccatgggagggctggtagcacgggcactcctgactcttaagaattttaagcacgatctgatcaacttactcattacacaagctactccgcacgtggccccagtcatgcccctggatcggtttattacagacttttacactaccgtgaataattactggatcttgaatgctcgccatataaacctcacaaccctgtccgttgccgggggttttagggactatcaagtaaggtctggcctgacatttcttccaaaactaagtcaccacacttctgctctgagcgtcgttagttctgccgtccccaagacctgggtttccaccgaccacctctctatagtgtggtgtaagcaactgcagttgaccacagtgagagcttttttcgatctgatcgatgcagataccaagcaaattacacagaatagtaagaagaagctgtctgtcctatatcatcatttcatcagacatccgtccaaacacttcgaagagaacccggcaattattagtgatttgaccggtacctccatgtgggtgctggtcaaagtcagcaaatggacatacgttgcctataacgaaagtgaaaaaatttacttcacttttcccctggagaaccatcggaagatctacacacacgtatactgtcagtccaccatgctggatacaaattcatggatattcgcatgcatcaactccacatcaatgtgccttcagggcgtcgacctgagttggaaagcagagctgttgcctacaatcaagtacctgaccctcagactgcaggactacccctcactaagccacctggtcgtctatgtcccttccgtgaggggctcaaagtttgtcgtggattgcgagttcttcaagaaagagaagagatacatacagctccccgtgacccacctgttctccttcggtctctcttcaaggaaagtggtcctgaataccaatgggctttactacaacttggagctactaaatttcgggcaaatctaccaggccttcaaaatcaatgtcgtttctaaatgctctgccgtcaaggaagaaatcacaagcatctacagactccacattccctggagctacgaggatagtctaaccatcgcccaggcacccagctctacagagatatcattgaagcttcatatcgcacagccagaaaataatactcacgttgcactgtttaagatgtacacctcaagtgactgtcgatacgaagttacagtaaagacttcgttctcccaaatcctgggtcaagtggtgcggtttcatgggggcgcccttcccgcttatgtggtgtcgaatatcttactagcctacagaggtcagctatactccctcttctctaccgggtgttgtttggaatatgccaccatgttggacaaagaggccaagccctataaagtggacccctttgtgattatcatcaaattcttattaggttacaagtggttcaaggagctttgggacgtgctcctcctccctgagctggacgcggtgattctgacgtgtcagtcgatgtgttttccgctcatctctctgattctgttcctgttcggaacttgcacagcttattggagcggactgcttagttccgcctctgtgagattgcttagcagtctatggctggccctcaaaaggccctctgagttacctaaagacatcaagatgatcagtcctgacctgcccttcctgacaatcgtgcttattattgttagctggacaacctgtggggctctggcaatcctactaagttatttgtactacgtgtttaaagtggtgcacctccaggccagtcttaccacattcaagaactctcagcccgtcaaccccaagcattccagacgcagtgagaagaagagtaaccatcacaaagacagctctatccaccatcttcgactgagcgctaacgacgccgaggacagcttaaggatgcatagtacagtcatcaatttgttaacatggattgtgttgctgagcatgccgtcgttgatctattggcttaaaaatctgagatactatttcaaacttaaccccgatccttgcaagccattagcattcatattgatcccaaccatggccatcctggggaacacgtacactgttagcatcaaaagcagcaagctgttgaagactacctcacagttcccattgccccttgcagttggcgtgatcgcttttggaagtgcccacctgtatcggctgccttgcttcgtcttcattccactgttgcttcacgccctctgtaactttatgtag

SEQ ID NO: 217629 - DNA, 2769 bp, Artificial Sequence
  derived and/or modified sequence
atgttcctgcacagcgtgaacctgtggaacctggccttctacgtgttcatggtgttcctggccaccctgggcctgtgggatgtgttcttcggctttgaggagaacaagtgcagcatgagctacatgtttgagtacccagagtaccagaagattgagctgcccaagaagctggccaagcgctacccagcctatgagctgtacctgtatggagagggcagctatgcagaggagcacaagatcctgcccctgaccggcatccctgtgctcttcctgcctggaaatgccggcagctacaagcaggtgcgcagcatcggcagcatcgccctgaggaaggcagaagatattgacttcaagtaccactttgacttcttctctgtgaacttcaatgaggagctggtggccctgtatggaggcagcctgcagaagcagaccaagtttgtgcatgagtgcatcaagaccatcctgaagctgtacaagggccaggagtttgcccccaagtctgtggccatcatcggccacagcatgggcggcctggtggcccgggccctgctgaccctgaagaacttcaagcatgacctgatcaacctgctgatcacccaggccaccccccacgtggcccctgtgatgcccctggaccgcttcatcacagacttctacaccaccgtgaacaactactggatcctgaatgcccggcacatcaacctgaccaccctgtctgtggccggcggcttccgggactaccaggtgcgcagcggcctgaccttcctgcccaagctgagccaccacaccagcgccctgtctgtggtgtcctctgctgtgcccaagacctgggtgtccacagaccacctgagcatcgtgtggtgcaagcagctgcagctgaccaccgtgcgggccttctttgacctgattgatgctgacaccaagcagatcacccagaacagcaagaagaagctgtctgtgctgtaccaccacttcatccgccaccccagcaagcactttgaagaaaatcctgccatcatcagtgacctgaccggcacctccatgtgggtgctggtgaaggtgtccaagtggacctacgtggcctacaatgaaagtgagaagatctacttcaccttccccctggagaaccacaggaagatctacacccacgtgtactgccagagcaccatgctggacaccaacagctggatctttgcctgcatcaacagcacctccatgtgcctgcagggcgtggacctgtcctggaaggccgagctgctgcccaccatcaagtacctgaccctgcggctgcaggactaccccagcctgagccacctggtggtgtatgtgcccagcgtgcggggcagcaagtttgtggtggactgtgagttcttcaagaaggagaagcgctacatccagctgcctgtgacccacctgttctcctttggcctgagcagcaggaaggtggtgctgaacaccaacggcctgtactacaacctggagctgctgaactttggccagatctaccaggccttcaagatcaacgtggtgtccaagtgcagcgctgtgaaggaggagatcaccagcatctaccgcctgcacatcccctggagctatgaggacagcctgaccatcgcccaggcccccagcagcacagagatcagcctgaagctgcacatcgcccagcctgagaacaacacccacgtggccctcttcaagatgtacaccagcagtgactgccgctatgaggtgacagtgaagaccagcttcagccagatcctgggccaggtggtgcgcttccacggcggggccctgcctgcctacgtggtgagcaacatcctgctggcctaccggggccagctgtacagcctcttcagcacaggctgctgcctggagtatgccaccatgctggacaaggaggccaagccctacaaggtggaccccttcgtcatcatcatcaagttcctgctgggctacaagtggttcaaggagctgtgggatgtgctgctgctgcctgagctggatgctgtgatcctgacctgccagagcatgtgcttccccctcatcagcctcatcctcttcctgtttggcacctgcacagcctactggagcggcctgctgagcagcgcctctgtgcggctgctgagcagcctgtggctggccctgaagaggccttctgagctgcccaaggacatcaagatgatcagcccagacctgcccttcctgaccatcgtgctgatcatcgtgtcctggaccacctgtggggccctggccatcctgctgagctacctgtactacgtgttcaaggtggtgcacctgcaggccagcctgaccaccttcaagaacagccagcctgtgaaccccaagcacagcagaagaagtgagaagaagagcaaccaccacaaggacagcagcatccaccacctgcggctgagcgccaatgatgctgaggacagcctgaggatgcacagcaccgtcatcaacctgctgacctggatcgtgctgctgtccatgcccagcctcatctactggctgaagaacctgcgctactacttcaagctgaacccagacccctgcaagcccctggccttcatcctgatccccaccatggccatcctgggcaacacctacacagtgtccatcaagagcagcaagctgctgaagaccaccagccagttccccctgcccctggccgtgggcgtgattgcctttggaagtgcccacctgtaccgcctgccctgctttgtgttcatccccctgctgctgcacgccctgtgcaacttcatgtag

SEQ ID NO: 217630 - DNA, 2769 bp, Artificial Sequence
  derived and/or modified sequence
atgttcctgcacagcgtgaacctgtggaacctggccttctacgtgttcatggtcttccttgctaccctcggtctttgggatgtgttttttggttttgaagaaaacaagtgcagtatgagctatatgtttgaatatcccgaataccagaaaatcgagctgcccaagaagctcgcaaagcggtatccggcctatgaactctacctctatggggaagggtcatacgccgaagagcacaagatcctccctctcaccgggattcctgtattgtttctaccaggaaacgccgggagttataagcaggtgagaagcatcggtagtattgctttgaggaaggctgaagacatcgatttcaaataccacttcgacttctttagcgtcaatttcaatgaggagctggtagcgttatacggtggtagcctgcagaaacagacgaagttcgtgcacgaatgcatcaagaccatccttaagttgtacaaaggacaggagtttgcacccaaaagtgtggcgataatcgggcattctatgggcggacttgtggcgcgggccttgctcactttgaagaacttcaaacacgacttgatcaatcttctgatcactcaagctaccccccatgtcgccccagtgatgcccctcgatcggttcattacagatttctacaccaccgtaaataactactggatcctcaatgctcgacatattaacctgaccacactctctgtcgcgggcggcttcagggattaccaggttcgttccggacttacgtttttaccaaaactgtcccatcacacatcagccctgtccgtagtttcgtctgccgtacctaagacttgggtatcaactgaccatctgtccatcgtgtggtgtaaacagctccaactgactacagtgcgcgccttcttcgacctaatcgacgccgacaccaagcagattacgcaaaactccaaaaagaagctttcggtgctttatcatcatttcattaggcacccaagcaagcactttgaagagaaccctgcgataatctctgacctcacgggaacttctatgtgggtgctggtgaaagtgtctaaatggacctacgtggcttacaacgagtctgagaagatctattttacatttcccctggagaaccatcggaaaatttacacacacgtctactgtcagagcacaatgctcgacacgaactcatggattttcgcctgcataaattcaacatcgatgtgtttgcagggcgttgacttaagctggaaagccgaactgctgcccaccattaagtatttaacactgcgactgcaagattatccctccttgagtcacctggttgtctacgtgccatcggtgcgagggagtaaatttgtcgttgactgtgagttttttaagaaggagaaaaggtacattcaactccccgtcactcacctgttctcattcggtttaagtagccgtaaagtagtgcttaatactaatgggctgtattataacctggagttacttaattttggccaaatatatcaggcattcaagatcaacgtggtctctaaatgcagcgccgttaaggaagagataacatctatttaccgactgcatatcccatggtcctatgaggattctctgacgattgcccaggcaccctcgtctacagagatctccctgaagttgcacattgcacagcctgaaaataatacgcacgtcgccctgttcaaaatgtacacgagctcggactgcagatacgaggttacagtcaaaacttcctttagccagatcctggggcaagtggtacggttccacggtggagcactgcccgcctacgtggtcagtaatatactcttggcataccgagggcagctctattctttattcagcaccggatgctgtctggagtatgctactatgttagacaaggaagctaaaccatataaggtggatccttttgtgatcatcattaagtttctgctcggatataagtggttcaaggagctgtgggatgtgctgttattgcctgagctggatgcagtgatcctgacttgtcaaagtatgtgttttccactgatcagcctgatactcttccttttcggcacctgcaccgcctactggtcgggattgctgagctctgcttccgtgagactgttgtccagcctctggctggcgttgaagcgtccgtccgaacttccaaaggacatcaaaatgataagcccagacttgccctttctgacgatcgtgctcattattgtctcttggacaacctgtggagctttggctatactgttgtcttatttatattacgtattcaaggtagtccatcttcaggcctctctaactacattcaagaattcacagcccgtgaatccaaaacattctcgacggtcggagaaaaagagtaaccaccacaaagactcgtcgatacaccacctgcgcctgtctgcaaacgacgcggaagactcgctgagaatgcactctaccgttataaatctgctcacctggatcgtcctgctatccatgccttccctcatatactggctcaagaatcttagatattattttaaacttaatccagatccatgtaaaccgctagctttcatcctgatacctaccatggcaatattgggcaacacatacactgtgtcaattaaatcatccaaactgctcaagaccacatctcagtttccgctgcctctcgccgtgggggtcattgcctttggttccgcgcacctttacagacttccatgctttgtatttataccccttctcctgcatgctctgtgcaacttcatgtag

SEQ ID NO: 217631 - DNA, 8536 bp, Artificial Sequence
  derived and/or modified sequence
cggctccgggggtggcggtcggacagtgtctagcacgctcagtccgggcttggggccccgcggcggagaaggaggtagagggggcggcggcggcggcggcggtggtggcggcaccatgtttcttcactcagttaatctctggaacctggcgttttatgtcttcatggtctttctggcaaccctggggctgtgggatgtcttcttcggcttcgaggagaataagtgcagtatgagctacatgtttgagtacccggagtatcagaaaatagaacttccaaagaaactggcaaaacgctatcccgcatatgagttgtatctttatggagagggatcctatgctgaagaacacaaaattctccctttgacgggtattccagttctctttcttcctggtaatgctggaagttataagcaagttcgttctattggctccattgcacttagaaaagcagaggacattgacttcaagtaccactttgacttctttagtgtgaacttcaatgaagaactggtggctttgtatggtggaagtcttcagaagcagaccaagtttgtacatgaatgtattaaaacaattctcaaactctataagggtcaagaatttgctccaaaaagtgtggcaataattggtcattctatgggtggccttgttgcaagagcattgcttacactgaaaaattttaagcatgatctgataaatcttcttattacacaagccacacctcatgttgctcctgtgatgccattagatcgtttcattacagatttttatacgactgtaaacaactattggattctaaatgctcgacacataaatttaaccacactttctgtagctggaggattccgggattaccaagttcgttcaggattgacttttctaccaaaattaagccatcataccagtgccttatctgttgtgagttcagcagtgcctaagacctgggtctcaacagaccacctctccattgtgtggtgtaaacaattgcagttgactacagttcgagcattctttgatcttattgatgctgatactaaacaaataactcaaaattccaagaagaaactgtcagttttgtatcaccactttataagacacccatcaaaacattttgaggaaaatccagctataatttctgacttaacagggacatctatgtgggttctagtaaaagtgtccaaatggacctatgtagcttacaacgaatctgagaagatatattttacatttcctcttgaaaatcatagaaaaatctacactcatgtctattgtcagagcactatgctggatacaaatagttggatttttgcttgcataaacagcacttctatgtgcctgcaaggggttgatttatcatggaaagctgaactgctgccaacaattaagtatctgacattaagacttcaagactatccatctttgtctcatcttgttgtttatgtaccatctgttcgtggaagtaagtttgttgtagattgtgaattctttaaaaaagagaaaagatacatacagcttcctgtaactcatcttttttcctttggattgtcttcaaggaaagtggtgttaaatacaaatggcctatactacaatctagagcttctgaactttggacagatataccaagcttttaaaatcaacgtggtaagcaagtgctcagcagtcaaagaagaaataaccagtatctatagacttcatattccttggtcttatgaagattcactaaccattgcacaggctccatcttccacagaaatttctctgaaactccatattgctcaaccagaaaacaatacccatgtggcattatttaaaatgtacacgtcatcagactgtcggtacgaggtgacagttaagacttccttttcacaaatacttggacaggtagttagatttcatggtggagctcttcctgcttatgtcgtatctaatatccttcttgcttatagaggacagttatattctcttttctcaacaggttgttgcttagaatatgctaccatgttggataaagaagccaaaccatacaaagttgatccttttgtaattatcattaagtttctgttggggtataaatggtttaaagaattgtgggatgtattattgttaccagaattagatgccgtcattttaacttgtcagagtatgtgtttccccctgatatccttgattctctttctgtttggaacgtgtactgcctactggagtggcctactgtcttctgcatctgtgagacttctttcttcattgtggctagctttgaaaagaccctctgaacttcctaaagatatcaagatgatatcaccagacttgccctttttgacaattgtcttgatcatagttagttggacaacttgtggagcactagccatacttctttcttatctttactatgtgtttaaggttgttcatctgcaagccagcttaacaacttttaagaatagccagcctgtgaatcccaaacactctagaagaagtgaaaagaaatccaatcatcataaagactcctcaatacaccatcttcgtttatctgccaacgatgctgaagatagccttcgcatgcacagtactgtgattaacttactaacatggattgtattactcagcatgccttctctaatttattggctaaagaatcttaggtattattttaaacttaatcctgatccatgtaaacctttggcatttatccttattccgactatggcaattcttggaaatacttacactgtttcaataaaatcaagtaaattgttgaagactacttcacaatttccacttcctctggctgttggtgtgattgcttttgggtcagcacatttatataggcttccatgctttgtcttcattcctcttttactccatgcattatgcaactttatgtaagattggacttaaggaatgatgaagataatttatgtgtttagggccagtgataagagggaacacacagatccatcagtatggacagcaagatcctttggagaagacaagtctatttttacaatattgaaaataggaaattagttttgtaatgtttgagggaagtagttgaagcatggttttgttttgtggtgtggaatccatgtagtaatcatttttgaaaaattcatgaagggatatatggtgatcactatcattgaggactcctgtgcatataaaatagtctgttttatcaactgtacgagaagtctgatatgagagatttagtagatgcagcattatttgcagtctcactgcaagcattctgctcatttcatcaaactttttttcacaaaagtaggttattttgaatttgctatagtttacctattaagaaataagtctttaaataactgatgaaatttatagctgtttggtttctcaaaggttaaatagccacagaaagcctttggttagtttttggcagccaccatgaacaaagtggatcttgtcttcttacatctatgaaaatagagctttgaatggtaaggagatatgttttcttggtaaccaatgcaagattgatgggtggaaacatgattcaaacttacacaatttttcttgctatttttcaaatatgaatcttactatatattctcggtgaacatcaggagactattaaagaggtctgctgttaaatgtaaagaaaaaatgctcgtagctatttgcttcctggtattggagcagttcagttgtttagtttataccattggattcaattcattgcaccatggttgccaaaagtgcctgaggtcataatggattgttaaaataactaaattccagtggttggaaactctaggtttgtaccattttttctgctgtgggaaaaaacaacaacaacaacatgatcaaggtaacatcacatttgatgtataatattatactattaatggaatatcagtagacaactgttaacccattagtagcatgagtataaacagtacacctgaataaattggagacattagccactaggtttaacagtggaatcttgatttgcctaggtgacttctgggattactgtttgacaaataagagtaacattttatttcatttcagaatttacgtcacttttagctacaagagtaggaagaaggtaatcggcaaggcagaagagtatactctttgccttaggatagcgtaaactcaggctgagacatacccggcttatagagttcttctagatgtgtagactgtaaatgcccaaatcctctcaactaaagttttagtgattccacaaagcctctcatgtaaatttccagtgattccaccattgcacttgtgaatatgtatccttgttagtacccagggatgtcctcgagcaccagttttattttatctgccattgcatctggattccattacagcctctcagctgttactgcctgtggacagttacttctgcttactgcctgtagagagttacctaacttctcttctcagttcttcctcaggtcctggctattttggcctcagttgaagggagtcttgctctcatctctgagggttttaagtttgtttgatcccattgttgtcttttctagctttgagcatgtttttcagtattcatattttaacttactgagaacattaaagggaaatgataaactcgtggtggggatatggcagacaggtgcttgtttgtttgagagaagtagcagaagagataaaatacaaagtgctatatgtttcagctggagaggaaagagagagaatttattagattatatacttgtcccatggcataccacgtatatgtttaaatagggacacatctccctatgtttaactatacttataaacaactttgatacacattgcgtcttttattctgtcacctgatattttagtgtatctcaagttacagattacatgtgtccttaaactatttctgaatttggacttagttccatatacagaaagaactttagaaaattcattaatttggatcttctattgatagccataaatattatgtttatgtattctaaaacctctttgtttagttagtactgttcatgaatgtaacaagcttcaatttctcatttgtgagtagtacatttgctttttgtttgtttgtttgtttgtttttgagatggagtctcacgctgtcaccaggctggagtgcagtggcgcgatttcagctcactgcaacctccacctcccaggtgcaagtgatgcccctgcctcagcctcccgagtagctgggactacagacacccgccaccacacctggctaatttttgtatttttagtagagacggggtttcaccatgttggctaggctggtctcaaactcttgacctcgtgatttgcccgcctctgcctccccaaagtgctgggattacaggcgtgagccaccacgcccagccgtacatttactttttaaagcagcagactaggtacactaattctcactcaaatattttcatgggaatgtagttatcaccaagtcctaaagtattatttatgccaaaaaaaatttcattttaaggactacaaaaatgattctaattaaacattttataatcaatagtaggttgggtctttagccattatatgtgtatatatacagacacatatgtatacacttacattttgacagggtcttcattgagtcttgatgcactttaaacccagctggctaccagagatgcgaaggtgggctctttgaagattagcaaaatggacgtttctgtcacttgagaaaaggaaagttctttgcctttaaattacacagttttcatcatgcccacaatctatattattggctggttaaacagcactgccctattagcaatgttaacaaaaatgaaattatttattggcggttatagattatctaattcaggaaatttctgagctcaacttttacagcaactgttatgccttctaatttagcaattgagttatgagtaagttttgtgcttaactcctagaccctattgttgataaccagatcaaatatagtctgtacagaggaaaacactgggaacatttagtatttctaaagcctcctttggagttactactgattgtaatttggaactgataataggtagagattgctaacactgttttttttcctggatcttttttatgccagaaattaaacaggttctgctaactcttttttttctcttggttatcaccagaatgaaaatatttaaagtgatgactctagaaaagccatctgtgcctggttaacattgagtttgagtctcttcaatatatattgatcatgtattgattaatctttattttttcatattttggctagacaaattcagatctatataatggaataccccttcttgagtgaactatactactaatctacatgattatatagtaaggaaaaaagaagaaataactgtaataggcatagtgtttgttgttggttgtcttgtcattcatgtgatactactcatttccaaaattcacacaaacttacatgaggtggattatttgttttgttcattatttagttcctatatgttttttctttagaaacagagtctcattctgtcacccaggctggagtccaatggggcggtcatagttcactgcagccttgaactctttggctcatgtgatcctcccatctcagcctcccacagcaggtgagactacaggtacatgccactgtgcctgactttttaatttttttgtagagacgaggtttcagtttgttgcccaagctgatcttgaactcctggtttcaagcgatcctcccacctcggcctcccaaagtagtgggatttcaggcatgaccacctggcctagttcctatacttttcttaattcttcagacttctcacatttagtatagtgcattcatttcatcttgctgtttattagcaccctttgtggccaagggaaataaaaggtggtaaaattcagttttcagtttagttcttgaaagctctgggaaatggaggaaacacaaaactatgaattaaactagggctgttgatttctgaacccccagataaatcagttgacccacattttcattttaggtgttaggtccaaattagcataatgtcttgcattattattaggttcagtgtgaaactttacagtgctgcatttgaagtttagtaactggttattattaatcatttgggaaaaatgaaaatgtgttgggactttctatgactaggcatttgttgattatttttcatgattgctttttgttttctcattgtgtaggatttgtgaacttgtatattacaggaaacaagatactttgtaaaatttactggggaaaatccatttggagtgcatgacatttgccaggataagaaagcagtaatatgtttgtattataaaattacaccctgccagaaaactttctttcctagtaaggtaaatgtagaagggacttttacagcatagtaagttgattaggagccaaaattttattccagtttttttttgaactaagaatgttttaaattctgtaatgaacttttatgtttacccattactcatgcattctttcacaatatgtttaatagcctgaggaaataggaaagctgtgaagctactaccattctttacttttaataagaataataggaaagaaaagtcaggtcagtaatccaaatccaaatatgtatactgcaaatgctcaagaagtcacattttttgataaattgtattgagtacagaagaacttatatgaatttattatctgttaataacttagttttgacaacagaataacatttggaaattgtgagaataatcaagctgtttttccattaacagtgtaaattcataacatgtccttcaaaaggtgatattctaagctgtcttaattgtctacggttgataacttttaaataaagtacaggactttctgaaagtgtttggcatgttatgctgccaaaaacaatctgtgttttgaaataccaattaatcagttaatttctgaagactttgtataggacttgatatatgagtcagaatctgtctgtactcattctgtacattgtaactttgaacacttatgaaaaactgtatctgttggtgtgttttgattagttagtgtagatttgtttgcgtatttgaattccgattttagtttaggaagactaaaagtagccatttttgtaaagttcatatgctattttttaatgtcatttttgtttttaatatttatacaatagtgatgttactagtaaaaaatgtttatagataacacgtagagctattaactgttcaaaagcctacatgataggcatattttgtatttcgtgttgcactcgttctgtttcatattggactttttacatcccttttttagcaaaaaaaagagacacatttgaattctctttagcataaagctgtgcattggaaactatgtgactgtatccatacggttagcaaaatactctttgccaccaaaggtaaatgaaactgtaaaatacctctggatatttgtgccaatgaacttttcttagcatattaggattaaagcaaaaataatcttttcagtatgtttcatctaggacttacaataaatgtttaaaccatgaaaactta

SEQ ID NO: 217632 - DNA, 10453 bp, Artificial Sequence
  derived and/or modified sequence
ggctccgggggtggcggtcggacagtgtctagcacgctcagtccgggcttggggccccgcggcggagaaggaggtagagggggcggcggcggcggcggcggtggtggcggcaccatgtttcttcactcagttaatctctggaacctggcgttttatgtcttcatggtctttctggcaaccctggggctgtgggatgtcttcttcggcttcgaggagaataagtgcagtatgagctacatgtttgagtacccggagtatcagagttcagcagtgcctaagacctgggtctcaacagaccacctctccattgtgtggtgtaaacaattgcagttgactacagttcgagcattctttgatcttattgatgctgatactaaacaaataactcaaaattccaagaagaaactgtcagttttgtatcaccactttataagacacccatcaaaacattttgaggaaaatccagctataatttctgacttaacagggacatctatgtgggttctagtaaaagtgtccaaatggacctatgtagcttacaacgaatctgagaagatatattttacatttcctcttgaaaatcatagaaaaatctacactcatgtctattgtcagagcactatgctggatacaaatagttggatttttgcttgcataaacagcacttctatgtgcctgcaaggggttgatttatcatggaaagctgaactgctgccaacaattaagtatctgacattaagacttcaagactatccatctttgtctcatcttgttgtttatgtaccatctgttcgtggaagtaagtttgttgtagattgtgaattctttaaaaaagagaaaagatacatacagcttcctgtaactcatcttttttcctttggattgtcttcaaggaaagtggtgttaaatacaaatggcctatactacaatctagagcttctgaactttggacagatataccaagcttttaaaatcaacgtggtaagcaagtgctcagcagtcaaagaagaaataaccagtatctatagacttcatattccttggtcttatgaagattcactaaccattgcacaggctccatcttccacagaaatttctctgaaactccatattgctcaaccagaaaacaatacccatgtggcattatttaaaatgtacacgtcatcagactgtcggtacgaggtgacagttaagacttccttttcacaaatacttggacaggtagttagatttcatggtggagctcttcctgcttatgtcgtatctaatatccttcttgcttatagaggacagttatattctcttttctcaacaggttgttgcttagaatatgctaccatgttggataaagaagccaaaccatacaaagttgatccttttgtaattatcattaagtttctgttggggtataaatggtttaaagaattgtgggatgtattattgttaccagaattagatgccgtcattttaacttgtcagagtatgtgtttccccctgatatccttgattctctttctgtttggaacgtgtactgcctactggagtggcctactgtcttctgcatctgtgagacttctttcttcattgtggctagctttgaaaagaccctctgaacttcctaaagatatcaagatgatatcaccagacttgccctttttgacaattgtcttgatcatagttagttggacaacttgtggagcactagccatacttctttcttatctttactatgtgtttaaggttgttcatctgcaagccagcttaacaacttttaagaatagccagcctgtgaatcccaaacactctagaagaagtgaaaagaaatccaatcatcataaagactcctcaatacaccatcttcgtttatctgccaacgatgctgaagatagccttcgcatgcacagtactgtgattaacttactaacatggattgtattactcagcatgccttctctaatttattggctaaagaatcttaggtattattttaaacttaatcctgatccatgtaaacctttggcatttatccttattccgactatggcaattcttggaaatacttacactgtttcaataaaatcaagtaaattgttgaagactacttcacaatttccacttcctctggctgttggtgtgattgcttttgggtcagcacatttatataggcttccatgctttgtcttcattcctcttttactccatgcattatgcaactttatgtaagattggacttaaggaatgatgaagataatttatgtgtttagggccagtgataagagggaacacacagatccatcagtatggacagcaagatcctttggagaagacaagtctatttttacaatattgaaaataggaaattagttttgtaatgtttgagggaagtagttgaagcatggttttgttttgtggtgtggaatccatgtagtaatcatttttgaaaaattcatgaagggatatatggtgatcactatcattgaggactcctgtgcatataaaatagtctgttttatcaactgtacgagaagtctgatatgagagatttagtagatgcagcattatttgcagtctcactgcaagcattctgctcatttcatcaaactttttttcacaaaagtaggttattttgaatttgctatagtttacctattaagaaataagtctttaaataactgatgaaatttatagctgtttggtttctcaaaggttaaatagccacagaaagcctttggttagtttttggcagccaccatgaacaaagtggatcttgtcttcttacatctatgaaaatagagctttgaatggtaaggagatatgttttcttggtaaccaatgcaagattgatgggtggaaacatgattcaaacttacacaatttttcttgctatttttcaaatatgaatcttactatatattctcggtgaacatcaggagactattaaagaggtctgctgttaaatgtaaagaaaaaatgctcgtagctatttgcttcctggtattggagcagttcagttgtttagtttataccattggattcaattcattgcaccatggttgccaaaagtgcctgaggtcataatggattgttaaaataactaaattccagtggttggaaactctaggtttgtaccattttttctgctgtgggaaaaaacaacaacaacaacatgatcaaggtaacatcacatttgatgtataatattatactattaatggaatatcagtagacaactgttaacccattagtagcatgagtataaacagtacacctgaataaattggagacattagccactaggtttaacagtggaatcttgatttgcctaggtgacttctgggattactgtttgacaaataagagtaacattttatttcatttcagaatttacgtcacttttagctacaagagtaggaagaaggtaatcggcaaggcagaagagtatactctttgccttaggatagcgtaaactcaggctgagacatacccggcttatagagttcttctagatgtgtagactgtaaatgcccaaatcctctcaactaaagttttagtgattccacaaagcctctcatgtaaatttccagtgattccaccattgcacttgtgaatatgtatccttgttagtacccagggatgtcctcgagcaccagttttattttatctgccattgcatctggattccattacagcctctcagctgttactgcctgtggacagttacttctgcttactgcctgtagagagttacctaacttctcttctcagttcttcctcaggtcctggctattttggcctcagttgaagggagtcttgctctcatctctgagggttttaagtttgtttgatcccattgttgtcttttctagctttgagcatgtttttcagtattcatattttaacttactgagaacattaaagggaaatgataaactcgtggtggggatatggcagacaggtgcttgtttgtttgagagaagtagcagaagagataaaatacaaagtgctatatgtttcagctggagaggaaagagagagaatttattagattatatacttgtcccatggcataccacgtatatgtttaaatagggacacatctccctatgtttaactatacttataaacaactttgatacacattgcgtcttttattctgtcacctgatattttagtgtatctcaagttacagattacatgtgtccttaaactatttctgaatttggacttagttccatatacagaaagaactttagaaaattcattaatttggatcttctattgatagccataaatattatgtttatgtattctaaaacctctttgtttagttagtactgttcatgaatgtaacaagcttcaatttctcatttgtgagtagtacatttgctttttgtttgtttgtttgtttgtttttgagatggagtctcacgctgtcaccaggctggagtgcagtggcgcgatttcagctcactgcaacctccacctcccaggtgcaagtgatgcccctgcctcagcctcccgagtagctgggactacagacacccgccaccacacctggctaatttttgtatttttagtagagacggggtttcaccatgttggctaggctggtctcaaactcttgacctcgtgatttgcccgcctctgcctccccaaagtgctgggattacaggcgtgagccaccacgcccagccgtacatttactttttaaagcagcagactaggtacactaattctcactcaaatattttcatgggaatgtagttatcaccaagtcctaaagtattatttatgccaaaaaaaatttcattttaaggactacaaaaatgattctaattaaacattttataatcaatagtaggttgggtctttagccattatatgtgtatatatacagacacatatgtatacacttacattttgacagggtcttcattgagtcttgatgcactttaaacccagctggctaccagagatgcgaaggtgggctctttgaagattagcaaaatggacgtttctgtcacttgagaaaaggaaagttctttgcctttaaattacacagttttcatcatgcccacaatctatattattggctggttaaacagcactgccctattagcaatgttaacaaaaatgaaattatttattggcggttatagattatctaattcaggaaatttctgagctcaacttttacagcaactgttatgccttctaatttagcaattgagttatgagtaagttttgtgcttaactcctagaccctattgttgataaccagatcaaatatagtctgtacagaggaaaacactgggaacatttagtatttctaaagcctcctttggagttactactgattgtaatttggaactgataataggtagagattgctaacactgttttttttcctggatcttttttatgccagaaattaaacaggttctgctaactcttttttttctcttggttatcaccagaatgaaaatatttaaagtgatgactctagaaaagccatctgtgcctggttaacattgagtttgagtctcttcaatatatattgatcatgtattgattaatctttattttttcatattttggctagacaaattcagatctatataatggaataccccttcttgagtgaactatactactaatctacatgattatatagtaaggaaaaaagaagaaataactgtaataggcatagtgtttgttgttggttgtcttgtcattcatgtgatactactcatttccaaaattcacacaaacttacatgaggtggattatttgttttgttcattatttagttcctatatgttttttctttagaaacagagtctcattctgtcacccaggctggagtccaatggggcggtcatagttcactgcagccttgaactctttggctcatgtgatcctcccatctcagcctcccacagcaggtgagactacaggtacatgccactgtgcctgactttttaatttttttgtagagacgaggtttcagtttgttgcccaagctgatcttgaactcctggtttcaagcgatcctcccacctcggcctcccaaagtagtgggatttcaggcatgaccacctggcctagttcctatacttttcttaattcttcagacttctcacatttagtatagtgcattcatttcatcttgctgtttattagcaccctttgtggccaagggaaataaaaggtggtaaaattcagttttcagtttagttcttgaaagctctgggaaatggaggaaacacaaaactatgaattaaactagggctgttgatttctgaacccccagataaatcagttgacccacattttcattttaggtgttaggtccaaattagcataatgtcttgcattattattaggttcagtgtgaaactttacagtgctgcatttgaagtttagtaactggttattattaatcatttgggaaaaatgaaaatgtgttgggactttctatgactaggcatttgttgattatttttcatgattgctttttgttttctcattgtgtaggatttgtgaacttgtatattacaggaaacaagatactttgtaaaatttactggggaaaatccatttggagtgcatgacatttgccaggataagaaagcagtaatatgtttgtattataaaattacaccctgccagaaaactttctttcctagtaaggtaaatgtagaagggacttttacagcatagtaagttgattaggagccaaaattttattccagtttttttttgaactaagaatgttttaaattctgtaatgaacttttatgtttacccattactcatgcattctttcacaatatgtttaatagcctgaggaaataggaaagctgtgaagctactaccattctttacttttaataagaataataggaaagaaaagtcaggtcagtaatccaaatccaaatatgtatactgcaaatgctcaagaagtcacattttttgataaattgtattgagtacagaagaacttatatgaatttattatctgttaataacttagttttgacaacagaataacatttggaaattgtgagaataatcaagctgtttttccattaacagtgtaaattcataacatgtccttcaaaaggtgatattctaagctgtcttaattgtctacggttgataacttttaaataaagtacaggactttctgaaagtgtttggcatgttatgctgccaaaaacaatctgtgttttgaaataccaattaatcagttaatttctgaagactttgtataggacttgatatatgagtcagaatctgtctgtactcattctgtacattgtaactttgaacacttatgaaaaactgtatctgttggtgtgttttgattagttagtgtagatttgtttgcgtatttgaattccgattttagtttaggaagactaaaagtagccatttttgtaaagttcatatgctattttttaatgtcatttttgtttttaatatttatacaatagtgatgttactagtaaaaaatgtttatagataacacgtagagctattaactgttcaaaagcctacatgataggcatattttgtatttcgtgttgcactcgttctgtttcatattggactttttacatcccttttttagcaaaaaaaagagacacatttgaattctctttagcataaagctgtgcattggaaactatgtgactgtatccatacggttagcaaaatactctttgccaccaaaggtaaatgaaactgtaaaatacctctggatatttgtgccaatgaacttttcttagcatattaggattaaagcaaaaataatcttttcagtatgtttcatctaggacttacaataaatgtttaaaccatgaaaacttatatttcataccctaatttttctttgaaaatattcaagatttgtagcctagtgtgttctattttgtgtgattgcttgaatgttttctgattttattgggtaaaagtttgcctagtaatgatctttcagcaattcattgaaataattatttgaagtaatcttgcttcagatttaatttgtgatgtacattgttgtacaagccattttagtacaggtgtctcatttatgtagttgaaaggtgactgtggaatttcttttgttttttatgtatttccattcagtctctttatatagtcacatgtttcacaggggaacttgtccactggaacctaacatagtacaaccttttaatatgcgtatcttaaaggaaaatattataaaacaagatattaatactaaagtgttaacattaatatgttgttctcatggaagaaaagtagaaaatgtgataggcttagaaattattttttatcagcattaagtgcttcaatttctccccataaagattctaaggaaatttcagttcctcatattatagttttccccataatttaatattactaagtatttctctgcccagtaatgttgatgcagtttgcataaatagccttggaagtaaggaggcaggacagaaagccaaatatcgaaatctctggccttgatttagtgacagtttattctaatggggaccataggtgttattagtaaaaagatagtgtacaaggcctaagttcagtttacattgttctttgaaatgagttcatcttttgtgttgaataattgtattctaagtaggagatgcctgtatttaacataatcatgctttctatataatcaaatatgtatttgttggaatactggtagaaataaccttcccttcctccactgtgcagtggaaaaaaaactcccgatttatactgtatataaattaggaaattatgttacatatttacatttttaaaaatataaaaatgacatattattttgaagtgattgtattatagtttctgaagcttatgactggctataaatataacaacatacccatgagaaaccagaccaaaattgaatatatatcatcactgtgaccttgaacttatagtcatttgggataaaacagagtgtgccttgaaatgataaagagtgccctgcaattttataactgtacattttattatgggtggtcctctcaaattggccccaaatccttgtcttcgaggttggtgaaataaaagtttaaaataaaagttgactggtatttcctttagtatttccagaactattgctgtagaggcctcccttaattttcagagttctcattttgaattaaagtagacttacgctacatagatgtagaaaattaggtttggcttaggtttctgaaaaaatattctaggagaaggtggtagcattgttctgaacttaccacacttggaaaaactaatcttcaaatgtaattttttgtcttattaatgagtaatctgtcaaagacatgaattctttgacttgtgctcattctttctgaacttattgaggcttatatatatcaaataaggttaatttacacaataattatttttaataattaataaactcattcatgtagtatattttaaaacattatttcctctcatttttccttctcttttttcttcctatatatttttaaggcttcaagagaaaacgggcttcagtttttaaaaaaatgtagacttgcatttttactgtgcttatttaaaataatggatataatttatattaaggtccaaattattttattcacaggataatcatggtctctgataaaagatgcccacatttctgtgtactcacagttgttgtatatttttcaatttcaattttgaaagtaaactcaacacattgttttcccattttacctccactacctactcgccagacaaaaatatagatttctctaaaaacacatacaaagaaaatgtctttccttaaaacatgatcttattgacatgaaggtagtttgagcaagggtatgtaataaaataaatggctctcaacctgcatcaatttttatactatagttaaaaaatttatagaggacaacctatgtgttatgctgagatagactcagtaatcatttgtttgcaaattgattatttttttctcatccatccagaaagtacagtgcataacaacaacacttaacaagtgcagaggaacctgtcctgtagtatataataaaaaatgattgtcaccttgctgatctttccatttaaacatgcatgatctccagtactttgtacaatgtatagtatattaaatacatttatgtgtaattttgtgtgtatttttatatggtataattaaaattattacatttatgtgattgtaattcacaaaaagtactacttactatattctgtagagtgtgttgtgaatgtttttacctgtgtttgagcattatggtgtaggtttaatagatgaatatttgccttcagtctctgctcaggtattaatgtgtagtaatttttggtgctttctttttaatctgtgataatctggtgttctgaatgttcaaaaataaatttggttgaatacgca

SEQ ID NO: 217633 - DNA, 2769 bp, Artificial Sequence
  derived and/or modified sequence
atgttcctccatagcgtgaacctatggaacctggccttctatgtctttatggtgttcttggccactctggggttatgggatgtgttttttgggttcgaagaaaacaagtgctctatgtcttacatgttcgaatatcccgaataccagaagatcgaactgcctaaaaagctcgccaagagatacccagcgtacgaactctacctgtacggcgagggcagttacgccgaagaacacaaaattctcccactgactgggattcccgttctgtttctgcccggtaacgccggtagctacaagcaagtgcggagtattggtagcatcgctctcagaaaagcggaggacatcgacttcaagtatcactttgactttttttcagtgaattttaatgaagaactcgtggctctgtacggagggtcactacagaaacagacaaagttcgtgcatgagtgtatcaagactatactgaaactatataagggccaagaattcgccccaaaatctgtggccataattggccactctatggggggattggtagccagggcactgctgaccctgaagaacttcaagcatgacctgattaacttactaattacccaggccacccctcacgtcgcccctgtcatgccattagacagattcatcactgacttctatacgacagtaaataactattggatcctgaacgccaggcatataaacttgacgaccctgtccgtcgccggaggctttagggattatcaggtgcgcagtgggctcaccttcctcccaaaacttagccaccatacaagtgcgctgagtgtcgtgtcaagtgccgtgcctaaaacctgggtgtctactgaccacctctccatcgtctggtgtaagcagctgcagcttaccaccgtgagagcattcttcgatttgattgacgccgacaccaaacagattacacaaaactccaaaaaaaagctctctgtgctctatcaccattttataagacacccttcaaagcattttgaggaaaaccccgctattatcagcgatcttaccggcacctctatgtgggtcttggtcaaggtgtctaagtggacttacgtagcctacaatgaaagcgaaaaaatttatttcacttttcccctggaaaatcataggaagatttacacgcacgtgtactgtcaatccacgatgctagacactaactcctggatatttgcatgcatcaattccacatccatgtgcctgcagggagtggatctctcctggaaggcggagttgctgcccactattaaatacctgactctgagactccaggattaccccagtctctcacacttggtagtctatgtgcccagcgtgaggggatctaagttcgtggtggactgcgagtttttcaaaaaggagaagagatacatccagctgccggtcacacacttgttctcattcggattatcatctaggaaggtcgtgctgaataccaatgggctgtactataatctagagctgctgaactttggccagatctatcaggcattcaagattaatgtggtatccaaatgctccgcggtgaaggaagagatcacttctatttatagactccacataccctggagctacgaggactctctcacaatcgctcaggctccttcctctaccgaaatcagtttgaaattacacatcgcccagcctgagaataacacacatgtcgcactcttcaagatgtacacgtcttcagactgtcggtacgaggtgacagtgaagacttccttctcccagatccttggtcaggtcgtccgctttcacggcggagctctgccggcttatgtcgtctctaacatcctcctggcataccggggtcagctatactcgctcttctctaccggctgttgcctagagtatgccacaatgttggacaaggaggctaagccgtataaagtggatcctttcgtcataattataaaattcttactaggatataagtggtttaaggaactgtgggacgtgctgctcctgccggagcttgacgcagtgattctgacctgccagtctatgtgttttcccttgatctcattgatcttgttcctgttcgggacttgcactgcatactggagcggactgctgtcgagtgcatccgtcagactcctatcctctctttggctggcattgaaaaggccgtccgaattacctaaggacatcaagatgatctccccagacttaccattccttacaatcgtccttatcatagtgagctggaccacttgtggggcactggccatcctcctctcctacctgtattatgtgtttaaagttgtgcatctgcaagcttcgttgacaaccttcaagaactctcaaccagtcaatccgaagcacagccgcagatctgagaagaaaagcaatcaccacaaagattcttcaatccaccatctgcggctgagtgccaacgacgcagaggattccctacggatgcatagcacggtcatcaacttgctgacctggattgtcctcctttcaatgcctagcttaatttactggctaaaaaacctgcgatactacttcaaactgaaccctgatccctgcaagccactagccttcatactcatacccacgatggccattctcgggaatacgtataccgtgtctattaagagtagtaagttactgaaaaccacaagccagtttcccctccccctcgccgtgggtgtcatagccttcggttctgcccatttgtacaggcttccatgcttcgtatttattccactcctgctccacgcactgtgcaatttcatgtag

SEQ ID NO: 217634 - DNA, 2769 bp, Artificial Sequence
  derived and/or modified sequence
atgttcctgcacagcgtgaacctgtggaacctggccttctacgtgttcatggtgttcctggccaccctgggcctgtgggacgtgttcttcggcttcgaggagaacaagtgcagcatgagctacatgttcgagtaccccgagtaccagaagatcgagctgcccaagaagctggccaagagataccccgcctacgagctgtacctgtacggcgagggcagctacgccgaggagcacaagatcctgcccctgaccggcatccccgtgctgttcctgcccggcaacgccggcagctacaagcaggtgagaagcatcggcagcatcgccctgagaaaggccgaggacatcgacttcaagtaccacttcgacttcttcagcgtgaacttcaacgaggagctggtggccctgtacggcggcagcctgcagaagcagaccaagttcgtgcacgagtgcatcaagaccatcctgaagctgtacaagggccaggagttcgcccccaagagcgtggccatcatcggccacagcatgggcggcctggtggccagagccctgctgaccctgaagaacttcaagcacgacctgatcaacctgctgatcacccaggccaccccccacgtggcccccgtgatgcccctggacagattcatcaccgacttctacaccaccgtgaacaactactggatcctgaacgccagacacatcaacctgaccaccctgagcgtggccggcggcttcagagactaccaggtgagaagcggcctgaccttcctgcccaagctgagccaccacaccagcgccctgagcgtggtgagcagcgccgtgcccaagacctgggtgagcaccgaccacctgagcatcgtgtggtgcaagcagctgcagctgaccaccgtgagagccttcttcgacctgatcgacgccgacaccaagcagatcacccagaacagcaagaagaagctgagcgtgctgtaccaccacttcatcagacaccccagcaagcacttcgaggagaaccccgccatcatcagcgacctgaccggcaccagcatgtgggtgctggtgaaggtgagcaagtggacctacgtggcctacaacgagagcgagaagatctacttcaccttccccctggagaaccacagaaagatctacacccacgtgtactgccagagcaccatgctggacaccaacagctggatcttcgcctgcatcaacagcaccagcatgtgcctgcagggcgtggacctgagctggaaggccgagctgctgcccaccatcaagtacctgaccctgagactgcaggactaccccagcctgagccacctggtggtgtacgtgcccagcgtgagaggcagcaagttcgtggtggactgcgagttcttcaagaaggagaagagatacatccagctgcccgtgacccacctgttcagcttcggcctgagcagcagaaaggtggtgctgaacaccaacggcctgtactacaacctggagctgctgaacttcggccagatctaccaggccttcaagatcaacgtggtgagcaagtgcagcgccgtgaaggaggagatcaccagcatctacagactgcacatcccctggagctacgaggacagcctgaccatcgcccaggcccccagcagcaccgagatcagcctgaagctgcacatcgcccagcccgagaacaacacccacgtggccctgttcaagatgtacaccagcagcgactgcagatacgaggtgaccgtgaagaccagcttcagccagatcctgggccaggtggtgagattccacggcggcgccctgcccgcctacgtggtgagcaacatcctgctggcctacagaggccagctgtacagcctgttcagcaccggctgctgcctggagtacgccaccatgctggacaaggaggccaagccctacaaggtggaccccttcgtgatcatcatcaagttcctgctgggctacaagtggttcaaggagctgtgggacgtgctgctgctgcccgagctggacgccgtgatcctgacctgccagagcatgtgcttccccctgatcagcctgatcctgttcctgttcggcacctgcaccgcctactggagcggcctgctgagcagcgccagcgtgagactgctgagcagcctgtggctggccctgaagagacccagcgagctgcccaaggacatcaagatgatcagccccgacctgcccttcctgaccatcgtgctgatcatcgtgagctggaccacctgcggcgccctggccatcctgctgagctacctgtactacgtgttcaaggtggtgcacctgcaggccagcctgaccaccttcaagaacagccagcccgtgaaccccaagcacagcagaagaagcgagaagaagagcaaccaccacaaggacagcagcatccaccacctgagactgagcgccaacgacgccgaggacagcctgagaatgcacagcaccgtgatcaacctgctgacctggatcgtgctgctgagcatgcccagcctgatctactggctgaagaacctgagatactacttcaagctgaaccccgacccctgcaagcccctggccttcatcctgatccccaccatggccatcctgggcaacacctacaccgtgagcatcaagagcagcaagctgctgaagaccaccagccagttccccctgcccctggccgtgggcgtgatcgccttcggcagcgcccacctgtacagactgccctgcttcgtgttcatccccctgctgctgcacgccctgtgcaacttcatgtag

SEQ ID NO: 217635 - protein, 781 aa, Artificial Sequence
  derived and/or modified sequence
MSSECDGGSKAVMNGLAPGSNGQDKATADPLRARSISAVKIIPVKTVKNASGLVLPTDMDLTKICTGKGAVTLRASSSYRETPSSSPASPQETRQHESKPGLEPEPSSADEWRLSSSADANGNAQPSSLAAKGYRSVHPNLPSDKSQDSSPLLNEVSSSLIGTDSQAFPSVSKPSSAYPSTTIVNPTIVLLQHNREQQKRLSSLSDPVSERRVGEQDSAPTQEKPTSPGKAIEKRAKDDSRRVVKSTQDLSDVSMDEVGIPLRNTERSKDWYKTMFKQIHKLNRDDDSDLYSPRYSFSEDTKSPLSVPRSKSEMSYIDGEKVVKRSATLPLPARSSSLKSSSERNDWEPPDKKVDTRKYRAEPKSIYEYQPGKSSVLTNEKMSSAISPTPEISSETPGYIYSSNFHAVKRESDGAPGDLTSLENERQIYKSVLEGGDIPLQGLSGLKRPSSSASTKDSESPRHFIPADYLESTEEFIRRRHDDKEKLLADQRRLKREQEEADIAARRHTGVIPTHHQFITNERFGDLLNIDDTAKRKSGSEMRPARAKFDFKAQTLKELPLQKGDIVYIYKQIDQNWYEGEHHGRVGIFPRTYIELLPPAEKAQPKKLTPVQVLEYGEAIAKFNFNGDTQVEMSFRKGERITLLRQVDENWYEGRIPGTSRQGIFPITYVDVIKRPLVKNPVDYMDLPFSSSPSRSATASPQQPQAQQRRVTPDRSQTSQDLFSYQALYSYIPQNDDELELRDGDIVDVMEKCDDGWFVGTSRRTKQFGTFPGNYVKPLYL

SEQ ID NO: 217636 - DNA, 2346 bp, Artificial Sequence
  derived and/or modified sequence
atgagcagcgagtgcgacggcggcagcaaggccgtgatgaacggcctggcccccggcagcaacggccaggacaaggccaccgccgaccccctgagagccagaagcatcagcgccgtgaagatcatccccgtgaagaccgtgaagaacgccagcggcctggtgctgcccaccgacatggacctgaccaagatctgcaccggcaagggcgccgtgaccctgagagccagcagcagctacagagagacccccagcagcagccccgccagcccccaggagaccagacagcacgagagcaagcccggcctggagcccgagcccagcagcgccgacgagtggagactgagcagcagcgccgacgccaacggcaacgcccagcccagcagcctggccgccaagggctacagaagcgtgcaccccaacctgcccagcgacaagagccaggacagcagccccctgctgaacgaggtgagcagcagcctgatcggcaccgacagccaggccttccccagcgtgagcaagcccagcagcgcctaccccagcaccaccatcgtgaaccccaccatcgtgctgctgcagcacaacagagagcagcagaagagactgagcagcctgagcgaccccgtgagcgagagaagagtgggcgagcaggacagcgcccccacccaggagaagcccaccagccccggcaaggccatcgagaagagagccaaggacgacagcagaagagtggtgaagagcacccaggacctgagcgacgtgagcatggacgaggtgggcatccccctgagaaacaccgagagaagcaaggactggtacaagaccatgttcaagcagatccacaagctgaacagagacgacgacagcgacctgtacagccccagatacagcttcagcgaggacaccaagagccccctgagcgtgcccagaagcaagagcgagatgagctacatcgacggcgagaaggtggtgaagagaagcgccaccctgcccctgcccgccagaagcagcagcctgaagagcagcagcgagagaaacgactgggagccccccgacaagaaggtggacaccagaaagtacagagccgagcccaagagcatctacgagtaccagcccggcaagagcagcgtgctgaccaacgagaagatgagcagcgccatcagccccacccccgagatcagcagcgagacccccggctacatctacagcagcaacttccacgccgtgaagagagagagcgacggcgcccccggcgacctgaccagcctggagaacgagagacagatctacaagagcgtgctggagggcggcgacatccccctgcagggcctgagcggcctgaagagacccagcagcagcgccagcaccaaggacagcgagagccccagacacttcatccccgccgactacctggagagcaccgaggagttcatcagaagaagacacgacgacaaggagaagctgctggccgaccagagaagactgaagagagagcaggaggaggccgacatcgccgccagaagacacaccggcgtgatccccacccaccaccagttcatcaccaacgagagattcggcgacctgctgaacatcgacgacaccgccaagagaaagagcggcagcgagatgagacccgccagagccaagttcgacttcaaggcccagaccctgaaggagctgcccctgcagaagggcgacatcgtgtacatctacaagcagatcgaccagaactggtacgagggcgagcaccacggcagagtgggcatcttccccagaacctacatcgagctgctgccccccgccgagaaggcccagcccaagaagctgacccccgtgcaggtgctggagtacggcgaggccatcgccaagttcaacttcaacggcgacacccaggtggagatgagcttcagaaagggcgagagaatcaccctgctgagacaggtggacgagaactggtacgagggcagaatccccggcaccagcagacagggcatcttccccatcacctacgtggacgtgatcaagagacccctggtgaagaaccccgtggactacatggacctgcccttcagcagcagccccagcagaagcgccaccgccagcccccagcagccccaggcccagcagagaagagtgacccccgacagaagccagaccagccaggacctgttcagctaccaggccctgtacagctacatcccccagaacgacgacgagctggagctgagagacggcgacatcgtggacgtgatggagaagtgcgacgacggctggttcgtgggcaccagcagaagaaccaagcagttcggcaccttccccggcaactacgtgaagcccctgtacctgtag

SEQ ID NO: 217637 - DNA, 2346 bp, Artificial Sequence
  derived and/or modified sequence
atgtcatccgagtgcgacggaggctccaaggctgtcatgaacggcttggctccggggagtaacgggcaggacaaagccactgcggatccactgcgcgcacgcagcatctctgctgtgaagattattcccgtgaagaccgttaagaatgcctcaggtctggtgctcccaacagatatggacctcacaaagatctgcactggcaagggggccgtgaccctacgcgcctcctccagttatcgagagacgccaagcagctctccggcttccccccaggaaacaaggcaacatgagagtaagcctggccttgagccagaaccttcgagtgcagatgagtggcggctaagcagctcagctgacgccaacggcaatgcccagccttcaagcttggctgctaagggctatcgtagtgttcatcccaatttacccagtgacaaatcacaagactcaagccctcttctgaatgaagttagcagcagccttattgggacggacagccaagcctttcctagcgttagcaaaccctcgagtgcctatccctccactaccatcgtgaatcctactatcgtactattgcagcacaatagggaacagcagaagcggttaagcagtctgagcgaccctgtcagcgaacgacgagtgggggagcaggacagcgcacccacccaggagaaaccgacttccccaggaaaggccatcgaaaagcgagccaaagacgacagccgtagagtagtgaaaagcacccaggacctttccgatgtatctatggacgaggtgggaattccactccgaaacactgaaaggtcgaaggattggtacaaaacaatgtttaagcagatccataaattgaatagggatgacgacagcgatctgtactctccgcgctatagtttcagtgaagacaccaaatcccccctcagtgtgcccaggtcgaagtctgagatgtcctatatcgacggagagaaagtggtgaagcgcagcgcaactctgccgctacctgccaggtcatcctcactgaagagtagctcagagcgtaatgattgggagcccccagataagaaagtggacacaaggaaatatagagcagagcctaaaagcatttacgagtaccaacccgggaaaagctctgtactaacgaacgaaaaaatgtcaagcgccatttccccaacaccagaaatcagttctgagacgcctgggtatatatatagcagcaacttccatgcagttaagcgtgaatccgacggtgctccaggcgacctgacttctctagagaacgaacggcagatctataaaagtgtactggagggaggggacattcccctgcagggactatcggggttaaagcgcccttcatcatctgcctctaccaaagattccgaatctcctcggcatttcatacctgctgattacctcgaaagcacagaggagttcattcggcgccgccacgatgataaagagaaattgctggccgaccagagaagactgaagagggagcaagaagaggccgacatagcagcacggcggcacactggggtgatcccgactcaccaccaattcatcacgaacgagcggtttggtgatctccttaatattgatgatacagctaaacggaagagcggctcagagatgagacctgcacgcgccaagtttgacttcaaggcccagaccctgaaagagctgcccctccagaagggagacatcgtatatatctataagcagatagatcaaaattggtatgaaggggagcatcacggtagagtgggcatctttcctcgaacttacattgagctgctgccccccgctgagaaagcccagcctaaaaagctcacacctgtccaggtgttagaatatggcgaagccatagccaagtttaattttaacggcgacacacaggtcgagatgagtttccgtaagggcgaaagaatcactctactccggcaagtggacgaaaactggtatgaaggacggatccccgggaccagtcgccaggggattttcccaattacctatgtggatgtgattaagaggcctcttgtcaaaaatcccgtcgactatatggacctacctttcagctcatctcctagcagaagtgcaactgcctctccccagcagccgcaagcccagcagagaagggtgactccggatcgttcacagactagccaggatctattcagctaccaagccctgtattcttatattccccagaatgatgacgagttagagctccgggacggcgatatagtcgatgttatggagaaatgcgatgacggctggttcgtagggacttctagaagaacaaagcagtttggaaccttccctggcaattatgtgaagcccctctatctgtag

SEQ ID NO: 217638 - DNA, 2346 bp, Artificial Sequence
  derived and/or modified sequence
atgagcagtgaatgtgatggcggcagcaaggctgtgatgaatggcctggcccctggcagcaatggccaggacaaggccacagctgaccccctgcgggcccggagcatctctgctgtgaagatcatccctgtgaagacagtgaagaatgccagcggcctggtgctgcccacagacatggacctgaccaagatctgcacaggaaaaggagctgtgaccctgcgggccagcagcagctaccgggagacccccagcagcagccctgccagcccccaggagacccggcagcacgagagcaagccaggcctggagcctgagcccagcagcgcagatgagtggaggctgagcagcagcgcagatgccaatggaaatgcccagcccagcagcctggccgccaagggctacagatctgtgcaccccaacctgcccagcgacaagagccaggacagcagccccctgctgaatgaggtgagcagcagcctgattggaacagacagccaggccttccccagcgtgtccaagcccagcagcgcctaccccagcaccaccatcgtgaaccccaccatcgtgctgctgcagcacaaccgggagcagcagaagaggctgagcagcctgagtgaccctgtgtctgaaagaagagtgggggagcaggacagcgcccccacccaggagaagcccaccagccctgggaaggccatcgagaagagggccaaggatgacagcagaagagtggtgaagagcacccaggacctgagtgatgtgtccatggatgaggtgggcatccccctgaggaacacagagaggagcaaggactggtacaagaccatgttcaagcagatccacaagctgaacagagatgatgacagcgacctgtacagcccccgctacagcttcagcgaggacaccaagagccccctgtctgtgcccaggagcaagtctgagatgagctacattgatggagagaaggtggtgaagaggtctgccaccctgcccctgcctgcccggagcagcagcctgaagagcagcagcgagagaaatgactgggagcccccagacaagaaggtggacaccaggaagtacagagctgagcccaagagcatctatgagtaccagcccgggaagagctctgtgctgaccaatgagaagatgagcagcgccatcagccccaccccagagatcagcagcgagaccccaggctacatctacagcagcaacttccacgctgtgaagcgggagagtgatggagcccctggggacctgaccagcctggagaatgaaaggcagatctacaagtctgtgctggagggcggggacatccccctgcagggcctgagcggcctgaagaggcccagcagcagcgccagcaccaaggacagcgagagccccaggcacttcatcccagctgactacctggagagcacagaggagttcatcagaagaagacatgatgacaaggagaagctgctggccgaccagaggcggctgaagcgggagcaggaggaggccgacattgctgcccggcggcacactggagtcatccccacccaccaccagttcatcaccaatgaaagatttggagacctgctgaacattgatgacacagccaagaggaagagcggcagcgagatgaggcctgcccgggccaagtttgacttcaaggcccagaccctgaaggagctgcccctgcagaagggggacatcgtgtacatctacaagcagattgaccagaactggtatgaaggagagcaccacggccgggtgggcatcttccccaggacctacatcgagctgctgcccccagctgagaaggcccagcccaagaagctgacccctgtgcaggtgctggagtatggagaggccatcgccaagttcaacttcaacggggacacccaggtggagatgtccttcagaaaaggagagcgcatcaccctgctgcggcaggtggatgagaactggtatgagggccgcatccctggcaccagccggcagggcatcttccccatcacctacgtggatgtgatcaagaggcccctggtgaagaaccctgtggactacatggacctgcccttcagcagcagccccagccgcagcgccacagccagcccccagcagccccaggcccagcagaggagagtgaccccagacaggagccagaccagccaggacctcttctcctaccaggccctgtacagctacatcccccagaatgatgatgagctggagctgagagatggagacatcgtggatgtgatggagaagtgtgatgatggctggtttgtgggcaccagcaggaggaccaagcagtttggcaccttccctggcaactacgtgaagcccctgtacctgtag

SEQ ID NO: 217639 - DNA, 2346 bp, Artificial Sequence
  derived and/or modified sequence
atgagcagcgagtgcgacggcggcagcaaggccgtgatgaacggcctcgcgccaggcagtaatgggcaagacaaggcgacggcagatccactgcgggctcgttccatcagcgctgtgaagattatcccagtgaagacagttaagaacgcatcaggcctagtgctgccgaccgatatggatctgactaagatctgtactggaaagggagccgtcacactgcgcgcctctagctcttaccgtgagaccccttccagctcccccgcgagccctcaagagactcgtcagcatgagtctaagccaggcctagagcccgaaccatccagcgcggacgagtggaggctctccagttccgccgacgctaacgggaacgcccagcctagttccctggctgccaagggctaccgatcggtccaccccaatttaccatccgataaatcacaggacagttctcccctgttgaacgaggtaagcagctccctgataggcactgattcccaggcttttccatcagtcagcaaaccttcctctgcatatccatctactactatcgtgaatccaacaatagtgctgctgcaacacaacagagagcagcagaaacggctttcctcactgagtgacccggtttctgagaggcgcgtgggtgaacaagacagtgcacccacacaggagaaacccacttctcccggaaaagctattgagaagagagcaaaggacgacagtaggagagtggtaaaatctacccaggacctcagcgacgtgtctatggacgaggtaggcattccattgcggaatacggagagaagcaaggactggtacaagactatgttcaagcaaattcacaagcttaatcgggatgatgacagcgatctgtacagccccaggtatagtttctcagaagatactaaatctccactgtctgtgccccgtagcaaatctgagatgagctacattgacggagaaaaggtggtcaagcgtagtgctacactaccactgccagccagaagcagctctttaaaaagtagcagcgagcgaaacgactgggaaccacctgacaagaaagtggatacaagaaagtaccgcgcagaacccaaatcaatctacgaataccagcccggcaagtcaagtgttctcactaatgaaaagatgagcagcgctatttctcccactccagaaatttcctcagagaccccgggatatatttattcctcaaatttccacgctgtcaagcgcgaatcagacggcgctccaggtgacctcacttctctggagaacgaacgtcaaatctacaagtctgtactagagggcggcgatattcccctccaggggttgtctggactgaagcggcccagcagcagtgccagcactaaagactccgaatcaccgagacacttcatccctgccgactacctcgaaagtactgaagagtttattagacggcggcacgatgataaggagaaattgctagccgatcaacgccgcctgaaaagagaacaagaggaagctgacatcgcagctcgtaggcacacgggagtgatccctacacaccaccagttcataacaaatgaaaggtttggtgatttgctcaatattgacgatactgctaaaagaaaatctggcagtgaaatgaggccagcaagagccaaattcgacttcaaggcccaaaccctgaaagagctgccgctacaaaaaggcgatatagtatatatctataaacaaatcgaccagaactggtacgagggcgaacaccatggaagagtgggcatattcccccgcacttacatcgagcttctgccacctgcggagaaggctcaaccaaagaagctcactcccgtgcaggtgctcgaatacggggaagctatagccaaattcaatttcaatggggacacacaggtggaaatgtctttcagaaagggagagcggatcacactcctgcgccaggtggacgagaactggtatgagggacgcatccccggcactagcagacagggcatcttcccaattacgtacgtggatgtgatcaagcgacctcttgtgaagaatcctgtcgactatatggacctgcccttttcctcatccccctcaaggagcgctaccgcctccccgcaacagcctcaagcacaacagaggcgagtgacgcccgatcggtcacaaacaagccaggatctgttttcctaccaggctctatacagttacatcccacagaatgatgatgagctcgagctgagggatggggacatagttgatgtgatggaaaaatgcgacgacggctggttcgtgggtacttccagaaggacaaagcagtttgggacttttccaggaaattatgttaagcctctgtacttatag

SEQ ID NO: 217640 - DNA, 2346 bp, Artificial Sequence
  derived and/or modified sequence
atgtctagtgaatgtgacggcggtagcaaggcggtgatgaacggcctggcaccagggtctaacgggcaggacaaagccaccgcagacccgctgcgcgctaggagtatcagtgccgtgaaaatcatacctgttaagacagtgaagaatgccagcgggctggtgctgccaactgacatggacttgaccaagatttgcactggcaagggcgcagtgactctcagggcgtcttcttcctaccgggagactccaagctcctctccagcatcaccccaggagactagacaacacgaaagtaaaccaggcctcgagcccgaaccctctagcgctgatgagtggagattatcaagttctgctgacgcgaacggtaacgctcagccatcctccttggcagcgaagggataccgctcagtccaccccaatcttcccagcgacaagagccaggatagcagccccctcctcaatgaagtgagcagctctctgataggcacggatagccaggccttcccgtctgtgagcaagccttcaagtgcttaccccagcacgacaatagtgaaccccacaattgtgctcctccagcacaatcgcgaacaacaaaagagactgagtagcctatcagatcccgtctctgagaggagggttggcgagcaagacagcgccccaactcaagagaaacccaccagtcctggaaaggccatagagaagcgcgcaaaggacgacagtagaagggtcgtcaaatcgacacaggatctctccgatgtgagcatggatgaggttgggatccctctgcgaaacaccgaacgcagcaaagactggtacaaaaccatgttcaaacaaatccacaagcttaaccgtgacgacgattctgatctctacagccctagatatagcttctcggaggatacaaagagtcccttgtcagtgccacgctctaagtctgaaatgtcttatattgatggcgagaaggtagtcaaaaggtcagcaaccctgccccttcctgcccgaagcagcagtctgaagagttccagtgagcgcaacgattgggagccccctgacaaaaaagttgacactcgaaagtaccgggctgagcccaaaagcatctacgagtaccagcccggtaaatcgagcgtgctgaccaacgaaaagatgtcttcggctataagtcctactcccgagatcagcagcgagactcctgggtatatctattctagcaacttccacgcggtcaagcgcgagagtgatggagccccaggagatttgactagcctcgagaacgaacggcaaatatataagtcggtgctggagggaggagacatacccctgcagggtctatccggtctgaagaggccatccagtagcgcctcaaccaaggacagcgaatctcccaggcacttcatccccgctgattatctcgagagtacggaggagttcattcgcaggagacacgacgataaggagaaactcctggctgaccagagaagactcaagagggaacaagaagaggccgacattgcagctagacggcatacgggggtgattccaacacatcatcagtttatcaccaacgagcggtttggcgacctccttaatatagacgatactgccaagcgcaagtccgggtcagaaatgaggccggcaagggcaaaattcgatttcaaggcccagactctaaaggaactgcccttacagaaaggggatattgtatacatttacaaacagatagaccaaaattggtatgagggggaacaccacgggcgagtgggaatcttcccaaggacatacatcgaattgttgccccctgccgaaaaggcccagccgaaaaaactgacccctgtccaggttctcgagtacggggaggcaatagctaagttcaatttcaacggggacacccaagtcgaaatgtcatttcggaagggggaaaggatcacccttttaagacaggtagacgagaattggtacgagggtcgcataccaggcacgagcaggcaagggattttccctatcacgtatgtagatgtgattaaacgccctcttgtgaagaaccctgttgactacatggatttgccttttagctcatctccctcccgaagtgccacagccagtccccagcagccgcaggcccaacaaaggcgcgtgactcctgaccggtctcagacatcacaggatctgttcagctaccaagccctctactcgtacataccgcagaacgatgacgagcttgagctgcgcgatggcgacattgtagatgtcatggaaaagtgtgatgacgggtggttcgtcggaacatccaggagaaccaaacagttcggcacattccccggaaactacgtcaagccactgtatttgtag

SEQ ID NO: 217641 - DNA, 5858 bp, Artificial Sequence
  derived and/or modified sequence
agcgctgagtcccagaaaaacagagcggggccagctgcagcgtgtagtgcgagtggggcggacgcgcgcagcccgcccgcccggcgaccagcaaggagttggcatcctttggaagagttcgtgaaagctttctgcccagagctcctggaccaatgcatcttcccaccaccttaaaccactgagcagttcagagccccagttgcagacgacttgtcctgccaccaccatgagttctgaatgtgatggtggttccaaagctgtgatgaatggcttggcacctggcagcaatgggcaagacaaagcaactgccgaccctttacgcgcacgctctatttctgctgttaaaatcattcctgtgaagacagtgaaaaacgcctcaggcctagttctccctacagacatggatcttacaaaaatctgcactgggaagggagcggtgactctccgggcctcgtcttcctacagggaaaccccaagcagtagccctgcgagccctcaggaaacccggcaacacgaaagcaaaccaggtctggagccagagccttcttcagcagatgagtggaggctttcttccagtgctgatgccaatggaaatgcccagccctcttcactcgctgccaagggctacagaagtgtgcatcccaaccttccttctgacaagtcccaggattccagtcctctactaaatgaagtttcttcttcccttattggaactgattcccaagcctttccatcagttagcaagccttcatccgcctatccctccacaacgattgtcaatcctactattgtgctcttgcaacacaatcgagaacagcaaaaacgactcagtagcctttcagatcctgtctcagaaagaagagtgggagagcaggactcagcaccaacccaggaaaaacccacctcacctggcaaggctattgaaaaaagagcaaaggatgacagtaggcgggtggtgaagagcactcaggacttaagcgatgtttccatggatgaagtgggcatcccactccggaacactgagagatcaaaagactggtacaagactatgtttaaacagatccacaaactgaacagagatgatgattcagatctgtactctcccagatactcattttctgaagacacaaaatctcccctttctgtgcctcgctcaaaaagtgagatgagctacattgatggtgagaaggtagtcaagaggtcggccacactacccctcccagcccgctcttcctcactgaagtcaagctcagaaagaaatgactgggaacccccagataagaaagtagacacaagaaaatatcgtgcagagcccaagagcatttacgaatatcagcctggcaagtcttccgttctgaccaacgaaaagatgagctcagccatcagccctactccggaaatttcttcagagactcctggatatatatattcttccaacttccatgcagtgaagagggaatcagacggggctcctggggatctcactagcttggagaatgagagacaaatttataaaagtgtcttggaaggtggtgacatccctcttcagggcctgagtgggctcaagcgaccatccagctctgcttccactaaagattcagaatcgccaagacattttataccagctgattacttggaatccacggaagaatttattcgaagacgtcatgatgataaagagaaacttttagcggaccagagacgacttaaacgcgagcaagaagaggctgatattgcagctcgacgccacacaggcgtcattccgacgcaccatcagtttatcactaatgagcgctttggggacctcctcaatatagacgatactgcaaaaaggaaatctgggtcagagatgagacctgccagagccaaatttgactttaaagctcagacactaaaggagcttcctctgcagaagggagatattgtttacatttataagcaaattgatcagaactggtatgaaggagaacaccacggccgggtgggaatcttcccacgcacctacatcgagcttcttcctcctgctgagaaggcacagcccaaaaagttgacaccagtgcaggttttggaatatggagaagctattgctaagtttaactttaatggtgatacacaagtagaaatgtccttcagaaagggtgagaggatcacactgctccggcaggtagatgagaactggtacgaagggaggatcccggggacatcccgacaaggcatcttccccatcacctacgtggatgtgatcaagcgaccactggtgaaaaaccctgtggattacatggacctgcctttctcctcctccccaagtcgcagtgccactgcaagcccacagcaacctcaagcccagcagcgaagagtcacccccgacaggagtcaaacctcacaagatttatttagctatcaagcattatatagctatataccacagaatgatgatgagttggaactccgcgatggagatatcgttgatgtcatggaaaaatgtgacgatggatggtttgttggtacttcaagaaggacaaagcagtttggtacttttccaggcaactatgtaaaacctttgtatctataagaagactgaaaaccatggagattatttttattggaggaggaagcatcattcatgaaccgatctttttagttgagtcagtaggaaaattaatacagtggataaagtaagaagcaaaagacagggacagagaagtgttgtgtttaaaacccaagcctgtctaaggttactgtgtattagacagggccgaactagtgtgctgagcaaaaagaattgaagcaaattgtatttacttagccgcttctgggagccacttcagcctttcccctcccctccacttcttgggtaatctgacctgaagcatagtccaggagcagagttagccagaaatgcctcctgctgccccagccttagagagctcccatctcaatcattgagcctgaaggcttcaagcccaagaatgcaacaagacccccagcctacatttctcagctcccctggagccagctgatcctgtaacgctgctggaggtcagtctgagctaccaagactgtccctagacaaaggtggagtcccccacactgcccaagaccaaatccctcactcaacctgctgaggtgtggatggggaaacagaggcaaaactgaggcacctgatgcattcagcctgctgtgcagcagtgccattgactgccctgatgttcagagagaaacgcacacaaggtttgcccatgagaattggggagcagatggccaagcagataggttatgtctgttttctgagtgatgaagtcaggaagccctgtggctctggaggccacttgtggttcattcttttcccatatccttggcttttagaaatggttaccttcaggacagtgcagctgcatttatcagagcactattgctaagttttcttttctggcttgtgtttttctgggacagtttagaattgggaggcctattctcatagaacaccaaaaatgatgttcagtgattcatttaacatacaccaatgtactctggctgctggggggacaaccataagcaagacatgcccagggtttgccgtggctccagatctactccctgtaggagttcaaggatcacacaaacggtagtaaccagggttgtgaatctgagtacaccctggcaaggcttctcttcagactgaagcagcaattctgccactaccagcagcaaccaggacgtctgttctttgtgggggccagatcagaagagagaggcccctgtgacgcccgggctgcttggtcacaactctgtccaattcaaggatgtttatcggcctctcttagatcctgagtgagacaaatacagaaatgacccattccctgcccaccagaaactcagaggtgattggggagactgacacaggaaaatgaacttaatcaagagagactgtgatatgtgctaagaagggtgtgagggagggagagatgaattttccctggagggatcctagaaagcattgtcatattgccatctccattagctcacttttaaacaactagggtgctggaagaacctttgtctgagggtagttcatagctggaaatacttggaatattttccagagtctctaaactctcatcttcccccacagatacacatccaagctcacaaataggagtagcaattctaggtggtagggttgtgtacggaacccctggctgtctgcatatatctcagaattaccccaggaccattgtcccaaagtctagagtctttacaggtaggcaaaatttgttttcaatgcctgtgcctcagctgctgtcacaaatacccatcttaggatcccatcagcttcccatcccccaccagacagccacagtaccctcactttctccctattgttctttcaaatcctgttctcaggaaagaaactgccactaattcattcacactaaggtgtaaatgattgataataggaatgagttacctcttcccacagacatttgtttttaagtatgacagagcagggccttaatcccaagggaaaaggttatggaactggagggggtgagctttctgggtagaaggagacttcctgaatttccttaaaacccagtaagagtaagacctgttgttttggaaggtctgctccaccatctaagagcactgtttttttttttttgttgttgttgttgttttacggtctctgagggaatatagtaaaaatgcatatgcacgtgcaatttgcacggcagcatttcaccgattgtggactgtattggctaatgtgtttcctggtctttagatgcaaaccattaataacactatcttatctcatagttttttcaggggtgcttcttgattagtagggaattttgaacacctctttaaatacagctagaaaataaaaccaatttgtaaagccacatttgcatatgatgccagcctcacgcatttgtatatctccagaaattcaggtatgcctcaccaatttgcccgtctttaataaaatcttgtgttaaaatttgcatcacgtcgccttcctatgtatgacgaaacaagaaacagagatttccaattgctcttttgtcttcagacatttagtaatataaagtacctatttttatgctgaaatgtttatacaggtttattaatagcaagtgcaactaactggcggcatgccttgcaacacattttgatatattagccatgcttccgggtaaaggcaagccccaaactccttatcttttgcagtctctctgggatcagtaaaagaaaaaaaaaataatgtgcttaagaagtgggactgtaaatatgtatatttaactttgtatagcccatgtacctaccttgtatagaaaaataattttaaaaatttgaatggaagggggtaaaggaagtcatgaagtttttttgcatttttatttaaatgaaggaattccaaataactcacctacagatttttagcacaaaaatagccattgtaaagtgttaaaatttacgataagtattctattggggaggaaaggtaactctgatctcagttacagtttttttttcctttttaatttcattattttgggtttttggtttttgcagtcctatttatctgcagtcgtattaagtcctattgctagaataggttactacaaaaaaggttatattctgaaagaaaaataactgacattatatataaccaattaatttaaagtattgccatttaaattacacactgagagcatgtcctatgcagacatagatttttctgttcatttatttttcttcattgcagtggattgatttgataaatagatgtgttgaattactacatttgctgtacatattatttaataaactttattcagaattgcgtggca

SEQ ID NO: 217642 - protein, 518 aa, Artificial Sequence
  derived and/or modified sequence
MGFHLITQLKGMSVVLVLLPTLLLVMLTGAQRACPKNCRCDGKIVYCESHAFADIPENISGGSQGLSLRFNSIQKLKSNQFAGLNQLIWLYLDHNYISSVDEDAFQGIRRLKELILSSNKITYLHNKTFHPVPNLRNLDLSYNKLQTLQSEQFKGLRKLIILHLRSNSLKTVPIRVFQDCRNLDFLDLGYNRLRSLSRNAFAGLLKLKELHLEHNQFSKINFAHFPRLFNLRSIYLQWNRIRSISQGLTWTWSSLHNLDLSGNDIQGIEPGTFKCLPNLQKLNLDSNKLTNISQETVNAWISLISITLSGNMWECSRSICPLFYWLKNFKGNKESTMICAGPKHIQGEKVSDAVETYNICSEVQVVNTERSHLVPQTPQKPLIIPRPTIFKPDVTQSTFETPSPSPGFQIPGAEQEYEHVSFHKIIAGSVALFLSVAMILLVIYVSWKRYPASMKQLQQHSLMKRRRKKARESERQMNSPLQEYYVDYKPTNSETMDISVNGSGPCTYTISGSRECEV

SEQ ID NO: 217643 - DNA, 138 bp, Artificial Sequence
  derived and/or modified sequence
atcattgaatgcaatcacatggaatcatcacagaatggaatcgtacggaatcatcatcgaatggaattgaatggaatcatcaattggactcgaatggaaacatcaaatggaatcgattggaagtgtcgaatggactcg

SEQ ID NO: 217644 - DNA, 1557 bp, Artificial Sequence
  derived and/or modified sequence
atgggatttcatctgattacccagctgaaaggaatgtcagtggtgttggtgctgcttcccactctgctcctggtgatgcttactggagcccagcgtgcatgcccaaagaactgtcggtgcgatggcaagatagtttactgcgagagccacgcgtttgcggacattcctgagaacatctctggagggtctcagggactgtcacttagattcaactctatccagaagctcaaaagcaatcagtttgcaggcctcaaccaactgatctggctgtacttagaccacaactacattagtagcgtggatgaggacgcctttcaggggatccgacgcctcaaggaactgattctttcctcgaacaagattacctacctccacaacaagaccttccatcctgttcctaatctgagaaatcttgacctaagttacaacaaactgcagaccctccagagcgagcagtttaaggggctcaggaagttaattatcttgcatctgcgtagcaattccttgaagaccgtgcctatccgggtttttcaggattgccgcaatctagactttttagatctgggctacaaccgcctgaggtccttgtcacgaaacgccttcgctggcctcctgaagctcaaggagctgcacctggagcacaatcaattctctaagattaattttgcccatttccccagactgttcaacctgcgtagtatctatctccagtggaacagaattcgcagtatttcacaaggtctgacttggacctggagcagcctgcacaacctcgacctgagcggcaacgacattcaagggattgagccagggacgtttaagtgtttgcctaatctccagaagttgaatctcgacagcaataagctaaccaatatatcccaggaaacagtgaatgcctggatatccctcatatctatcactctatccggcaatatgtgggaatgctcgaggtctatttgccctcttttctattggttaaaaaattttaagggtaacaaagagtcaactatgatatgcgcgggcccaaaacatatacagggggaaaaggtctcagatgcagttgagacatacaacatttgctctgaagttcaggttgtcaatactgagcggagtcacctagtgccacagaccccgcagaaacccctgatcattcccagacccaccatcttcaagccggatgttacccagagtacgttcgagacacccagtccatccccagggtttcagatacccggggctgagcaggaatacgaacacgtttccttccacaaaataattgctggtagcgtcgccctcttcttatcagttgctatgattttattagtgatttatgtctcttggaaacgttatcccgccagcatgaaacagctgcagcagcactcactgatgaaacggcggcgaaaaaaagcccgcgagagcgaacggcagatgaatagccctttgcaggagtattacgtggactacaagccaactaactctgaaaccatggacatctcagttaacggcagtgggccgtgtacatatactatttctggcagtcgagagtgcgaggtctag

SEQ ID NO: 217645 - DNA, 1557 bp, Artificial Sequence
  derived and/or modified sequence
atgggcttccacctgatcacccagctgaagggcatgtctgtggtgctggtgctgctgcccaccctgctgctggtgatgctgaccggggcccagagggcctgccccaagaactgccgctgtgatggcaagatcgtgtactgtgagagccacgcctttgctgacatccctgagaacatcagcggcggcagccagggcctgagcctgcgcttcaacagcatccagaagctgaagagcaaccagtttgctggcctgaaccagctgatctggctgtacctggaccacaactacatcagctctgtggatgaagatgccttccagggcatccggcggctgaaggagctgatcctgagcagcaacaagatcacctacctgcacaacaagaccttccaccctgtgcccaacctgaggaacctggacctgagctacaacaagctgcagaccctgcagagcgagcagttcaagggcctgaggaagctgatcatcctgcacctgcggagcaacagcctgaagacagtgcccatccgggtcttccaggactgcaggaacctggacttcctggacctgggctacaaccggctgcggagcctgagcagaaatgcctttgctggcctgctgaagctgaaggagctgcacctggagcacaaccagttcagcaagatcaactttgcccacttccccaggctcttcaacctgcggagcatctacctgcagtggaaccgcatccgcagcatcagccagggcctgacctggacctggagcagcctgcacaacctggacctgtctggaaatgacatccagggcatcgagcccggcaccttcaagtgcctgcccaacctgcagaagctgaacctggacagcaacaagctgaccaacatcagccaggagaccgtgaatgcctggatcagcctcatcagcatcaccctgagcggcaacatgtgggagtgcagccgcagcatctgccccctcttctactggctgaagaacttcaagggcaacaaggagagcaccatgatctgtgccggccccaagcacatccagggcgagaaggtgtctgatgctgtggagacctacaacatctgcagcgaggtgcaggtggtgaacacagagaggagccacctggtgccccagaccccccagaagcccctcatcatcccccggcccaccatcttcaagccagatgtgacccagagcacctttgagacccccagccccagccctggcttccagatccctggagctgagcaggagtatgaacatgtgtccttccacaagatcatcgccggctctgtggccctcttcctgtctgtggccatgatcctgctggtgatctacgtgtcctggaagcgctacccagcctccatgaagcagctgcagcagcacagcctgatgaagagaagaaggaagaaggcccgggagagcgagcggcagatgaacagccccctgcaggagtactacgtggactacaagcccaccaacagcgagaccatggacatctctgtgaatggaagtggcccctgcacctacaccatcagcggcagcagagaatgtgaggtgtag

SEQ ID NO: 217646 - DNA, 3616 bp, Artificial Sequence
  derived and/or modified sequence
agtgtatcacaaactcaagcattagcaccaacaagctctgagcatcatcagtctctggaaagccttctgaattagacaagggctgcctcccagcacagctacaaaacactttaaacctgaccagctaaatggataaacctagcctgcatagcttttaaactggggtctcatacagcacaggaggcctacttgcttcaagaactgaaaatccagaggatgaattgctttatctgggaatggcaaaagccagcacaataaggaatgccagtttgtatggggctactagctcacatgcgggatcagaatggtgtgaatgacagccgcactgtgtcatgaaggtggtggtggtttccgcacaagagaccaaataagaagaaagctgagagaggggggaaacgtttttggatgacaaaggatgggtttccatttaattacgcagctgaaaggcatgagtgtggtgctggtgctacttcctacactgctgcttgttatgctcacgggtgctcagagagcttgcccaaagaactgcagatgtgatggcaaaattgtgtactgtgagtctcatgctttcgcagatatccctgagaacatttctggagggtcacaaggcttatcattaaggttcaacagcattcagaagctcaaatccaatcagtttgccggccttaaccagcttatatggctttatcttgaccataattacattagctcagtggatgaagatgcatttcaagggatccgtagactgaaagaattaattctaagctccaacaaaattacttatctgcacaataaaacatttcacccagttcccaatctccgcaatctggacctctcctacaataagcttcagacattgcaatctgaacaatttaaaggccttcggaaactcatcattttgcacttgagatctaactcactaaagactgtgcccataagagtttttcaagactgtcggaatcttgattttttggatttgggttacaatcgtcttcgaagcttgtcccgaaatgcatttgctggcctcttgaagttaaaggagctccacctggagcacaaccagttttccaagatcaactttgctcattttccacgtctcttcaacctccgctcaatttacttacaatggaacaggattcgctccattagccaaggtttgacatggacttggagttccttacacaacttggatttatcagggaatgacatccaaggaattgagccgggcacatttaaatgcctccccaatttacaaaaattgaatttggattccaacaagctcaccaatatctcacaggaaactgtcaatgcgtggatatcattaatatccatcacattgtctggaaatatgtgggaatgcagtcggagcatttgtcctttattttattggcttaagaatttcaaaggaaataaggaaagcaccatgatatgtgcgggacctaagcacatccagggtgaaaaggttagtgatgcagtggaaacatataatatctgttctgaagtccaggtggtcaacacagaaagatcacacctggtgccccaaactccccagaaacctctgattatccctagacctaccatcttcaaacctgacgtcacccaatccacctttgaaacaccaagcccttccccagggtttcagattcctggcgcagagcaagagtatgagcatgtttcatttcacaaaattattgccgggagtgtggctctctttctctcagtggccatgatcctcttggtgatctatgtgtcttggaaacgctacccagccagcatgaaacaactccagcaacactctcttatgaagaggcggcggaaaaaggccagagagtctgaaagacaaatgaattcccctttacaggagtattatgtggactacaagcctacaaactctgagaccatggatatatcggttaatggatctgggccctgcacatataccatctctggctccagggaatgtgaggtatgaaccatgatcctcctaaaagcatttctactgcggggaaggagaggtaaatgtttgaagccctagaggtgtctctaatcactagaaagattaatgacccttttgcttttgggttttgctcagtgtgaaaggttacttaattaaattacaaccaccaggaaattgactgctttttttttttttttaaatggttgaaacttgaaggaagttcattcaaggataagttggaataaagcactatgttaaaacatctgctttttaacaatttgtatacaggggttggacttaaaaacacacatacaaacaaaactcttttcattctgaaatttctgtctggttcttggtgtttgactgttgtaatggagtaaagaagagggccagcttaatttaaaaataaagtgagtttaccaaaattccagaaggtaatgaagatttaaaccaaagagcaattttcccaagggttgattttgttgtaaatttttagttttaatgaaagcatgcaacagggatctcacacccatgttacttgccatttagttattataccagcatagagaatgtcagaggcctactgtgtaattgtatcaggctcctaaggcttctttctttttttttttttgtttccttctttcctactttctttcactccttcctttccttcctttctcttccttctttttttgtttgtttgtttgttttttaattactgggatatagatccgatttcaaaggtttttatgcactggctatttgtgtttaatcagaatgaaacttcaattccatgctttggctttgtccctggtaactaaaatcaggtcacaattttgtggatgatttagcaataataaaatggcagtcataacagggactgtttgtcagtattgctgtcatccccaaaagaaatgatatgtattcttgttaaacttattaaaaaataagtgatacaaatatttataaataaaaggagagaggtttgagttctgggtatcctccctttctgtaacagcctcaaataaaggtgtaccttccatgttatattatttttgtttttataagaataaatttggacccggtttctgattatttaatttaaaagatcacttacaggatcatgttagtgagcagacaaatagtcacaaatttcaaacttgtcaataagtaatgctggatgtaaattgttcttttcttggtaatgttgatcattatgtgcaaagactgactactaaggccttgttgctggaagaaactagtgaagagaggttaaattctggcaatataatgttttagtatctgattttagatgatcactctttcaaaagacagttttaatgagtaattaaagatgttgccctttctaatgctagttaacagttggaaaatataattgctctttgatagcatatactccaatttttccatagtcctaactacaaatgctaatgaaaatgttttcagacaaagcactgaatttgaaataatctctaactcagtacaatttggactattgaactgttcttcaaagaattcattttcttcttttttgtgtatcattgaaaataagagaagtaatcccagataataaattcctaaaaggaaactgtataagcaattgcccttaaaaattaaaaagaataaaagattttctat

SEQ ID NO: 217647 - DNA, 1557 bp, Artificial Sequence
  derived and/or modified sequence
atgggcttccacctgatcacccagctgaagggcatgagcgtggtgctagtcttactgcccacccttctcctcgtaatgctgaccggtgctcagcgcgcctgtccgaagaattgcagatgcgacggcaagattgtatactgcgaatcccacgccttcgctgatattcccgaaaacatctctggtggatcccagggcctttcattaagattcaattctattcagaagttgaagtcaaatcaatttgccggattaaaccaacttatctggctctatttagaccataattatatttccagtgttgatgaggatgcattccaggggatacggcgtctgaaggagcttattctctccagcaataaaattacatacttacataacaaaacctttcatccagtccctaacctacggaacctcgatctcagctacaacaagttacaaaccttgcagtctgagcaattcaaaggcctgaggaagttaatcatccttcacctgaggtcaaactcacttaaaactgtgcctatccgggtttttcaggactgtagaaacctggatttcctggatctgggatataatcggttgagaagcctgagtcgcaacgctttcgccgggctacttaagttgaaagaattacacctcgagcacaatcaattcagcaagataaatttcgcccacttcccaagactgtttaatctgcgtagtatatatctgcagtggaatagaatacggtctatctcccaaggcctgacctggacctggtccagcctgcacaacctggacctgagtggcaatgacatccaaggcatcgaacctggaacttttaagtgccttcccaacctccaaaagctaaatctggacagcaataagttaactaatattagccaagagaccgtgaacgcctggatcagcctgatctccatcaccctctctgggaacatgtgggagtgctctagatccatatgccccttgttttactggctgaaaaacttcaagggaaacaaggagtctaccatgatttgcgccggcccaaagcatatccagggcgaaaaggtgtcagacgctgtggagacctataacatttgttccgaggtgcaggttgtgaacactgagcgctcccacctcgtcccccagacgccacaaaaacccctgattataccccgtcctacaatttttaaaccggatgtgacccagtctaccttcgaaaccccgagtccaagtcccgggtttcagattccgggtgctgaacaggagtatgagcacgtgtcattccataaaatcatcgcagggtccgtcgccctcttcctttctgttgctatgatcttacttgtgatctacgtttcatggaagcgctaccctgcctccatgaaacaacttcagcaacattctttgatgaagcgcaggcgcaaaaaggcccgggagtctgaacgccagatgaactcacctttacaagaatactatgtggactacaaacctacaaactcagagaccatggacatctccgtcaatgggagtggaccctgtacttatacaatctccggtagcagggaatgcgaggtgtag

SEQ ID NO: 217648 - DNA, 1557 bp, Artificial Sequence
  derived and/or modified sequence
atgggctttcacttaatcacccagctgaaagggatgagtgtggtgctggtactgcttcctactcttcttctggtcatgttgacaggcgctcagcgcgcatgccccaaaaattgccggtgcgatggcaagatcgtctattgtgagtcccatgccttcgctgatataccagagaacatttccgggggaagtcaggggttgtcactgaggtttaactcaatccagaagttaaagagtaaccagtttgccggtctgaatcagctgatctggctatacctggaccacaattatattagctccgtcgacgaagatgcctttcagggcatccggcgactcaaggaactgattttatcaagtaataagatcacctatctgcacaacaaaacgtttcatccagttcccaacctgagaaacctagacctgtcttataacaagttgcaaactcttcagagcgagcaattcaagggacttaggaagctgatcattctccacctccgtagcaattcccttaaaacagtgcccatccgcgtgtttcaagattgcagaaatctggattttctggacctgggttataatcggctcagatcattgtctaggaacgctttcgcagggctgctcaagctgaaggaactgcatctcgaacataaccagttttctaaaataaattttgctcattttccacgattgtttaatctgcgaagcatctatctccagtggaaccgcatacgatccatcagccaaggattaacatggacttggtcctccttgcacaatttagatctgtcaggtaacgacattcagggaatcgaaccaggcacctttaaatgcttgccaaacctgcagaagttaaaccttgacagtaacaagctgactaacatctcccaggagacagtcaatgcttggatctctctgatatcgattactctctccggaaatatgtgggaatgcagccgttccatctgtcccctgttttattggctcaaaaacttcaaagggaataaagagagcacaatgatttgcgcagggccaaagcatattcagggagaaaaagtgagtgacgcggtcgaaacctataatatatgcagtgaagtgcaagttgtgaatacggaacggagtcatctggtaccacaaactccccagaaacctcttatcatccccagaccgactattttcaaaccagacgtcacacaaagtacctttgaaacccctagcccatccccaggatttcagataccgggagcagagcaggagtacgaacatgtgagttttcataaaatcatcgcaggctctgtggccctcttcctctctgtagccatgatattgcttgtgatctacgtgagttggaagcggtacccggcttccatgaaacagctacagcagcactctctcatgaaacgtagaaggaagaaggcgagagagtcagaacgccagatgaattccccacttcaggagtactacgtggactacaagcctactaactctgaaaccatggatattagtgtgaacggatcaggcccatgtacatacacaatcagcggaagcagagagtgtgaggtttag

SEQ ID NO: 217649 - DNA, 1557 bp, Artificial Sequence
  derived and/or modified sequence
atgggcttccacctgatcacccagctgaagggcatgagcgtggtgctggtgctgctgcccaccctgctgctggtgatgctgaccggcgcccagagagcctgccccaagaactgcagatgcgacggcaagatcgtgtactgcgagagccacgccttcgccgacatccccgagaacatcagcggcggcagccagggcctgagcctgagattcaacagcatccagaagctgaagagcaaccagttcgccggcctgaaccagctgatctggctgtacctggaccacaactacatcagcagcgtggacgaggacgccttccagggcatcagaagactgaaggagctgatcctgagcagcaacaagatcacctacctgcacaacaagaccttccaccccgtgcccaacctgagaaacctggacctgagctacaacaagctgcagaccctgcagagcgagcagttcaagggcctgagaaagctgatcatcctgcacctgagaagcaacagcctgaagaccgtgcccatcagagtgttccaggactgcagaaacctggacttcctggacctgggctacaacagactgagaagcctgagcagaaacgccttcgccggcctgctgaagctgaaggagctgcacctggagcacaaccagttcagcaagatcaacttcgcccacttccccagactgttcaacctgagaagcatctacctgcagtggaacagaatcagaagcatcagccagggcctgacctggacctggagcagcctgcacaacctggacctgagcggcaacgacatccagggcatcgagcccggcaccttcaagtgcctgcccaacctgcagaagctgaacctggacagcaacaagctgaccaacatcagccaggagaccgtgaacgcctggatcagcctgatcagcatcaccctgagcggcaacatgtgggagtgcagcagaagcatctgccccctgttctactggctgaagaacttcaagggcaacaaggagagcaccatgatctgcgccggccccaagcacatccagggcgagaaggtgagcgacgccgtggagacctacaacatctgcagcgaggtgcaggtggtgaacaccgagagaagccacctggtgccccagaccccccagaagcccctgatcatccccagacccaccatcttcaagcccgacgtgacccagagcaccttcgagacccccagccccagccccggcttccagatccccggcgccgagcaggagtacgagcacgtgagcttccacaagatcatcgccggcagcgtggccctgttcctgagcgtggccatgatcctgctggtgatctacgtgagctggaagagataccccgccagcatgaagcagctgcagcagcacagcctgatgaagagaagaagaaagaaggccagagagagcgagagacagatgaacagccccctgcaggagtactacgtggactacaagcccaccaacagcgagaccatggacatcagcgtgaacggcagcggcccctgcacctacaccatcagcggcagcagagagtgcgaggtgtag

SEQ ID NO: 217650 - protein, 144 aa, Artificial Sequence
  derived and/or modified sequence
MFLEEKIPSISDLKLAIRRATLKRSFTPVFLGSALKNKGVQPLLDAVLEYLPNPSEVQNYAILNKEDDSKEKTKILMNSSRDNSHPFVGLAFKLEFLSRSFFRLTRQKDHRRPIQRTTLYLIVMSPYDLLGCNSFLDFPCFSRD

SEQ ID NO: 217651 - protein, 751 aa, Artificial Sequence
  derived and/or modified sequence
MRLLGAAAVAALGRGRAPASLGWQRKQVNWKACRWSSSGVIPNEKIRNIGISAHIDSGKTTLTERVLYYTGRIAKMHEVKGKDGVGAVMDSMELERQRGITIQSAATYTMWKDVNINIIDTPGHVDFTIEVERALRVLDGAVLVLCAVGGVQCQTMTVNRQMKRYNVPFLTFINKLDRMGSNPARALQQMRSKLNHNAAFMQIPMGLEGNFKGIVDLIEERAIYFDGDFGQIVRYGEIPAELRAAATDHRQELIECVANSDEQLGEMFLEEKIPSISDLKLAIRRATLKRSFTPVFLGSALKNKGVQPLLDAVLEYLPNPSEVQNYAILNKEDDSKEKTKILMNSSRDNSHPFVGLAFKLEVGRFGQLTYVRSYQGELKKGDTIYNTRTRKKVRLQRLARMHADMMEDVEEVYAGDICALFGIDCASGDTFTDKANSGLSMESIHVPDPVISIAMKPSNKNDLEKFSKGIGRFTREDPTFKVYFDTENKETVISGMGELHLEIYAQRLEREYGCPCITGKPKVAFRETITAPVPFDFTHKKQSGGAGQYGKVIGVLEPLDPEDYTKLEFSDETFGSNIPKQFVPAVEKGFLDACEKGPLSGHKLSGLRFVLQDGAHHMVDSNEISFIRAGEGALKQALANATLCILEPIMAVEVVAPNEFQGQVIAGINRRHGVITGQDGVEDYFTLYADVPLNDMFGYSTELRSCTEGKGEYTMEYSRYQPCLPSTQEDVINKYLEATGQLPVKKGKAKN

SEQ ID NO: 217652 - DNA, 3721 bp, Artificial Sequence
  derived and/or modified sequence
ttctgtatcttcatacagaggtaatatttaaaaaagaagacgaagacaaaaggactcccttccctcacccatatacctatgccgtcttactgggagcaaacacttctttagctccgcaaagcgattgcactttctcttccaagtcggcagacggcgcgcgagcagcgtaggcactgctccgcctccaatccagttgctcttctttcttttcctcactctctttttcctcgcgtcctttgccccggaagtgctcttacaacattggctgccggcgtgactttgaccgcttcccggtgcgttaccggcagctgaacccacccggcgccacgggactttgacgcgtgctctgcgcttgccatgagactcctgggagctgcagccgtcgcggctctggggcgcggaagggcccccgcctccctaggctggcagaggaagcaggttaattggaaggcctgccgatggtcttcatcaggggtgattcctaatgaaaaaatacgaaatattggaatctcagctcacattgattctgggaaaactacattaacagaacgagtcctttactacactggcagaattgcaaagatgcatgaggtgaaaggtaaagatggagttggtgctgtcatggattccatggaactagagagacaaagaggaatcactattcagtcagcagccacttacaccatgtggaaagatgtcaatattaacattatagatactcctgggcatgtggacttcacaatagaagtggaaagggccctgagagtgttggatggtgcagtccttgttctctgtgctgttggaggggtacagtgccagaccatgactgtcaatcgtcagatgaagcgctacaacgttccgtttctaacttttattaacaaattggaccgaatgggctccaacccagccagggccctgcagcaaatgaggtctaaactaaatcataatgcagcgtttatgcagatacccatgggtttggagggtaattttaaaggtattgtagatcttattgaggaacgagccatctattttgatggagactttggtcagattgttcgatatggtgagattccagctgaattaagggcggcggccactgaccaccggcaggagctaattgaatgtgttgccaattcagatgaacagcttggtgagatgtttctggaagaaaaaatcccctcgatttctgatttaaagctagcaattcgaagagctactctgaaaagatcatttactcctgtatttttgggaagcgccttgaagaacaaaggagttcagcctcttttagatgctgttttagaatacctcccaaatccatctgaagtccagaactatgctattctcaataaagaggatgactcaaaagagaaaaccaaaatcctaatgaactccagtagagacaattcccacccatttgtaggcctggcttttaaactggaggtaggtcgatttggacaattaacttatgttcgcagttatcagggagagctaaagaagggtgacaccatctataacacaaggacaagaaagaaagtacggttgcaacggctggctcgcatgcatgccgacatgatggaggatgttgaggaagtatatgccggagacatctgtgcattgtttggcattgactgtgctagtggagacacattcacagacaaagccaacagcggcctttctatggagtcaattcatgttcctgatcctgtcatttcaatagcaatgaagccttctaacaagaacgatctggaaaaattttcaaaaggtattggcaggtttacaagagaagatcccacatttaaagtatactttgacactgagaacaaagagacagttatatctggaatgggagaattacacctggaaatctatgctcagaggctggaaagagagtatggctgtccttgtatcacaggaaagccaaaagttgcctttcgagagaccattactgcccctgtcccgtttgactttacacataaaaaacaatcaggtggtgcaggccagtatggaaaagtaataggtgtcctggagcctctggacccagaggactacactaaattggaattttcagatgaaacattcggatcaaatattccaaagcagtttgtgcctgctgtagaaaaggggtttttagatgcctgcgagaagggccctctttctggtcacaagctctctgggctccggtttgtcctgcaagatggagcacaccacatggttgattctaatgaaatctctttcatccgagcaggagaaggtgctcttaaacaagccttggcaaatgcaacattatgtattcttgaacctattatggctgtggaagttgtagctccaaatgaatttcagggacaagtaattgcaggaattaaccgacgccatggggtaatcactgggcaagatggagttgaggactattttacactgtatgcagatgtccctctaaatgatatgtttggttattccactgaacttaggtcatgcacagagggaaagggagaatacacaatggagtatagcaggtatcagccatgtttaccatccacacaagaagacgtcattaataagtatttggaagctacaggtcaacttcctgttaaaaaaggaaaagccaagaactaactttgcttactgtgagttgactgactctaattgaatctgcgtggttttgatactttgatggattccagtggaataaattcaggctgctgaaacaagaaattctgagcccaggaagcgggctcttctttcttcaaaagaagcccttcttgttcatattcaggagcttctgttatattcaaaggtaattctatgtctatctcaactctattgattggttttatagttcattgaaaatcctcaaataaaatataattattactgaaatatgtttaatatttaaggggaaaagagactaatttcagttatacttttaagcttagaatgtatgttcatttccaaattttgtatcataagagttttcaacatagagaaaagctgaaaaaatgcaaagaataaccacatactttccatctaccttcctttgttaacgggttgtttatcatataataatttgttttgtcatatttgctttcactgtctattatctgtttaagtctcataactctatttttagtttgctgaagacttgaaagtgaatcgcatatatcatgacacttcttggagtgtcattaatgggcaggcttttctgttgaagagtggattccgtatgttcttcatagagagtgtttttcagattcttcattgggatattaaaatattagccaaatttctctctgttttatatatgtctgtttatttcagtttgtggtttctgcaaatttgtaactgcctctgttttaggagtataagtattacttccttgtggtctattgtgaagtaaaaagtagacccttgcatatactattcttgtttgtgttcatcttaatgtttttgtacagctaaatcaaatgtaatttatagagttagtttcatcaacctaatgaatgctagttaaatttgaattccttggaatttatcgtatattgtattcactgagattatgaagggacaaatgttaatcttttgtttccagaaaaagttgggctttcccaagcagttctattacccggttcagaattgcttcatccaaaaatcatctgatggtatagatggatcctagtccttttcattacctgatggtagaaataaaataattgattttaaattc

SEQ ID NO: 217653 - DNA, 2256 bp, Artificial Sequence
  derived and/or modified sequence
atgagactactgggcgccgcggccgtagctgcactgggtcgcgggagggctccggcgagcttaggttggcagaggaagcaagtgaactggaaagcctgtcgctggtccagcagcggggtgatccctaacgagaaaatccgaaacatcggcatttcagctcatattgatagcggcaagaccactttaactgagcgggtcttgtactatacgggcagaatcgcaaagatgcacgaagttaagggaaaggacggcgtcggcgccgtgatggactcaatggagttggagaggcagagaggaatcacaatccagtccgcagcgacatacacaatgtggaaagacgtgaatatcaatatcatcgatacccctgggcatgtagacttcactattgaagtcgagcgagctttacgggtattggacggcgccgtcctggtgttgtgtgccgtcggaggcgtgcagtgtcagacaatgacagtgaaccgccagatgaagaggtataatgtgcccttcctgacgttcataaataagctggacagaatgggttccaatcccgcacgggcactgcagcagatgcgctcaaaattaaatcataacgccgcttttatgcaaatcccaatgggactagaagggaattttaaagggattgtggacctgatcgaggaacgggcaatctactttgatggagacttcggccagatcgtccgctacggcgagatacccgcagagctgcgtgccgctgccacagaccatcgacaagagctgatagaatgcgtggcaaattctgacgagcagttgggcgaaatgtttctggaggaaaagatccctagcatctctgatctcaagctggctattcgtagggctacacttaaaaggtcgtttacacctgtgttcctcggttcggctctgaagaataaaggcgtccaaccactgttggatgccgtgctcgaatacttaccaaaccctagcgaggtacagaactatgccatactaaataaggaagatgatagtaaggagaagacaaaaatcctgatgaattcttccagggacaacagccatccctttgttggactggccttcaagctggaggtcggcagattcggccagctcacctatgttcgttcctaccagggggaactgaagaagggcgataccatctacaacacgcgcacacgcaaaaaggttcggttacaacgtctggccaggatgcacgctgatatgatggaggatgttgaagaggtgtacgcaggagatatctgcgcattgtttggcatcgactgcgcgagcggtgatacgtttacagataaggccaattcaggcctatcaatggagtccatacatgtgcccgatccagtgatttccatcgcaatgaagccgtccaataagaacgatcttgagaagttcagcaagggtattggccgctttaccagagaggacccaaccttcaaggtgtatttcgatactgagaataaggaaacggtcatttcaggtatgggcgagttgcacctcgagatctatgcacagcgcctcgagagagaatatggctgcccatgtatcactggaaaacccaaagtagcatttagagagacaatcaccgcacctgttcctttcgactttacacacaagaaacaatcggggggagccgggcagtacggtaaagtcattggagtgttggagcccctggatcctgaagattacactaaactggaattcagtgatgaaacgtttgggtcaaacattcctaaacagttcgtgcctgccgtggagaaaggatttctcgacgcctgcgagaaaggccctctgagcggacataagcttagcgggcttaggttcgttctgcaggacggagcccaccatatggtggactccaatgaaatttccttcattagagctggagagggggcccttaagcaggcactggcgaatgctaccctttgcattctagaacccatcatggctgtggaagtggtcgccccgaatgaattccaagggcaggtaatagcgggtattaataggaggcacggcgtaattactggtcaagatggcgtcgaagactacttcacactatacgccgacgtgcccctcaatgacatgttcgggtatagtaccgaactccggagctgcacagagggtaagggcgagtacactatggaatacagtcggtatcagccctgcctgcccagtacacaggaggatgttattaacaaatacctcgaggccacaggccaattgccggtcaagaaaggcaaagctaaaaactag

SEQ ID NO: 217654 - DNA, 2256 bp, Artificial Sequence
  derived and/or modified sequence
atgaggctgctgggcgctgctgctgtggccgccctgggccggggccgggccccagccagcctgggctggcagaggaagcaggtgaactggaaggcctgccgctggagcagcagcggggtcatccccaatgagaagatcagaaatattggcatcagcgcccacattgattctgggaagaccaccctgacagagcgggtgctgtactacacaggaagaattgccaagatgcatgaggtgaagggcaaggatggagtgggcgctgtgatggacagcatggagctggagcggcagaggggcatcaccatccagagcgctgccacctacaccatgtggaaggatgtgaacatcaacatcatcgacaccccaggccacgtggacttcaccatcgaggtggagcgggccctgcgggtgctggatggagctgtgctggtgctgtgtgctgtgggcggcgtgcagtgccagaccatgacagtgaaccggcagatgaagcgctacaacgtgcccttcctgaccttcatcaacaagctggacaggatgggcagcaacccagcccgggccctgcagcagatgaggagcaagctgaaccacaatgctgccttcatgcagatccccatgggcctggagggcaacttcaagggcatcgtggacctgattgaggagcgggccatctactttgatggagactttggccagatcgtgcgctatggagagatcccagctgagctgcgggctgctgccacagaccaccggcaggagctgattgaatgtgtggccaacagtgatgagcagctgggggagatgttcctggaggagaagatccccagcatcagtgacctgaagctggccatccggcgggccaccctgaagaggagcttcacccctgtgttcctgggcagcgccctgaagaacaagggcgtgcagcccctgctggatgctgtgctggagtacctgcccaaccccagcgaggtgcagaactatgccatcctgaacaaggaggatgacagcaaggagaagaccaagatcctgatgaacagcagccgggacaacagccacccctttgtgggcctggccttcaagctggaggtgggccgcttcggccagctgacctacgtgcgcagctaccagggcgagctgaagaagggggacaccatctacaacaccaggaccaggaagaaggtgcggctgcagaggctggccaggatgcatgctgacatgatggaggatgtggaggaggtgtatgctggggacatctgtgccctgtttggaattgactgtgccagcggggacaccttcacagacaaggccaacagcggcctgtccatggagagcatccacgtgcctgaccctgtgatcagcatcgccatgaagcccagcaacaagaatgacctggagaagttcagcaagggcatcggccgcttcacccgggaggaccccaccttcaaggtgtactttgacacagagaacaaggagaccgtcatcagcggcatgggagagctgcacctggagatctatgcccagaggctggagcgggagtatggctgcccctgcatcaccgggaagcccaaggtggccttccgggagaccatcacagcccctgtgccctttgacttcacccacaagaagcagagcggcggggccggccagtatggcaaggtgattggagtgctggagcccctggaccctgaggactacaccaagctggagttcagtgatgagaccttcggcagcaacatccccaagcagtttgtgcctgctgtggagaagggcttcctggatgcctgtgagaagggccccctgagcggccacaagctgagcggcctgcgctttgtgctgcaggatggagcccaccacatggtggacagcaatgagatctccttcatccgggccggggagggcgccctgaagcaggccctggccaatgccaccctgtgcatcctggagcccatcatggctgtggaggtggtggccccaaatgagttccagggccaggtgattgctggcatcaacagaagacatggagtcatcaccggccaggatggagtggaggactacttcaccctgtatgcagatgtgcccctgaatgacatgtttggctacagcacagagctgcggagctgcacagagggcaagggggagtacaccatggagtacagccgctaccagccctgcctgcccagcacccaggaggatgtgatcaacaagtacctggaggccaccggccagctgcctgtgaagaagggcaaggccaagaactag

SEQ ID NO: 217655 - DNA, 2256 bp, Artificial Sequence
  derived and/or modified sequence
atgcggctgctgggcgccgccgccgtggccgccctgggccggggccgagctccagcctccctgggctggcaacgcaagcaggtgaattggaaggcctgccggtggtcctcttcaggagtcattcccaatgaaaaaatccggaatatcggcattagtgctcatatagatagcggcaagaccacactgacagagcgggtgctgtactacactgggcggatcgccaagatgcatgaagtcaaggggaaagacggagtcggggctgttatggactctatggagcttgagcgtcagaggggaatcactatccaatctgcagctacttacacaatgtggaaggacgtcaacattaacatcatcgatacccccgggcacgtggacttcactatagaggtggagcgtgcacttagggtcctggacggcgccgtcttggttttatgcgccgttgggggggtgcagtgccagacaatgacagtaaatcggcaaatgaagaggtacaatgtcccttttctgacttttattaacaagttggaccgcatggggtctaacccagcgcgcgctcttcaacagatgcgcagcaaactgaatcataatgctgcctttatgcagattccgatgggactcgagggcaatttcaaaggaatcgtcgatctgatagaggaacgagcgatttatttcgatggagacttcggacaaattgttcgttacggagaaattcccgccgagctgagagctgccgcgactgaccaccggcaggagctgatcgagtgcgtggccaacagcgatgagcagctgggggagatgttcctcgaagaaaaaattccctccataagtgacctaaaactggcaatccggagagcaacattgaagcgcagtttcactcccgtgttcctcggctctgctcttaagaataagggagtgcagccactgctcgatgcagtgcttgagtatctcccaaatcccagcgaagtacaaaactacgccattctgaacaaagaagatgactctaaggagaagacgaagatcctgatgaactctagccgggataactcacatccttttgtaggactggcgtttaagctcgaggtcggcagatttggtcagcttacatatgtacggagctaccaaggagagctgaagaaaggagacactatttataacacccgaacccgcaaaaaggttagactgcagcgtctggcgaggatgcacgcagatatgatggaggacgtggaggaagtgtacgctggcgacatctgcgcactgttcggcattgattgtgccagcggagatacattcaccgacaaagctaacagcggccttagtatggaaagtattcacgttccagatccggtaatctcaatagcaatgaagccctcaaataaaaacgacctggaaaaattctctaagggtatcggtcgtttcacccgggaagacccaacattcaaggtttacttcgatactgagaacaaagaaactgtaattagcggaatgggcgagcttcatctcgaaatatatgcgcagaggttggaacgagagtacggctgcccatgtattaccggaaagcctaaagttgcattcagggagacaataactgctccagtcccattcgattttacgcataaaaaacagagcggcggtgccggccagtacggcaaggtcattggggtgctggaacccctggatcctgaggattacaccaagttagaattttctgacgagacctttggatccaatatccctaaacagttcgtcccggccgtagagaagggctttctggacgcgtgcgagaaggggcctctgtccggacacaaattatcgggactgcgattcgttcttcaagatggtgcccaccacatggtggactccaatgaaatatcatttatccgcgccggcgaaggcgctctcaagcaggcactggcaaacgcaaccctttgcatcctggagcccattatggccgtcgaggttgtggcgcctaatgagtttcagggacaagttatcgctggcattaatcgtcggcatggcgtcatcaccgggcaggacggtgtagaggattacttcactttatatgccgacgtaccccttaacgacatgtttgggtactcaaccgagctcagatcctgcacagagggaaaaggtgagtatacgatggaatactctagatatcagccctgtctcccctccactcaggaggacgtgatcaataagtacctggaagcaaccgggcagctgccggtcaagaaaggaaaagccaagaattag

SEQ ID NO: 217656 - DNA, 2256 bp, Artificial Sequence
  derived and/or modified sequence
atgcggctgcttggcgcagctgcagttgctgccttggggaggggccgtgcccctgcctctcttggctggcaacggaagcaagtcaactggaaagcctgtaggtggtcttctagcggggtgattcccaatgaaaaaatcagaaacatcggtatttctgcgcacatagatagtgggaagacaacattgacagagagagtcctctactacacaggcagaattgccaagatgcatgaagtaaaggggaaagatggagtcggggctgttatggactccatggagctcgaaaggcagcggggaataacaatacagagtgccgctacgtacactatgtggaaagatgtgaatatcaacatcattgatacccccggtcatgttgatttcacaattgaggtcgaaagggcattgcgcgttttggatggcgctgttctggtcctctgcgccgtggggggagtccagtgtcaaacaatgacagtcaatcgccagatgaaacgatataatgtgccatttcttacttttattaacaagttggatagaatgggaagcaatccggctcgggctctccagcagatgagaagtaaattgaaccataatgccgcatttatgcaaatacccatgggcctggaagggaacttcaagggcatcgtcgacttgattgaagagagagccatttacttcgacggtgattttggccaaattgtgcgttacggggagattcctgccgagctgcgggctgccgctactgatcacaggcaggaactcatagaatgtgtcgccaacagcgatgagcaactcggtgagatgttcctcgaagagaagattccctctatttccgatttgaagctggccatccgcagagccacactcaaacgttcctttacaccggtgtttctggggtccgcccttaaaaataagggggtccaacctttactggacgcggtgttagagtatctgcccaacccatccgaggtacagaactacgctatcctgaataaagaagacgactctaaagaaaagaccaagattctcatgaattctagcagggacaacagtcacccatttgtggggttggcttttaaactggaagtggggcgattcggccaactcacctacgtgcggtcctatcagggcgagctgaaaaagggcgacactatatataatacgcgcaccaggaagaaggtccggcttcagcgcttagcacggatgcacgccgacatgatggaggatgtggaagaagtgtatgcgggtgatatctgtgctttgttcggcattgactgtgcctcaggagacaccttcaccgataaggccaatagcgggctcagtatggaaagtattcacgtacctgatccagtcattagcatcgccatgaagccttctaacaagaacgacttggagaagttctcaaagggcatcggcaggtttacgagagaagacccgacgttcaaggtctacttcgacactgagaacaaggagacagtcatttccggtatgggggaactgcacctggagatctacgcacagcggctggaacgtgaatatggatgcccatgtataacggggaaaccgaaggttgcattccgggaaactattaccgccccagtgccctttgatttcacccacaaaaagcaatccggcggtgccggtcaatatggtaaggtgatcggcgtgctggagccactggatccagaggactatacaaaactggagttctccgatgagacatttggctcaaacattccaaaacagttcgtgcccgcagtggagaagggctttctggacgcctgcgagaagggcccactgagcgggcataagctgagtggtctgagattcgtccttcaagatggagctcaccatatggtggattccaacgaaatttcattcatcagggctggtgaaggcgcactgaagcaagccctcgctaacgctaccctgtgcatccttgaacccattatggccgtcgaagtggttgcccctaacgaatttcaaggccaggtgatcgcaggcattaaccgaagacacggggtgatcacaggtcaagatggggtcgaggactatttcacattatacgccgacgtacccctgaatgatatgttcggttattccacggaactcagaagttgcaccgaggggaagggcgagtacacgatggagtattctcggtaccagccctgtctcccaagcacacaggaggacgtgatcaataagtatctcgaagcgaccggccaactccctgtcaaaaaaggtaaggctaagaactag

SEQ ID NO: 217657 - DNA, 2256 bp, Artificial Sequence
  derived and/or modified sequence
atgagactgctgggcgccgccgccgtggccgccctgggcagaggcagagcccccgccagcctgggctggcagagaaagcaggtgaactggaaggcctgcagatggagcagcagcggcgtgatccccaacgagaagatcagaaacatcggcatcagcgcccacatcgacagcggcaagaccaccctgaccgagagagtgctgtactacaccggcagaatcgccaagatgcacgaggtgaagggcaaggacggcgtgggcgccgtgatggacagcatggagctggagagacagagaggcatcaccatccagagcgccgccacctacaccatgtggaaggacgtgaacatcaacatcatcgacacccccggccacgtggacttcaccatcgaggtggagagagccctgagagtgctggacggcgccgtgctggtgctgtgcgccgtgggcggcgtgcagtgccagaccatgaccgtgaacagacagatgaagagatacaacgtgcccttcctgaccttcatcaacaagctggacagaatgggcagcaaccccgccagagccctgcagcagatgagaagcaagctgaaccacaacgccgccttcatgcagatccccatgggcctggagggcaacttcaagggcatcgtggacctgatcgaggagagagccatctacttcgacggcgacttcggccagatcgtgagatacggcgagatccccgccgagctgagagccgccgccaccgaccacagacaggagctgatcgagtgcgtggccaacagcgacgagcagctgggcgagatgttcctggaggagaagatccccagcatcagcgacctgaagctggccatcagaagagccaccctgaagagaagcttcacccccgtgttcctgggcagcgccctgaagaacaagggcgtgcagcccctgctggacgccgtgctggagtacctgcccaaccccagcgaggtgcagaactacgccatcctgaacaaggaggacgacagcaaggagaagaccaagatcctgatgaacagcagcagagacaacagccaccccttcgtgggcctggccttcaagctggaggtgggcagattcggccagctgacctacgtgagaagctaccagggcgagctgaagaagggcgacaccatctacaacaccagaaccagaaagaaggtgagactgcagagactggccagaatgcacgccgacatgatggaggacgtggaggaggtgtacgccggcgacatctgcgccctgttcggcatcgactgcgccagcggcgacaccttcaccgacaaggccaacagcggcctgagcatggagagcatccacgtgcccgaccccgtgatcagcatcgccatgaagcccagcaacaagaacgacctggagaagttcagcaagggcatcggcagattcaccagagaggaccccaccttcaaggtgtacttcgacaccgagaacaaggagaccgtgatcagcggcatgggcgagctgcacctggagatctacgcccagagactggagagagagtacggctgcccctgcatcaccggcaagcccaaggtggccttcagagagaccatcaccgcccccgtgcccttcgacttcacccacaagaagcagagcggcggcgccggccagtacggcaaggtgatcggcgtgctggagcccctggaccccgaggactacaccaagctggagttcagcgacgagaccttcggcagcaacatccccaagcagttcgtgcccgccgtggagaagggcttcctggacgcctgcgagaagggccccctgagcggccacaagctgagcggcctgagattcgtgctgcaggacggcgcccaccacatggtggacagcaacgagatcagcttcatcagagccggcgagggcgccctgaagcaggccctggccaacgccaccctgtgcatcctggagcccatcatggccgtggaggtggtggcccccaacgagttccagggccaggtgatcgccggcatcaacagaagacacggcgtgatcaccggccaggacggcgtggaggactacttcaccctgtacgccgacgtgcccctgaacgacatgttcggctacagcaccgagctgagaagctgcaccgagggcaagggcgagtacaccatggagtacagcagataccagccctgcctgcccagcacccaggaggacgtgatcaacaagtacctggaggccaccggccagctgcccgtgaagaagggcaaggccaagaactag

SEQ ID NO: 217658 - protein, 520 aa, Artificial Sequence
  derived and/or modified sequence
MGPTRKPNVCSRLSRRALGCFSRDAGVVQRTNLGILRALVCQESTKFKNVWTTHSRSPIAYERGRIYFDNYRRCVSSVASEPRKLYEMPKCSKSEKIEDALLWECPVGDILPNSSDYKSSLIALTAHNWLLRISATTGKILEKIYLAPYCKFRYLSWDTPQEVIAVKSAQNRGSAVARQAGIQQHVLLYLAVFRVLPFSLVGILEINKKIFGNVTDATLSHGILIVMYSSGLVRLYSFQTIAEQFMQQKLDLGCACRWGGTTGTVGEAPFGIPCNIKITDMPPLLFEVSSLENAFQIGGHPWHYIVTPNKKKQKGVFHICALKDNSLAKNGIQEMDCCSLESDWIYFHPDASGRIIHVGPNQVKVLKLTEIENNSSQHQISEDFVILANRENHKNENVLTVTASGRVVKKSFNLLDDDPEQETFKIVDYEDELDLLSVVAVTQIDAEGKAHLDFHCNEYGTLLKSIPLVESWDVTYSHEVYFDRDLVLHIEQKPNRVFSCYVYQMICDTGEEEETINRSC

SEQ ID NO: 217659 - protein, 270 aa, Artificial Sequence
  derived and/or modified sequence
RHSTTCFAVPCSVPSSTFFTCRDSRDQQKDMPPLLFEVSSLENAFQIGGHPWHYIVTPNKKKQKGVFHICALKDNSLAKNGIQEMDCCSLESDWIYFHPDASGRIIHVGPNQVKVLKLTEIENNSSQHQISEDFVILANRENHKNENVLTVTASGRVVKKSFNLLDDDPEQETFKIVDYEDELDLLSVVAVTQIDAEGKAHLDFHCNEYGTLLKSIPLVESWDVTYSHEVYFDRDLVLHIEQKPNRVFSCYVYQMICDTGEEEETINRSC

SEQ ID NO: 217660 - DNA, 1563 bp, Artificial Sequence
  derived and/or modified sequence
atgggccccaccagaaagcccaacgtgtgcagcagactgagcagaagagccctgggctgcttcagcagagacgccggcgtggtgcagagaaccaacctgggcatcctgagagccctggtgtgccaggagagcaccaagttcaagaacgtgtggaccacccacagcagaagccccatcgcctacgagagaggcagaatctacttcgacaactacagaagatgcgtgagcagcgtggccagcgagcccagaaagctgtacgagatgcccaagtgcagcaagagcgagaagatcgaggacgccctgctgtgggagtgccccgtgggcgacatcctgcccaacagcagcgactacaagagcagcctgatcgccctgaccgcccacaactggctgctgagaatcagcgccaccaccggcaagatcctggagaagatctacctggccccctactgcaagttcagatacctgagctgggacaccccccaggaggtgatcgccgtgaagagcgcccagaacagaggcagcgccgtggccagacaggccggcatccagcagcacgtgctgctgtacctggccgtgttcagagtgctgcccttcagcctggtgggcatcctggagatcaacaagaagatcttcggcaacgtgaccgacgccaccctgagccacggcatcctgatcgtgatgtacagcagcggcctggtgagactgtacagcttccagaccatcgccgagcagttcatgcagcagaagctggacctgggctgcgcctgcagatggggcggcaccaccggcaccgtgggcgaggcccccttcggcatcccctgcaacatcaagatcaccgacatgccccccctgctgttcgaggtgagcagcctggagaacgccttccagatcggcggccacccctggcactacatcgtgacccccaacaagaagaagcagaagggcgtgttccacatctgcgccctgaaggacaacagcctggccaagaacggcatccaggagatggactgctgcagcctggagagcgactggatctacttccaccccgacgccagcggcagaatcatccacgtgggccccaaccaggtgaaggtgctgaagctgaccgagatcgagaacaacagcagccagcaccagatcagcgaggacttcgtgatcctggccaacagagagaaccacaagaacgagaacgtgctgaccgtgaccgccagcggcagagtggtgaagaagagcttcaacctgctggacgacgaccccgagcaggagaccttcaagatcgtggactacgaggacgagctggacctgctgagcgtggtggccgtgacccagatcgacgccgagggcaaggcccacctggacttccactgcaacgagtacggcaccctgctgaagagcatccccctggtggagagctgggacgtgacctacagccacgaggtgtacttcgacagagacctggtgctgcacatcgagcagaagcccaacagagtgttcagctgctacgtgtaccagatgatctgcgacaccggcgaggaggaggagaccatcaacagaagctgctag

SEQ ID NO: 217661 - DNA, 5828 bp, Artificial Sequence
  derived and/or modified sequence
actaggaactacatttcccggtgagagagcggctccggccggccgcgcggtaccggagcgtcgcactgtcagcggccagagagcctggggcagatcgaaaagggagtgcttcttcccttctctccgcgctctggcggtgcaagcggctctgctttccctcgccccgccgtcgggtgctccctgcccgcctccccgtgtcagctttccctgggccccgccgggaaagtctgggcctcgaaattcgaaggcagcggcggctgcccagcacgggagtgtggggcgcgccactcggcggcccagcctacccagggcccggcccgcgcctccatgggcccgacccggaagcccaacgtgtgcagccggctgagtcgccgggcgctgggctgcttctcgcgcgacgcaggcgtggtgcagaggaccaacctgggcatcctgcgggcgctggtgtgccaggaaagtactaaatttaagaatgtctggacaactcattccaggtcacctatagcctatgagagaggaagaatatattttgacaattatcggcgctgtgtcagcagtgttgcatctgagccaagaaaactttatgaaatgccaaaatgttccaaatcagaaaaaatagaggatgctttattatgggaatgcccagtgggagatatacttcccaattcatcagattataagtcctcactcatagcactgactgctcataattggctacttcgtatatcagcaactacgggaaaaatccttgagaaaatatatcttgcaccttattgcaaattcagatacttgagctgggacactcctcaagaagtcattgcagttaagtcagctcagaacagaggctcagcagtggcccggcaggcaggcattcaacaacatgttttgctgtaccttgcagtgttccgagttctacctttttcacttgtagggattctagagatcaacaaaaagatttttgggaacgttacagatgctaccttgtctcatggaatactgattgtgatgtacagctcaggactggtcagactctatagcttccaaaccatcgctgaacagttcatgcaacagaaacttgacttagggtgtgcatgcagatggggtgggactactggaactgtaggagaggctccttttggcattccttgtaatattaaaatcacagacatgccaccactgctctttgaggtgtcatccctggagaatgcttttcagattggaggccatccttggcactacatcgtcacacctaataagaagaaacagaaaggagttttccatatttgtgccctaaaagacaattccctggcaaaaaatgggatccaagaaatggattgttgttctctagaatctgactggatctatttccatcctgatgcttctggtagaataatacatgttggtccaaatcaagtcaaagttttgaagctaactgaaatagaaaataatagttctcagcatcagatctctgaagattttgtcattttggccaacagggagaaccataaaaatgaaaatgtactcactgttacagcttctggacgggtggtaaaaaaaagttttaaccttctggatgatgacccagaacaagagactttcaaaattgtggactatgaagatgagttagatttgctttctgtggtagctgttactcaaatagatgctgaaggaaaagctcacctggatttccactgtaatgaatatggaactttacttaaaagcattccactagtggagtcatgggatgtgacatatagccatgaagtctactttgacagagacttggtgctacacatagagcagaaacccaacagagtcttcagctgctatgtttaccagatgatatgtgacactggggaagaagaagaaaccataaacagaagctgttaaaaagagtgagataattgtaacctaagagacttttagccaaacaccccagcagctgcgtccaatccattttattatctgcatggcacattctccagtattttccaaaaaagtcttgtgttgacttcagatgactatgacttcttttttaaactcttgctgtaaaagatggtgaggacttcattttttttaaaggttttttagaatactgttccaagaagtttagtgttttgcagctttgagctaggtggtaatgcaaatataaaatgctgggaacagaaaaggacaggttaattccaattgttgaggagttaagtcattgatggggtgggtcattgatgagttcttaaaggatggtatggaattttgtttgttaaggctaggaaagacagggagagacaaaagtaaacatgcagaaagaaatcttatatcctctataccaaactttgcttaaggatgagaaatgagatgtgttatgtgagaacattattttgagcccaaaatgtgtcatcacagtttttaaaaatcttatatatgtatttatatgtgtttcgtatttgtatatagtatcaggaattggttctagttcccaaattatcttttcttccttggttttgttctcttggcttgatgttcacattgaatatttgtgtttctatataggctaatgtaaaagattccaagcaaaccttaagtgaaattgttttctgatttgcatcctgtttagctcttaatgtatctaaggatgttctcatctcaccattctactcatttagtgagttttctgatcttgtttaggcaatatttgcatacttatgcaataagataaaggtacccttgcctgcagtagttctgtttcctgtagaaaagtggataaagagtcccagaagaagttcttactagcttgggagttacctgattaaccagagaaaatttttggcttacttatggaacaagcattatttcttctttgttaggaaagatctaaatatggtccttgacttttaataatcattctttagaatgttaaataaaggcaacccaagtaaagggagaaaatgtttctttgtgcttcctgtttgagaaattcagttgcttccatttcgcatgttctgcacatttatccgatgtaacctcaaaagaataactggtaataagggaaggaaacagcagcaacaatcattgctgattcaagtttaaggttaaaatatggaatttttagcttggatgatttatattaaaatctttccattttttttttcagttttggcttgatgccatgttaagaatgatgtgaattcttcccagttctgccctggtgctagacattgccccatactttcaattagacactagctgtatctaaatagtcccactcagtaaacttacatcttgaaaaacaagaccagtaagaggccagtgaaagtactaaagaaagaaaccaatgttgtgtgagtttcaaagcagctgcaatgctgtgtaaaagtagagtgttcattctccatttccaagagtgtttcagaataggatgtcttaagacttcagtcatgtcagagatttttttttttaggtgattattgagtttctccttctcctttaagtcatcaccttccttttatgaaatgatagtaaggaactcgtctattctgaaaggcatttgagaaatagctgaattcctggctgcttttttgctgggggtagatggtggaatacttctggtctagatataacttaccactaagaaacccccagtatgtcaccactgcctaaatctaactagaccagggtccaaatgccatccaggccaggcaggaaatatacctcatgtgaaagacagtaaggagttgtgggcagtgtaacaaacaggagagctatgccccaactaaaaggagcagctgctactgcttagtttcagccagttgcaacagtatgtgggaatgtaggctgcatggttgttaacaagatagatggtaaaaagatgccagaagatacagaagatagcaaagaatgtggggaatttggataccacacatagcgagagacaatgaagcatgcttcccagctcgccagagtgtcacacagctgctcattctgccacctgccagacattaatgtcttcctgccctacctaaaccccctctttacctgatattttaattcgagactctagctacatgcccacctacttaacaggtactagtgacaggtacaaaacattatgggtaacaattctgagtgtttaatgcaagcccaggtgaagcagggtagcttccatcagcaggtacagacgttacgctgaaaagaggtgcattctgcattgcactcctggatctaagtttctgcattctcagagcatcaatgcagcaagcttattgttcctcaattttttacaatatttatcacaactctgggagaaaacaaaacaaatcctatcctatttactatttgtgctacctagtgaggagataccgctctgtttagacaaattaaggcacttcacattcttccaccaattgaaagttttgtatcttacagttctttttttaaataatatatttattgagcactttctatctactagtcactgtgatacagtataagtaaagtgggttgtctcatttaatattcagaataaccacatgaagtatgaactgccattatctttcccctttgtacaaatgaggaaagtgaggctcacagaagttaattggcccagggtcccacaactagtcagtgcagaggtgggaaacataaccagatttgttcggcatgaacttgtgccaaatttcctccaaagttctcaaaaggcaaggcatgttattttatcccaatttagcataccaacaactataatactagatatgtaggaaagtgcttaataatcgttttttactgatgattcagtgtctaaattttgaacaaatttgggtaagatacaagtcacacataaattgacagaaaatgtagttcttcattcaatggttagcagtcattaaaaggtactttccctttgtttgtggtgataatcagtattagtagttttcatattatttggcttccatattaatcatttttatattttcttctccttcttaccatgtttacttatatcatccatcttttagaatcccagggagctaatttctggtccctgtgttgctatcaaatctgtatcttgcagaaagaataatttatttcaaacaagggacatacaatagaaagataagacctactgaggtctttttcccatcattttattatgaaaaatgttcaaacatacagtaaaattgaaagaattttatagtaaatactgaccacggggattctacatcttactctacttgttttattattttcctatccagcgtactttttgatggatttcaaaataaattgcagttgctgatatacttccccctagtacttcaactgcagattattaactagagtttagtatttatttagtttttaaatttttttgatttaagatttacctgcaataaaatgtacaaatcttaagtataaatttactgagttcttgcagacatatacacctgtgtaacccaaaccctttccaaaatttagaccattgcaatcatcttcagaaagtttcctaaatccctctcccagtctatcccctccccacccctcaggtataactactgttctcattcttttatatcaaaggttaaatttacctgttctaaacttcatatgagtgaaattatacaaaatgtaatgcttctttcacttagcataatgtttttgagatttattcatgttgttgcatgtgtcagtgattcatttctttttattgctgagtattctttcgtatgaatatatcacagtttgtttttttatctttctgttgatggacactgggctctttctgcttgttttttactgttatgaataaagctgctatgaacattcttagacaa

SEQ ID NO: 217662 - DNA, 1563 bp, Artificial Sequence
  derived and/or modified sequence
atgggtcctaccagaaaacccaatgtctgctcgcgactttccaggagagctctgggctgtttttcgcgcgacgccggtgtcgtgcagcgaaccaacttgggtatcctgagagccctggtgtgtcaggaatcaaccaaatttaagaacgtgtggaccacccattcccgcagccctatcgcttatgagagaggccgaatttatttcgataattatcgccgttgtgtgagctccgtggcgtccgaaccacgcaagctgtatgagatgccaaaatgctcaaagtccgagaagatcgaagacgctcttctatgggaatgtcccgtcggagatatattgcccaattctagcgactacaaaagcagtttgattgcactgactgcccacaactggctcttgcgaatctctgccactaccggaaagattctggaaaagatatacctcgctccgtattgtaagttccgatacctcagttgggacacaccccaggaggtgattgcagtaaaaagcgctcagaaccggggctcggcagtcgcaagacaggcgggaatacaacagcacgtgctgctttacctcgcggtgttccgggttcttcccttctcgctggtgggaatactggaaatcaacaagaagatttttggaaacgtaacagacgctactctgtcccacggcatcctgatcgttatgtactcttccggtttagtccgactgtattctttccaaacaatagcggagcagttcatgcagcaaaagcttgatctcggctgtgcatgccgatggggcggcacaaccgggaccgtcggcgaagcacctttcggtatcccctgcaacatcaaaattactgatatgccccctttattgtttgaggtctcctccctcgaaaacgcgtttcaaattggcgggcacccctggcactatatcgttacgccaaacaagaaaaagcagaagggcgtcttccacatctgcgccctgaaagataattcactggctaaaaatggcatccaggagatggactgttgttctctggaaagcgattggatttacttccaccctgacgcatccggtcggattattcacgtgggccctaatcaggtgaaagtgctcaaacttacagaaatagagaacaattcatctcagcatcagattagtgaggatttcgtcattcttgcgaaccgggagaaccacaagaacgaaaatgtcttaaccgtcaccgcgtccggacgcgtggtaaagaagtcattcaacctgcttgacgacgatcccgagcaggagaccttcaaaatcgttgactatgaagatgagcttgacctactgtctgtagtcgctgttactcagatcgacgctgaaggtaaagcccacctggacttccactgtaatgaatacggaaccctcctgaagagcattcccttagtggagtcctgggatgtcacttacagtcacgaggtgtatttcgatagagacttagtgcttcatattgagcagaaacccaatagggttttttcctgctacgtctatcagatgatctgtgatacaggcgaggaggaagaaacaattaatagatcgtgctag

SEQ ID NO: 217663 - DNA, 1563 bp, Artificial Sequence
  derived and/or modified sequence
atgggccccaccaggaagcccaacgtgtgcagccggctgagcagaagagccctgggctgcttcagcagagatgctggggtggtgcagaggaccaacctgggcatcctgcgggccctggtgtgccaggagagcaccaagttcaagaatgtgtggaccacccacagccgcagccccatcgcctatgagcggggccgcatctactttgacaactaccgccgctgtgtgtcctctgtggccagcgagcccaggaagctgtatgagatgcccaagtgcagcaagtctgagaagattgaagatgccctgctgtgggagtgccctgtgggggacatcctgcccaacagcagtgactacaagagcagcctcatcgccctgacagcccacaactggctgctgcgcatcagcgccaccaccgggaagatcctggagaagatctacctggccccctactgcaagttccgctacctgtcctgggacaccccccaggaggtgattgctgtgaagagcgcccagaacagaggcagcgctgtggcccggcaggccggcatccagcagcacgtgctgctgtacctggccgtgttccgggtgctgcccttcagcctggtgggcatcctggagatcaacaagaagatctttggaaatgtgacagatgccaccctgagccacggcatcctgattgtgatgtacagcagcggcctggtgcggctgtacagcttccagaccatcgccgagcagttcatgcagcagaagctggacctgggctgtgcctgccgctggggcggcaccaccggcaccgtgggggaggcccccttcggcatcccctgcaacatcaagatcacagacatgccacccctgctgtttgaggtgagcagcctggagaatgccttccagattggaggccacccctggcactacatcgtgacccccaacaagaagaagcagaagggcgtcttccacatctgtgccctgaaggacaacagcctggccaagaatggcatccaggagatggactgctgcagcctggagagtgactggatctacttccacccagatgccagcggccgcatcatccacgtgggccccaaccaggtgaaggtgctgaagctgacagaaattgagaacaacagcagccagcaccagatcagcgaggactttgtgatcctggccaaccgggagaaccacaagaatgaaaatgtgctgactgtgacagccagcggccgggtggtgaagaagagcttcaacctgctggatgatgatcctgagcaggagaccttcaagatcgtggactatgaagatgagctggacctgctgtctgtggtggccgtgacccagattgatgctgagggcaaggcccacctggacttccactgcaatgaatatggcaccctgctgaagagcatccccctggtggagagctgggatgtgacctacagccatgaggtgtactttgaccgggacctggtgctgcacatcgagcagaagcccaacagagtcttcagctgctacgtgtaccagatgatctgtgacacaggagaggaggaggagaccatcaacagaagctgctag

SEQ ID NO: 217664 - DNA, 1563 bp, Artificial Sequence
  derived and/or modified sequence
atgggccccacccggaagcccaacgtgtgcagccggctgagccggcgtgcgctgggctgcttcagccgggacgccggggttgtgcagcggacaaacctgggcattctgagagcactagtgtgtcaggagtccactaagtttaaaaacgtatggacaactcatagccgctctccaatcgcttacgagcgggggagaatttactttgataactaccggcgctgcgtatcttccgtggcgtcggaaccccgcaagctgtacgaaatgccgaagtgcagcaagagcgaaaagattgaagacgcgctgttgtgggagtgtcctgtaggggacattctgccaaattcatcagattacaagtctagcctgatcgccctcactgcccacaattggttgcttagaatcagtgcaaccaccggcaagatcctggagaagatttacttggccccgtattgcaaatttcggtatttatcatgggacacaccccaggaagtgattgccgtcaaatcggcccagaacaggggttccgccgtggcacggcaagcagggatccaacagcatgtgctgctctacttggccgttttcagagtacttccattctccttggtgggtatactcgagatcaacaagaagatcttcgggaatgtcaccgatgctaccctctcgcatggaattctgattgttatgtacagttcgggtctggtgcggctgtactcattccaaaccattgctgagcaattcatgcaacaaaaactggaccttggatgcgcctgcaggtggggtgggactaccggcacggttggcgaagctcccttcggcatcccatgtaacataaaaatcaccgacatgccgccccttctgttcgaggttagctctctggagaacgcctttcaaatcggcggccacccatggcactacattgtgacccctaacaaaaaaaagcagaagggagtgttccatatctgcgctttaaaagacaactcattggcaaagaacgggatccaggaaatggactgttgcagcctcgagagtgactggatctacttccaccccgatgcttctggaagaattatacacgtggggccaaatcaagtgaaggtgctaaagcttaccgaaatcgagaataacagttctcagcaccaaatttcggaggattttgtcattcttgctaacagggaaaatcataaaaatgagaacgtgctgaccgtgacagcttctgggcgggtcgtgaaaaagagcttcaatctcctggatgacgatccggaacaggagacattcaagatcgtggattatgaggatgagctggacctcctcagtgtggtcgccgtgacccagattgatgccgaggggaaggcgcatctggattttcactgcaacgagtacggaacactgctgaagagcatcccgctggtcgagtcttgggacgtgacttattcccatgaagtttattttgaccgtgacctggtgctccatattgaacagaagcccaatcgcgttttcagttgctatgtttaccaaatgatttgcgatactggcgaggaggaggaaaccatcaaccggtcttgctag

SEQ ID NO: 217665 - DNA, 1563 bp, Artificial Sequence
  derived and/or modified sequence
atggggcctaccaggaaaccaaatgtttgcagtcggcttagccggagagcgctcggctgcttcagtcgtgatgcaggagtcgttcagaggaccaatttgggcattttgcgcgcactcgtatgccaggagtctacgaagtttaaaaatgtgtggaccacgcactctcgtagtcccatcgcatacgaacggggtcggatatactttgataactatagaagatgcgtctcttctgttgcatccgagccccgaaaactttatgagatgcccaagtgttctaagtccgaaaagatcgaggatgctttactctgggaatgccctgtgggcgacatactgcccaattccagcgattacaagtcatctctcattgcactgactgcccataattggctgctgagaatttccgctaccacaggtaagattctcgagaaaatctacctggcaccttattgcaagtttaggtacctgtcctgggacacacctcaggaagtcatagccgtgaagtctgcacaaaaccgcggatccgctgtcgcacgccaagctggaatccagcaacacgtgcttctctatttggcagtgtttcgcgtacttccgtttagcctggtaggaatcctcgagatcaacaaaaaaatcttcggcaacgtgactgacgctaccctttcccacggaattctgatcgtcatgtattcatcaggtctggtgagactttatagtttccagactatcgctgagcagttcatgcagcagaaactcgatctggggtgtgcctgtagatggggtggcaccacaggcacagtgggcgaagctcctttcggcattccctgcaatattaagattacagatatgccaccactgctgtttgaggtgagtagtctagaaaatgcctttcaaatcggagggcacccttggcattacatcgtgacacctaataagaagaagcagaaaggcgtgtttcatatatgcgcactgaaggataattcactcgcaaaaaacggtattcaggagatggattgttgcagcttggagagtgattggatatattttcaccctgacgcgtccggccgtataattcacgttggccctaaccaggtgaaagtcctgaagcttactgaaatagagaataactcctctcagcatcagatctccgaggattttgtgattctagccaatagggagaatcacaaaaatgagaatgtgctcaccgtcacagcgagcggtcgggtggttaaaaagtcttttaacctactcgatgacgaccccgagcaagagacattcaaaattgtggactatgaagacgaactggatctgcttagcgttgtcgccgtgacacagatcgacgcagagggcaaagctcatttagattttcattgcaatgagtacggaacacttctgaaatcgataccgcttgtggaaagttgggacgtgacctacagccatgaggtttacttcgacagagacctggtgctacacattgagcaaaaaccaaacagagtgttttcttgttatgtttaccaaatgatatgcgatacaggagaggaagaggagactattaacagatcatgttag

SEQ ID NO: 217666 - protein, 1504 aa, Artificial Sequence
  derived and/or modified sequence
MWVAKWLTGLLYHLSLFITRSWEVDFHPRQEALVRTLTSYEVVIPERVNEFGEVFPQSHHFSRQKRSSEALEPMPFRTHYRFTAYGQLFQLNLTADASFLAAGYTEVHLGTPERGAWESDAGPSDLRHCFYRGQVNSQEDYKAVVSLCGGLTGTFKGQNGEYFLEPIMKADGNEYEDGHNKPHLIYRQDLNNSFLQTLKYCSVSESQIKETSLPFHTYSNMNEDLNVMKERVLGHTSKNVPLKDERRHSRKKRLISYPRYIEIMVTADAKVVSAHGSNLQNYILTLMSIVATIYKDPSIGNLIHIVVVKLVMIHREEEGPVINFDGATTLKNFCSWQQTQNDLDDVHPSHHDTAVLITREDICSSKEKCNMLGLSYLGTICDPLQSCFINEEKGLISAFTIAHELGHTLGVQHDDNPRCKEMKVTKYHVMAPALSFHMSPWSWSNCSRKYVTEFLDTGYGECLLDKPDEEIYNLPSELPGSRYDGNKQCELAFGPGSQMCPHINICMHLWCTSTEKLHKGCFTQHVPPADGTDCGPGMHCRHGLCVNKETETRPVNGEWGPWEPYSSCSRTCGGGIESATRRCNRPEPRNGGNYCVGRRMKFRSCNTDSCPKGTQDFREKQCSDFNGKHLDISGIPSNVRWLPRYSGIGTKDRCKLYCQVAGTNYFYLLKDMVEDGTPCGTESYNIDCNCVLKAAGCDHVLNSSAKIDKCGVCGGDNSSCKTITGVFNSSHYGYNVVVKIPAGATNVDIRQYSYSGQPDDSYLALSDAEGNFLFNGNFLLSTSKKEINVQGTRTVIEYSGSNNAVERINSTNRQEKEILIEVLCVGNLYNPDVHYSFNIPLEERSDMFTWDPYGPWEGCTKMCQGLQRRNITCIHKSDHSVVSDKECDHLPLPSFVTQSCNTDCELRWHVIGKSECSSQCGQGYRTLDIHCMKYSIHEGQTVQVDDHYCGDQLKPPTQELCHGNCVFTRWHYSEWSQCSRSCGGGERSRESYCMNNFGHRLADNECQELSRVTRENCNEFSCPSWAASEWSECLVTCGKGTKQRQVWCQLNVDHLSDGFCNSSTKPESLSPCELHTCASWQVGPWGPCTTTCGHGYQMRDVKCVNELASAVLEDTECHEASRPSDRQSCVLTPCSFISKLETALLPTVLIKKMAQWRHGSWTPCSVSCGRGTQARYVSCRDALDRIADESYCAHLPRPAEIWDCFTPCGEWQAGDWSPCSASCGHGKTTRQVLCMNYHQPIDENYCDPEVRPLMEQECSLAACPPAHSHFPSSPVQPSYYLSTNLPLTQKLEDNENQVVHPSVRGNQWRTGPWGSCSSSCSGGLQHRAVVCQDENGQSASYCDAASKPPELQQCGPGPCPQWNYGNWGECSQTCGGGIKSRLVICQFPNGQILEDHNCEIVNKPPSVIQCHMHACPADVSWHQEPWTSEDLKVKLLPQRTIILWELMKNIFCHGKHSHMYLINVVTDHLLYPRHCDPETIETYFLSLWSLQFTWGDLKYYKNSL

SEQ ID NO: 217667 - protein, 1910 aa, Artificial Sequence
  derived and/or modified sequence
MWVAKWLTGLLYHLSLFITRSWEVDFHPRQEALVRTLTSYEVVIPERVNEFGEVFPQSHHFSRQKRSSEALEPMPFRTHYRFTAYGQLFQLNLTADASFLAAGYTEVHLGTPERGAWESDAGPSDLRHCFYRGQVNSQEDYKAVVSLCGGLTGTFKGQNGEYFLEPIMKADGNEYEDGHNKPHLIYRQDLNNSFLQTLKYCSVSESQIKETSLPFHTYSNMNEDLNVMKERVLGHTSKNVPLKDERRHSRKKRLISYPRYIEIMVTADAKVVSAHGSNLQNYILTLMSIVATIYKDPSIGNLIHIVVVKLVMIHREEEGPVINFDGATTLKNFCSWQQTQNDLDDVHPSHHDTAVLITREDICSSKEKCNMLGLSYLGTICDPLQSCFINEEKGLISAFTIAHELGHTLGVQHDDNPRCKEMKVTKYHVMAPALSFHMSPWSWSNCSRKYVTEFLDTGYGECLLDKPDEEIYNLPSELPGSRYDGNKQCELAFGPGSQMCPHINICMHLWCTSTEKLHKGCFTQHVPPADGTDCGPGMHCRHGLCVNKETETRPVNGEWGPWEPYSSCSRTCGGGIESATRRCNRPEPRNGGNYCVGRRMKFRSCNTDSCPKGTQDFREKQCSDFNGKHLDISGIPSNVRWLPRYSGIGTKDRCKLYCQVAGTNYFYLLKDMVEDGTPCGTETHDICVQGQCMAAGCDHVLNSSAKIDKCGVCGGDNSSCKTITGVFNSSHYGYNVVVKIPAGATNVDIRQYSYSGQPDDSYLALSDAEGNFLFNGNFLLSTSKKEINVQGTRTVIEYSGSNNAVERINSTNRQEKELILQVLCVGNLYNPDVHYSFNIPLEERSDMFTWDPYGPWEGCTKMCQGLQRRNITCIHKSDHSVVSDKECDHLPLPSFVTQSCNTDCELRWHVIGKSECSSQCGQGYRTLDIHCMKYSIHEGQTVQVDDHYCGDQLKPPTQELCHGNCVFTRWHYSEWSQCSRSCGGGERSRESYCMNNFGHRLADNECQELSRVTRENCNEFSCPSWAASEWSECLVTCGKGTKQRQVWCQLNVDHLSDGFCNSSTKPESLSPCELHTCASWQVGPWGPCTTTCGHGYQMRDVKCVNELASAVLEDTECHEASRPSDRQSCVLTPCSFISKLETALLPTVLIKKMAQWRHGSWTPCSVSCGRGTQARYVSCRDALDRIADESYCAHLPRPAEIWDCFTPCGEWQAGDWSPCSASCGHGKTTRQVLCMNYHQPIDENYCDPEVRPLMEQECSLAACPPAHSHFPSSPVQPSYYLSTNLPLTQKLEDNENQVVHPSVRGNQWRTGPWGSCSSSCSGGLQHRAVVCQDENGQSASYCDAASKPPELQQCGPGPCPQWNYGNWGECSQTCGGGIKSRLVICQFPNGQILEDHNCEIVNKPPSVIQCHMHACPADVSWHQEPWTSCSASCGKGRKYREVFCIDQFQRKLEDTNCSQVQKPPTHKACRSVRCPSWKANSWNECSVTCGSGVQQRDVYCRLKGVGQVVEEMCDQSTRPCSQRRCWSQDCVQHKGMERGRLNCSTSCERKDSHQRMECTDNQIRQVNEIVYNSSTISLTSKNCRNPPCNYIVVTADSSQCANNCGFSYRQRITYCTEIPSTKKHKLHRLRPIVYQECPVVPSSQVYQCINSCLHLATWKVGKWSKCSVTCGIGIMKRQVKCITKHGLSSDLCLNHLKPGAQKKCYANDCKSFTTCKEIQVKNHIRKDGDYYLNIKGRIIKIYCADMYLENPKEYLTLVQGEENFSEVYGFRLKNPYQCPFNGSRREDCECDNGHLAAGYTVFSKIRIDLTSMQIKTTDLLFSKTIFGNAVPFATAGDCYSAFRCPQGQFSINLSGTGMKISSTAKWLTQGSYTSVSIRRSEDGTRFFGKCGGYCGKCLPHMTTGLPIQVI

SEQ ID NO: 217668 - protein, 622 aa, Artificial Sequence
  derived and/or modified sequence
MFTWDPYGPWEGCTKMCQGLQRRNITCIHKSDHSVVSDKECDHLPLPSFVTQSCNTDCELRWHVIGKSECSSQCGQGYRTLDIHCMKYSIHEGQTVQVDDHYCGDQLKPPTQELCHGNCVFTRWHYSEWSQCSRSCGGGERSRESYCMNNFGHRLADNECQELSRVTRENCNEFSCPSWAASEWSECLVTCGKGTKQRQVWCQLNVDHLSDGFCNSSTKPESLSPCELHTCASWQVGPWGPCTTTCGHGYQMRDVKCVNELASAVLEDTECHEASRPSDRQCSVSCGRGTQARYVSCRDALDRIADESYCAHLPRPAEIWDCFTPCGEWQAGDWSPCSASCGHGKTTRQVLCMNYHQPIDENYCDPEVRPLMEQECSLAACPPAHSHFPSSPVQPSYYLSTNLPLTQKLEDNENQVVHPSVRGNQWRTGPWGSCSSSCSGGLQHRAVVCQDENGQSASYCDAASKPPELQQCGPGPCPQWNYGNWGECSQTCGGGIKSRLVICQFPNGQILEDHNCEIVNKPPSVIQCHMHACPADVSWHQEPWTSEDLKVKLLPQRTIILWELMKNIFCHGKHSHMYLINVVTDHLLYPRHCDPETIETYFLSLWSLQFTWGDLKYYKNSL

SEQ ID NO: 217669 - protein, 1504 aa, Artificial Sequence
  derived and/or modified sequence
MWVAKWLTGLLYHLSLFITRSWEVDFHPRQEALVRTLTSYEVVIPERVNEFGEVFPQSHHFSRQKRSSEALEPMPFRTHYRFTAYGQLFQLNLTADASFLAAGYTEVHLGTPERGAWESDAGPSDLRHCFYRGQVNSQEDYKAVVSLCGGLTGTFKGQNGEYFLEPIMKADGNEYEDGHNKPHLIYRQDLNNSFLQTLKYCSVSESQIKETSLPFHTYSNMNEDLNVMKERVLGHTSKNVPLKDERRHSRKKRLISYPRYIEIMVTADAKVVSAHGSNLQNYILTLMSIVATIYKDPSIGNLIHIVVVKLVMIHREEEGPVINFDGATTLKNFCSWQQTQNDLDDVHPSHHDTAVLITREDICSSKEKCNMLGLSYLGTICDPLQSCFINEEKGLISAFTIAHELGHTLGVQHDDNPRCKEMKVTKYHVMAPALSFHMSPWSWSNCSRKYVTEFLDTGYGECLLDKPDEEIYNLPSELPGSRYDGNKQCELAFGPGSQMCPHINICMHLWCTSTEKLHKGCFTQHVPPADGTDCGPGMHCRHGLCVNKETETRPVNGEWGPWEPYSSCSRTCGGGIESATRRCNRPEPRNGGNYCVGRRMKFRSCNTDSCPKGTQDFREKQCSDFNGKHLDISGIPSNVRWLPRYSGIGTKDRCKLYCQVAGTNYFYLLKDMVEDGTPCGTETHDICVQGQCMAAGCDHVLNSSAKIDKCGVCGGDNSSCKTITGVFNSSHYGYNVVVKIPAGATNVDIRQYSYSGQPDDSYLALSDAEGNFLFNGNFLLSTSKKEINVQGTRTVIEYSGSNNAVERINSTNRQEKELILQVLCVGNLYNPDVHYSFNIPLEERSDMFTWDPYGPWEGCTKMCQGLQRRNITCIHKSDHSVVSDKECDHLPLPSFVTQSCNTDCELRWHVIGKSECSSQCGQGYRTLDIHCMKYSIHEGQTVQVDDHYCGDQLKPPTQELCHGNCVFTRWHYSEWSQCSRSCGGGERSRESYCMNNFGHRLADNECQELSRVTRENCNEFSCPSWAASEWSECLVTCGKGTKQRQVWCQLNVDHLSDGFCNSSTKPESLSPCELHTCASWQVGPWGPCTTTCGHGYQMRDVKCVNELASAVLEDTECHEASRPSDRQSCVLTPCSFISKLETALLPTVLIKKMAQWRHGSWTPCSVSCGRGTQARYVSCRDALDRIADESYCAHLPRPAEIWDCFTPCGEWQAGDWSPCSASCGHGKTTRQVLCMNYHQPIDENYCDPEVRPLMEQECSLAACPPAHSHFPSSPVQPSYYLSTNLPLTQKLEDNENQVVHPSVRGNQWRTGPWGSCSSSCSGGLQHRAVVCQDENGQSASYCDAASKPPELQQCGPGPCPQWNYGNWGECSQTCGGGIKSRLVICQFPNGQILEDHNCEIVNKPPSVIQCHMHACPADVSWHQEPWTSEDLKVKLLPQRTIILWELMKNIFCHGKHSHMYLINVVTDHLLYPRHCDPETIETYFLSLWSLQFTWGDLKYYKNSL

SEQ ID NO: 217670 - DNA, 4515 bp, Artificial Sequence
  derived and/or modified sequence
atgtgggtggccaagtggctgactgggctgctctaccatctctcgctcttcatcaccaggtcttgggaagttgacttccaccccaggcaagaagccctggtgaggacactgacctcctacgaagtagtgatccccgagcgggtcaatgagtttggagaagtgttccctcagagccaccacttcagccggcagaaacgcagctccgaggcgctggaacccatgccgttccgaacccactatcgcttcactgcctacgggcagctcttccagctgaacctgaccgccgatgcatcctttctggccgccggctacaccgaggtgcacttgggaaccccggagcgcggggcctgggagagcgacgcagggccctcggacctgcgccactgcttctaccgcggccaggtcaactcacaggaggattacaaggccgtcgtcagcttatgcggaggcctgacgggaacatttaaaggacagaacggtgaatatttcttagaacctataatgaaggcagatgggaatgaatatgaagatggtcacaacaagccacatcttatatacagacaagacttaaataactcttttctgcagactctgaagtattgcagtgtgtcagaaagtcaaataaaggaaaccagtttaccctttcatacctacagcaacatgaatgaagatcttaatgtaatgaaagaaagagttttaggacacacatcaaaaaatgtaccattgaaagatgaaagaagacattccaggaaaaaacgtcttatatcatatccaagatacattgaaattatggttacagctgatgctaaagtggtttctgctcatggatcgaatttgcaaaactatatactgactctaatgtcaattgttgcaacaatctacaaagatccaagtattggaaatttgatacacatagtagtggtaaaattagttatgattcaccgtgaggaggaaggaccagtcattaattttgatggtgctaccacattaaagaacttttgttcatggcaacaaactcagaatgaccttgatgatgttcacccttcccaccatgacactgctgttcttatcactagggaagacatttgttcatctaaagagaaatgtaacatgttaggtttatcatatttaggtaccatatgtgatcctttacaaagctgctttattaatgaagaaaaaggactcatttctgcttttactatagcccatgagcttgggcacacacttggtgttcaacatgatgataatcctagatgtaaagaaatgaaagttacaaagtatcatgtaatggcccctgctttaagttttcacatgagtccttggagctggtcaaactgtagtcggaaatatgttactgaattcctagatactggttacggggaatgtcttcttgacaaaccagatgaagaaatatataatctgccttcagaacttcctggatcacgatatgatggaaacaagcagtgtgagcttgcgtttggtcctgggtcacaaatgtgtccccatataaatatatgcatgcatctgtggtgcacaagcacagaaaagcttcacaaaggctgtttcactcaacacgtgccaccagcagatggaacagactgcggtcctggaatgcattgccgtcatgggctatgtgtaaacaaagaaacggaaacacgtcctgtaaatggtgaatggggaccatgggaaccttacagttcttgttcaagaacatgtggaggcggaatcgaaagtgcaaccaggcgctgtaatcgtcctgagccaagaaacggaggaaattactgtgtgggccgcaggatgaaatttcgatcatgtaatactgattcatgtccaaaaggcacacaagactttcgagagaagcagtgctctgattttaatggtaaacatttggacatcagtggcattccctctaatgtgaggtggcttccaagatacagtggcattggcacaaaggatcgttgtaaactctattgtcaggttgctggaaccaattatttctacctattgaaggatatggttgaagatggtactccttgtggaactgaatcttataatattgattgtaattgtgtcttgaaggcagctggttgtgatcacgtgttaaactccagtgccaagatagacaaatgtggagtgtgtggtggggacaactcttcatgcaagacaataacaggtgtcttcaacagttctcattatggttataatgttgttgtaaagattcccgcaggagcaacaaacgttgacattcgtcagtacagctattctggacaaccagatgacagttaccttgcattatctgacgctgaagggaattttcttttcaatggaaattttcttctaagtacgtcaaaaaaagaaatcaatgtgcaaggaacaagaactgttattgaatacagtggatcaaataacgcagttgaaagaattaatagtactaatcgacaagagaaagaaattcttattgaggtgttgtgtgtgggtaatttatacaaccctgatgtacattattccttcaatatccctttggaagagaggagtgacatgttcacatgggacccctatggaccatgggaaggctgtaccaaaatgtgtcaaggtcttcagcgaagaaacataacttgcatacataagagtgatcatagtgttgtgtctgataaagaatgtgaccacttgccacttccatcatttgttactcaaagttgcaatacagactgtgaactaaggtggcatgttattggcaaaagtgaatgttcatcccaatgtggtcaaggatatagaaccttggacatccattgcatgaagtattccattcatgaaggacagactgttcaagttgatgaccactactgtggtgaccagcttaaacctcctacccaagaactatgccatggtaactgtgtcttcacaagatggcattattcagaatggtctcagtgttccaggagttgtggaggaggggaaaggtctcgagaatcttattgtatgaataactttggccatcgtcttgctgacaatgaatgccaagaactgtcccgagtgacgagagagaattgcaatgaattttcctgtcccagttgggctgctagtgaatggagcgagtgccttgttacatgtggtaaaggaacaaagcagcggcaggtatggtgtcagctgaatgtagatcacttgagtgatggcttctgtaattcaagtaccaaacctgaatctctgagtccatgtgaacttcatacatgtgcttcctggcaagtaggaccatggggtccttgcacaaccacatgtggacatgggtatcagatgcgagatgttaaatgtgtcaatgagctagctagtgcagtgttagaggacacagaatgccatgaagctagtcgccccagtgacagacagagctgtgtacttacaccttgctcatttatttctaaacttgagaccgctttattaccaactgttctcataaaaaagatggcacaatggcgacatggttcttggaccccatgctccgtatcttgtggaagaggtactcaagcccgctatgtaagctgtcgtgatgctcttgatagaatagcagatgaatcatattgtgcccacttaccccgacctgctgaaatatgggactgttttaccccttgtggagagtggcaagcaggggattggtcaccctgttcagcttcctgtggccatggaaaaacaactcgacaagttttatgcatgaactaccatcagccaattgatgagaattactgtgatcctgaagttcgccctttgatggaacaggaatgtagcctggcagcctgccctcctgcacacagccactttcctagttcccctgtgcagccaagctattatctaagcacgaatttgccattaactcaaaaacttgaagataatgaaaatcaggtggtccatccatcagtcagaggaaaccagtggagaaccggaccatggggatcatgctccagcagttgttctggaggtcttcagcatagggctgtggtctgccaggatgaaaatggacaaagtgctagttactgcgatgcagcctccaagcctccagagttacagcaatgtggtccagggccttgtccacagtggaactacggaaattggggagaatgttcacaaacatgtggaggaggaataaaatcaagacttgtaatatgtcaatttcccaatggccaaatattagaagatcacaactgtgaaattgtaaacaagccacctagcgtaatacagtgtcatatgcatgcttgccctgctgatgtgtcatggcatcaggaaccatggacatcggaggatcttaaagtgaaattgctgcctcaaaggaccatcatcttgtgggaactaatgaaaaacatattttgccatggaaagcactcacatatgtatttaataaatgtcgttactgaccatctactatatcctaggcactgtgatccagagacaattgaaacatatttcttatccctatggagtttacagtttacttggggagatttgaaatactataagaactcactataa

SEQ ID NO: 217671 - DNA, 6076 bp, Artificial Sequence
  derived and/or modified sequence
atgtgggtggccaagtggctgactgggctgctctaccatctctcgctcttcatcaccaggtcttgggaagttgacttccaccccaggcaagaagccctggtgaggacactgacctcctacgaagtagtgatccccgagcgggtcaatgagtttggagaagtgttccctcagagccaccacttcagccggcagaaacgcagctccgaggcgctggaacccatgccgttccgaacccactatcgcttcactgcctacgggcagctcttccagctgaacctgaccgccgatgcatcctttctggccgccggctacaccgaggtgcacttgggaaccccggagcgcggggcctgggagagcgacgcagggccctcggacctgcgccactgcttctaccgcggccaggtcaactcacaggaggattacaaggccgtcgtcagcttatgcggaggcctgacgggaacatttaaaggacagaacggtgaatatttcttagaacctataatgaaggcagatgggaatgaatatgaagatggtcacaacaagccacatcttatatacagacaagacttaaataactcttttctgcagactctgaagtattgcagtgtgtcagaaagtcaaataaaggaaaccagtttaccctttcatacctacagcaacatgaatgaagatcttaatgtaatgaaagaaagagttttaggacacacatcaaaaaatgtaccattgaaagatgaaagaagacattccaggaaaaaacgtcttatatcatatccaagatacattgaaattatggttacagctgatgctaaagtggtttctgctcatggatcgaatttgcaaaactatatactgactctaatgtcaattgttgcaacaatctacaaagatccaagtattggaaatttgatacacatagtagtggtaaaattagttatgattcaccgtgaggaggaaggaccagtcattaattttgatggtgctaccacattaaagaacttttgttcatggcaacaaactcagaatgaccttgatgatgttcacccttcccaccatgacactgctgttcttatcactagggaagacatttgttcatctaaagagaaatgtaacatgttaggtttatcatatttaggtaccatatgtgatcctttacaaagctgctttattaatgaagaaaaaggactcatttctgcttttactatagcccatgagcttgggcacacacttggtgttcaacatgatgataatcctagatgtaaagaaatgaaagttacaaagtatcatgtaatggcccctgctttaagttttcacatgagtccttggagctggtcaaactgtagtcggaaatatgttactgaattcctagatactggttacggggaatgtcttcttgacaaaccagatgaagaaatatataatctgccttcagaacttcctggatcacgatatgatggaaacaagcagtgtgagcttgcgtttggtcctgggtcacaaatgtgtccccatataaatatatgcatgcatctgtggtgcacaagcacagaaaagcttcacaaaggctgtttcactcaacacgtgccaccagcagatggaacagactgcggtcctggaatgcattgccgtcatgggctatgtgtaaacaaagaaacggaaacacgtcctgtaaatggtgaatggggaccatgggaaccttacagttcttgttcaagaacatgtggaggcggaatcgaaagtgcaaccaggcgctgtaatcgtcctgagccaagaaacggaggaaattactgtgtgggccgcaggatgaaatttcgatcatgtaatactgattcatgtccaaaaggcacacaagactttcgagagaagcagtgctctgattttaatggtaaacatttggacatcagtggcattccctctaatgtgaggtggcttccaagatacagtggcattggcacaaaggatcgttgtaaactctattgtcaggttgctggaaccaattatttctacctattgaaggatatggttgaagatggtactccttgtggaactgaaactcatgacatctgtgttcaaggccagtgtatggcagctggttgtgatcacgtgttaaactccagtgccaagatagacaaatgtggagtgtgtggtggggacaactcttcatgcaagacaataacaggtgtcttcaacagttctcattatggttataatgttgttgtaaagattcccgcaggagcaacaaacgttgacattcgtcagtacagctattctggacaaccagatgacagttaccttgcattatctgacgctgaagggaattttcttttcaatggaaattttcttctaagtacgtcaaaaaaagaaatcaatgtgcaaggaacaagaactgttattgaatacagtggatcaaataacgcagttgaaagaattaatagtactaatcgacaagagaaagaacttattttgcaggtgttgtgtgtgggtaatttatacaaccctgatgtacattattccttcaatatccctttggaagagaggagtgacatgttcacatgggacccctatggaccatgggaaggctgtaccaaaatgtgtcaaggtcttcagcgaagaaacataacttgcatacataagagtgatcatagtgttgtgtctgataaagaatgtgaccacttgccacttccatcatttgttactcaaagttgcaatacagactgtgaactaaggtggcatgttattggcaaaagtgaatgttcatcccaatgtggtcaaggatatagaaccttggacatccattgcatgaagtattccattcatgaaggacagactgttcaagttgatgaccactactgtggtgaccagcttaaacctcctacccaagaactatgccatggtaactgtgtcttcacaagatggcattattcagaatggtctcagtgttccaggagttgtggaggaggggaaaggtctcgagaatcttattgtatgaataactttggccatcgtcttgctgacaatgaatgccaagaactgtcccgagtgacgagagagaattgcaatgaattttcctgtcccagttgggctgctagtgaatggagcgagtgccttgttacatgtggtaaaggaacaaagcagcggcaggtatggtgtcagctgaatgtagatcacttgagtgatggcttctgtaattcaagtaccaaacctgaatctctgagtccatgtgaacttcatacatgtgcttcctggcaagtaggaccatggggtccttgcacaaccacatgtggacatgggtatcagatgcgagatgttaaatgtgtcaatgagctagctagtgcagtgttagaggacacagaatgccatgaagctagtcgccccagtgacagacagagctgtgtacttacaccttgctcatttatttctaaacttgagaccgctttattaccaactgttctcataaaaaagatggcacaatggcgacatggttcttggaccccatgctccgtatcttgtggaagaggtactcaagcccgctatgtaagctgtcgtgatgctcttgatagaatagcagatgaatcatattgtgcccacttaccccgacctgctgaaatatgggactgttttaccccttgtggagagtggcaagcaggggattggtcaccctgttcagcttcctgtggccatggaaaaacaactcgacaagttttatgcatgaactaccatcagccaattgatgagaattactgtgatcctgaagttcgccctttgatggaacaggaatgtagcctggcagcctgccctcctgcacacagccactttcctagttcccctgtgcagccaagctattatctaagcacgaatttgccattaactcaaaaacttgaagataatgaaaatcaggtggtccatccatcagtcagaggaaaccagtggagaaccggaccatggggatcatgctccagcagttgttctggaggtcttcagcatagggctgtggtctgccaggatgaaaatggacaaagtgctagttactgcgatgcagcctccaagcctccagagttacagcaatgtggtccagggccttgtccacagtggaactacggaaattggggagaatgttcacaaacatgtggaggaggaataaaatcaagacttgtaatatgtcaatttcccaatggccaaatattagaagatcacaactgtgaaattgtaaacaagccacctagcgtaatacagtgtcatatgcatgcttgccctgctgatgtgtcatggcatcaggaaccatggacatcgtgctcagcttcttgtggtaaaggtagaaagtaccgtgaagtgttttgcattgaccaattccaaaggaaattagaagacacaaattgcagtcaagtacagaaacctccaactcacaaagcctgtagatctgtcagatgcccttcatggaaagccaatagctggaatgagtgctctgtgacctgtggctctggagttcagcagagggatgtatactgcagactgaaaggtgttggtcaggtggttgaagaaatgtgtgatcagtccacccgaccttgttctcagaggcgatgttggagtcaggactgtgtgcagcacaaggggatggaaagagggaggctgaattgttcaacatcatgtgagagaaaagattcacatcaacgaatggagtgcacagataaccaaatcagacaagtgaatgaaatagtctataattcttcaaccatatctcttacatccaagaattgcaggaaccctccttgcaattacattgtggtaacagcagactcatcacagtgtgcaaacaactgtggatttagttacagacaaaggattacatattgcaccgagatcccatctactaagaaacataagctccatcgacttcggcctatagtttatcaagaatgccctgtggtgccttcctctcaggtttaccaatgcattaacagctgtttgcatttggccacttggaaagttggaaaatggagcaagtgctcagtgacttgtggaattgggataatgaagagacaagtgaaatgcattaccaaacatggtttgtccagtgacttatgtttaaaccatttaaaaccaggtgctcaaaagaaatgttatgccaatgactgtaaatcatttaccacctgcaaagaaattcaagtgaaaaaccacattagaaaggatggtgactattaccttaacattaagggaagaataataaagatttattgtgcagacatgtacttggagaaccctaaggaatatttaacactggtccaaggtgaagaaaacttttctgaagtgtatggctttagactaaaaaatccatatcaatgtccttttaatgggagtagaagggaagactgtgaatgtgacaatggacacttagctgctggatacactgttttcagcaaaataagaattgatctcacttccatgcaaattaaaactacggaccttcttttttccaaaacaatatttggaaatgcagttccatttgccacagctggagattgctacagtgctttcagatgcccacagggacagtttagcattaatttgtcaggaactgggatgaagatatccagcacagcaaagtggctcactcaggggagttatacctctgtcagcatacgaagatcagaggatggaactagatttttcggcaaatgtggagggtactgtggaaagtgtcttcctcacatgactactggtctcccaattcaagtcatatgaacatttagaagggggaagtatgccctaaagaggggatattctctggaatattcaaataactggtgctcatttctttatatctcccttcccgagatttccatgtccaatatgtctctgcctttttttcagggtgctcatcagggattcaaatcactgcttaataaggtctataaaagaaatttaagagctatcttaatttattttatatctaatcaggatattttttaaagaacataataatttataatagagaataccaggattgaatgaattataccaagacagtgttgctcttaacatcttggcctggaccacacttattttatacctataaacacacatg

SEQ ID NO: 217672 - DNA, 2780 bp, Artificial Sequence
  derived and/or modified sequence
tattccttcaatatccctttggaagagaggagtgacatgttcacatgggacccctatggaccatgggaaggctgtaccaaaatgtgtcaaggtcttcagcgaagaaacataacttgcatacataagagtgatcatagtgttgtgtctgataaagaatgtgaccacttgccacttccatcatttgttactcaaagttgcaatacagactgtgaactaaggtggcatgttattggcaaaagtgaatgttcatcccaatgtggtcaaggatatagaaccttggacatccattgcatgaagtattccattcatgaaggacagactgttcaagttgatgaccactactgtggtgaccagcttaaacctcctacccaagaactatgccatggtaactgtgtcttcacaagatggcattattcagaatggtctcagtgttccaggagttgtggaggaggggaaaggtctcgagaatcttattgtatgaataactttggccatcgtcttgctgacaatgaatgccaagaactgtcccgagtgacgagagagaattgcaatgaattttcctgtcccagttgggctgctagtgaatggagcgagtgccttgttacatgtggtaaaggaacaaagcagcggcaggtatggtgtcagctgaatgtagatcacttgagtgatggcttctgtaattcaagtaccaaacctgaatctctgagtccatgtgaacttcatacatgtgcttcctggcaagtaggaccatggggtccttgcacaaccacatgtggacatgggtatcagatgcgagatgttaaatgtgtcaatgagctagctagtgcagtgttagaggacacagaatgccatgaagctagtcgccccagtgacagacagtgctccgtatcttgtggaagaggtactcaagcccgctatgtaagctgtcgtgatgctcttgatagaatagcagatgaatcatattgtgcccacttaccccgacctgctgaaatatgggactgttttaccccttgtggagagtggcaagcaggggattggtcaccctgttcagcttcctgtggccatggaaaaacaactcgacaagttttatgcatgaactaccatcagccaattgatgagaattactgtgatcctgaagttcgccctttgatggaacaggaatgtagcctggcagcctgccctcctgcacacagccactttcctagttcccctgtgcagccaagctattatctaagcacgaatttgccattaactcaaaaacttgaagataatgaaaatcaggtggtccatccatcagtcagaggaaaccagtggagaaccggaccatggggatcatgctccagcagttgttctggaggtcttcagcatagggctgtggtctgccaggatgaaaatggacaaagtgctagttactgcgatgcagcctccaagcctccagagttacagcaatgtggtccagggccttgtccacagtggaactacggaaattggggagaatgttcacaaacatgtggaggaggaataaaatcaagacttgtaatatgtcaatttcccaatggccaaatattagaagatcacaactgtgaaattgtaaacaagccacctagcgtaatacagtgtcatatgcatgcttgccctgctgatgtgtcatggcatcaggaaccatggacatcggaggatcttaaagtgaaattgctgcctcaaaggaccatcatcttgtgggaactaatgaaaaacatattttgccatggaaagcactcacatatgtatttaataaatgtcgttactgaccatctactatatcctaggcactgtgatccagagacaattgaaacatatttcttatccctatggagtttacagtttacttggggagatttgaaatactataagaactcactataaaaagatatttttattagctatcttagattggaaatccactttctgcttactgtgtctctgttccatcttctttcattttattggttttagtttgcaagcctagttcttaagaagactgtggattactttcttggaattttttcccaattaggagagcagaatcctaactgctaatgagattgaattgtaatggcatttgtttctgagcatagacgttttattttccctacccattcatgacttcaattcaccaagcattaaacatttacttaggtctcatgctttatattagatattgaagcaattaaaattaagtgtttgtgagtcagattctctgttttagaggtcagcaaactatggtccaggtaccaaatctggcctgttgcctatttttaaaataagttctattggaacacagtcatgctcatttgtttacgtgttatctatggctggttttgcactacagcagtagcattgattagttgcaatagaaactctgtaactcacaaagcctgaaatatttactatctaactttttctgggaaaagtttgctgacccctgttctatttaataaacattataatgcttttaagtttaacataaaaaggtacttagatttatagaatattaaaattacaaataattcattccaggtcagttttagatgtttttgatcctttgatattttacattttaaggtttatcaaccttctctacatatccactgtgatattcatgcaatgtttatgtaaatgtatctatactatattccaatatatttttgttatgctattttttgtatgtaaattatatcacaagtgaaaaatctgaatgctcattaaagtcctctgtatagatgacttttcaacctcac

SEQ ID NO: 217673 - DNA, 4633 bp, Artificial Sequence
  derived and/or modified sequence
atgtgggtggccaagtggctgactgggctgctctaccatctctcgctcttcatcaccaggtcttgggaagttgacttccaccccaggcaagaagccctggtgaggacactgacctcctacgaagtagtgatccccgagcgggtcaatgagtttggagaagtgttccctcagagccaccacttcagccggcagaaacgcagctccgaggcgctggaacccatgccgttccgaacccactatcgcttcactgcctacgggcagctcttccagctgaacctgaccgccgatgcatcctttctggccgccggctacaccgaggtgcacttgggaaccccggagcgcggggcctgggagagcgacgcagggccctcggacctgcgccactgcttctaccgcggccaggtcaactcacaggaggattacaaggccgtcgtcagcttatgcggaggcctgacgggaacatttaaaggacagaacggtgaatatttcttagaacctataatgaaggcagatgggaatgaatatgaagatggtcacaacaagccacatcttatatacagacaagacttaaataactcttttctgcagactctgaagtattgcagtgtgtcagaaagtcaaataaaggaaaccagtttaccctttcatacctacagcaacatgaatgaagatcttaatgtaatgaaagaaagagttttaggacacacatcaaaaaatgtaccattgaaagatgaaagaagacattccaggaaaaaacgtcttatatcatatccaagatacattgaaattatggttacagctgatgctaaagtggtttctgctcatggatcgaatttgcaaaactatatactgactctaatgtcaattgttgcaacaatctacaaagatccaagtattggaaatttgatacacatagtagtggtaaaattagttatgattcaccgtgaggaggaaggaccagtcattaattttgatggtgctaccacattaaagaacttttgttcatggcaacaaactcagaatgaccttgatgatgttcacccttcccaccatgacactgctgttcttatcactagggaagacatttgttcatctaaagagaaatgtaacatgttaggtttatcatatttaggtaccatatgtgatcctttacaaagctgctttattaatgaagaaaaaggactcatttctgcttttactatagcccatgagcttgggcacacacttggtgttcaacatgatgataatcctagatgtaaagaaatgaaagttacaaagtatcatgtaatggcccctgctttaagttttcacatgagtccttggagctggtcaaactgtagtcggaaatatgttactgaattcctagatactggttacggggaatgtcttcttgacaaaccagatgaagaaatatataatctgccttcagaacttcctggatcacgatatgatggaaacaagcagtgtgagcttgcgtttggtcctgggtcacaaatgtgtccccatataaatatatgcatgcatctgtggtgcacaagcacagaaaagcttcacaaaggctgtttcactcaacacgtgccaccagcagatggaacagactgcggtcctggaatgcattgccgtcatgggctatgtgtaaacaaagaaacggaaacacgtcctgtaaatggtgaatggggaccatgggaaccttacagttcttgttcaagaacatgtggaggcggaatcgaaagtgcaaccaggcgctgtaatcgtcctgagccaagaaacggaggaaattactgtgtgggccgcaggatgaaatttcgatcatgtaatactgattcatgtccaaaaggcacacaagactttcgagagaagcagtgctctgattttaatggtaaacatttggacatcagtggcattccctctaatgtgaggtggcttccaagatacagtggcattggcacaaaggatcgttgtaaactctattgtcaggttgctggaaccaattatttctacctattgaaggatatggttgaagatggtactccttgtggaactgaaactcatgacatctgtgttcaaggccagtgtatggcagctggttgtgatcacgtgttaaactccagtgccaagatagacaaatgtggagtgtgtggtggggacaactcttcatgcaagacaataacaggtgtcttcaacagttctcattatggttataatgttgttgtaaagattcccgcaggagcaacaaacgttgacattcgtcagtacagctattctggacaaccagatgacagttaccttgcattatctgacgctgaagggaattttcttttcaatggaaattttcttctaagtacgtcaaaaaaagaaatcaatgtgcaaggaacaagaactgttattgaatacagtggatcaaataacgcagttgaaagaattaatagtactaatcgacaagagaaagaacttattttgcaggtgttgtgtgtgggtaatttatacaaccctgatgtacattattccttcaatatccctttggaagagaggagtgacatgttcacatgggacccctatggaccatgggaaggctgtaccaaaatgtgtcaaggtcttcagcgaagaaacataacttgcatacataagagtgatcatagtgttgtgtctgataaagaatgtgaccacttgccacttccatcatttgttactcaaagttgcaatacagactgtgaactaaggtggcatgttattggcaaaagtgaatgttcatcccaatgtggtcaaggatatagaaccttggacatccattgcatgaagtattccattcatgaaggacagactgttcaagttgatgaccactactgtggtgaccagcttaaacctcctacccaagaactatgccatggtaactgtgtcttcacaagatggcattattcagaatggtctcagtgttccaggagttgtggaggaggggaaaggtctcgagaatcttattgtatgaataactttggccatcgtcttgctgacaatgaatgccaagaactgtcccgagtgacgagagagaattgcaatgaattttcctgtcccagttgggctgctagtgaatggagcgagtgccttgttacatgtggtaaaggaacaaagcagcggcaggtatggtgtcagctgaatgtagatcacttgagtgatggcttctgtaattcaagtaccaaacctgaatctctgagtccatgtgaacttcatacatgtgcttcctggcaagtaggaccatggggtccttgcacaaccacatgtggacatgggtatcagatgcgagatgttaaatgtgtcaatgagctagctagtgcagtgttagaggacacagaatgccatgaagctagtcgccccagtgacagacagagctgtgtacttacaccttgctcatttatttctaaacttgagaccgctttattaccaactgttctcataaaaaagatggcacaatggcgacatggttcttggaccccatgctccgtatcttgtggaagaggtactcaagcccgctatgtaagctgtcgtgatgctcttgatagaatagcagatgaatcatattgtgcccacttaccccgacctgctgaaatatgggactgttttaccccttgtggagagtggcaagcaggggattggtcaccctgttcagcttcctgtggccatggaaaaacaactcgacaagttttatgcatgaactaccatcagccaattgatgagaattactgtgatcctgaagttcgccctttgatggaacaggaatgtagcctggcagcctgccctcctgcacacagccactttcctagttcccctgtgcagccaagctattatctaagcacgaatttgccattaactcaaaaacttgaagataatgaaaatcaggtggtccatccatcagtcagaggaaaccagtggagaaccggaccatggggatcatgctccagcagttgttctggaggtcttcagcatagggctgtggtctgccaggatgaaaatggacaaagtgctagttactgcgatgcagcctccaagcctccagagttacagcaatgtggtccagggccttgtccacagtggaactacggaaattggggagaatgttcacaaacatgtggaggaggaataaaatcaagacttgtaatatgtcaatttcccaatggccaaatattagaagatcacaactgtgaaattgtaaacaagccacctagcgtaatacagtgtcatatgcatgcttgccctgctgatgtgtcatggcatcaggaaccatggacatcggaggatcttaaagtgaaattgctgcctcaaaggaccatcatcttgtgggaactaatgaaaaacatattttgccatggaaagcactcacatatgtatttaataaatgtcgttactgaccatctactatatcctaggcactgtgatccagagacaattgaaacatatttcttatccctatggagtttacagtttacttggggagatttgaaatactataagaactcactataaaaagatatttttattagctatcttagattggaaatccactttctgcttactgtgtctctgttccatcttctttcattttattggttttagtttgcaagcctagttcttaagaagactg

SEQ ID NO: 217674 - DNA, 4515 bp, Artificial Sequence
  derived and/or modified sequence
atgtgggtggcgaaatggctgacaggcttgctgtaccacctctcactgttcatcacccgctcatgggaggttgatttccacccgaggcaggaggctctggtgaggactctgacctcctacgaggtggttatcccagagagagtcaacgaatttggcgaggtgttcccccaaagccatcacttttcacgacagaaaaggagctcagaggctcttgaaccaatgccatttagaacccactacaggtttacagcatacgggcagttgttccagctcaacctcactgctgacgcctcctttttagctgcaggctacactgaggtacacctcgggactcctgagcgaggagcttgggaatccgacgccggtccttcagaccttagacattgtttctatcgaggccaagtaaacagtcaggaagactataaggcggttgtgagtctctgtggtgggctgactggaaccttcaaagggcagaacggtgagtacttcttagagccaatcatgaaagccgatggtaatgagtacgaggacggccacaacaagcctcacctgatctaccgccaagacctgaacaactcatttctgcagacactgaaatattgctctgtgtccgagagtcagatcaaggaaacttccctcccgtttcacacttatagcaacatgaacgaggacctcaacgttatgaaagagagagtactagggcacacctcaaagaatgtgccgctgaaggacgagcgtcgccatagtaggaagaaacgccttatatcttaccctagatacatcgagatcatggttactgctgacgccaaggtggtttcagcccatggctctaatctgcagaactacattttgaccctaatgtctatagtagccaccatatacaaagaccccagcattggaaatttaatccacatagtggtggtcaaactggtgatgattcatagagaagaagaaggacctgtaattaactttgacggggccactaccctgaagaatttctgttcctggcaacaaacgcagaacgacctggacgacgttcatcctagccatcatgatactgccgtactgataacacgcgaagacatatgctcctctaaggaaaagtgcaacatgctgggcctctcttatttaggtacgatatgtgacccccttcagagctgtttcataaatgaggaaaagggactgatttcggccttcacgatcgcccatgagctaggccacacattgggggtgcaacacgacgataatccacgctgcaaagagatgaaagtgacaaagtaccacgtgatggccccagcactgagctttcacatgtccccctggtcttggagcaattgtagtcgcaagtacgtgaccgagttcctggatacaggctatggagagtgcctgctggataagccagacgaggaaatctacaatctcccctctgagcttccaggatcccgatatgacggaaacaagcagtgcgagttggcgttcggccctgggagccaaatgtgcccacacattaacatctgcatgcatctgtggtgcacttccactgaaaaactgcataaagggtgtttcacacagcatgttcccccagctgatggaacagactgcggcccaggcatgcactgcagacacggactctgcgtgaataaagagacggaaacccgaccagtgaatggggagtgggggccgtgggagccttactcgtcatgttcccggacctgtggaggcggcattgagtctgccactcgtcgttgcaaccgaccagagccacgaaatggcggaaactactgcgtcgggcgacggatgaaattccgttcttgcaacactgactcctgtcccaaaggcacccaggattttcgggaaaagcagtgcagcgactttaatggtaaacacctggacatcagcggcattccgagcaatgtgcgatggctgcctcgctattctgggatcggcactaaggatcgatgcaagctctattgccaggtggccggcacaaactatttctacctgctcaaagacatggtcgaggatggaacaccctgtggaaccgaaagctacaatatcgactgtaattgtgtgctgaaggcagcaggatgcgaccacgtgctcaactcctcggcaaagattgacaagtgcggcgtctgtggaggggacaactcttcgtgtaagaccattacaggagtgtttaacagctctcattatgggtataacgtggtcgtgaaaatacccgctggggccactaatgtcgatatccgacaatatagctactccggtcaaccagacgatagctatctggctctatctgacgcggaagggaatttccttttcaatgggaacttccttttgtctactagcaaaaaagagatcaacgtgcaaggaactagaacagtcatcgagtactcaggctccaacaatgccgtcgaaaggatcaattctacaaataggcaggagaaagaaatcctcattgaggtcttatgcgtgggcaacctttacaatcctgatgtccactattcattcaatatccctttagaagagagatccgatatgtttacgtgggacccatacggtccatgggagggatgcacgaagatgtgccagggccttcaaaggcgaaacatcacttgtatacacaaaagcgatcacagtgtggtcagcgataaggaatgtgatcatttacccctgccatcttttgtaacccagtcctgtaataccgactgcgagcttcgctggcatgtcatagggaagtcggagtgttccagccagtgcggccagggctataggaccctggacatccactgtatgaagtatagtatccacgaaggtcaaacagtccaggtggacgaccattactgcggagaccagttgaaaccaccaacccaggaactgtgccatggaaattgcgtgtttaccaggtggcattatagcgaatggagtcagtgttcacgctcctgcggtggcggcgagcgctctcgggagtcctattgtatgaacaatttcgggcatcgcctggcagataatgaatgtcaggagctgagcagagttactcgagagaattgtaacgagtttagttgtccctcttgggcggcctctgaatggagcgaatgtctcgtgacgtgtggtaaggggacaaaacagaggcaagtttggtgtcagttgaacgtggaccacctctcagacggattttgtaattcttccacgaagcctgaatctctgagcccctgcgaacttcacacttgcgcctcatggcaggtgggtccttggggcccctgtacaactacttgtggccatgggtaccaaatgagagatgttaaatgtgtcaatgagcttgcaagcgccgtgctcgaggataccgagtgtcatgaggctagccggccttccgatagacagagctgtgtgctgaccccctgctcatttatcagtaagctggaaaccgccctgctgcccacggttcttattaaaaagatggcacagtggcgccacggaagctggacaccctgcagtgtaagctgtggaagagggacccaggcccgctacgtcagttgcagggatgcgcttgaccgaatcgctgacgagtcatattgtgctcatctcccaaggccagccgaaatttgggattgctttaccccatgcggcgagtggcaagcaggcgactggagtccttgttctgcaagctgtgggcacggcaagacaacccgccaagtgctgtgcatgaattaccaccaacctatcgacgagaactactgtgatccagaagtccgccccctgatggagcaggagtgctctctggccgcttgcccccccgcccatagccatttcccaagctcccctgtgcagccctcctattatctgtctaccaaccttccgcttacgcagaaactggaagacaatgagaaccaggttgtgcacccatcggtgcggggaaatcaatggcggacgggcccatggggtagctgctcctcttcgtgctcagggggactgcaacaccgggcagttgtttgccaggacgagaatggccagtcagcgtcctactgcgacgcagcgagcaagccccctgagctgcagcagtgcgggcccggcccctgccctcagtggaattatggcaactggggagagtgcagccagacttgcggcggtggcataaagtcaagactggtcatttgccagttccccaacgggcagatcctggaagaccataattgtgagatcgtgaataaacccccgagcgtgatccagtgccacatgcatgcctgcccagccgacgttagttggcaccaggaaccttggacctctgaagacttgaaagtcaaacttttaccccagaggaccataatactgtgggagttgatgaagaatattttctgtcacgggaagcacagtcatatgtacctgatcaacgtcgtaacagatcatctcttatacccacgtcactgcgaccccgagactatcgaaacctacttcttgagtctgtggtccctgcagtttacctggggcgatctgaagtattacaagaatagtctctag

SEQ ID NO: 217675 - DNA, 5733 bp, Artificial Sequence
  derived and/or modified sequence
atgtgggtcgccaagtggctcacgggtcttttgtatcacctctctttgtttattacgcgatcctgggaggtggacttccatcctcgacaggaggctttagttaggaccttgacaagctatgaagtagtcatcccggagcgtgttaacgagtttggagaggtctttccacagtctcaccatttcagtaggcaaaaacgttcaagcgaggccctagaacctatgcccttccgcacgcactatcggttcaccgcctatgggcagcttttccagctaaacctgactgccgacgctagttttcttgccgccggatacactgaggtgcacctgggaacacctgagcgaggagcttgggagtccgatgctggtccgagtgatctcagacattgtttctataggggccaggtaaactctcaggaggattataaggccgtcgtgtccttatgcgggggtctaaccggaacttttaaaggtcagaatggcgagtactttcttgagcccataatgaaggccgacgggaatgaatacgaagatggccataacaagcctcacctcatctaccgtcaggacctaaataattcctttctccagacgctgaagtactgtagcgtgagcgagtcccagattaaggagacatccctgcctttccatacttattcaaatatgaatgaggacctgaatgtcatgaaagaacgggtactgggccatacatctaagaacgtccctttgaaggacgaaaggaggcactcccgtaagaagcgcctgatctcttacccccgatacatcgagatcatggtgaccgccgacgcaaaagtcgtctcagcccacggcagtaacctccagaactacattctcacactgatgagcatagtggccactatttataaagaccccagtataggcaatctgattcacatcgtggtggtcaaactggtgatgatccaccgggaagaggaggggcccgtcattaacttcgacggcgccacaactctaaagaacttctgtagttggcagcaaacccagaatgacttagacgacgtccaccccagtcaccatgacacggccgttttaatcactagagaggatatctgttcgtccaaggaaaaatgtaatatgctgggcctgagttacctgggtacgatttgcgacccactgcagagctgcttcatcaatgaggagaaagggctgatttccgccttcacaatcgcccatgaattgggtcacacattaggcgtgcagcacgatgataaccctcgctgtaaagagatgaaggtgactaagtatcacgtcatggccccggcattatcttttcatatgagcccttggtcttggtcaaattgctcacgaaaatacgtgacagaattcttggacacaggttacggggaatgccttttagacaaaccagatgaagaaatttacaacctgcccagcgaactccccggcagccgctacgacggcaataaacaatgcgaactagccttcggccccggctctcagatgtgtccacatatcaacatatgtatgcatttatggtgcacttctacggagaaattgcataagggttgctttacccaacacgtcccgcctgccgacggcaccgattgcggtcccggcatgcattgtagacacggactgtgcgtgaacaaggagaccgagactagacccgtgaacggcgagtgggggccatgggaaccttatagtagttgtagccgcacatgtggaggtgggatagagtcggcaacccggcgatgtaatcgcccggaacctaggaacggcggcaactattgtgtcggccgtaggatgaagtttaggagctgtaacacagatagctgtccaaaaggcactcaggatttcagggaaaagcaatgtagcgacttcaacggaaagcacttggacatcagcgggatcccttcaaacgtcagatggctccccagatacagcgggatcggcactaaggacaggtgtaaactgtactgtcaggtggccgggacaaactacttttaccttctaaaagacatggttgaagacggtactccttgtggtacggaaacccatgacatctgtgtacagggccagtgcatggctgccggatgtgaccacgtgttgaatagcagcgcgaagattgacaagtgtggggtgtgcggcggagataactcatcgtgcaaaactatcaccggtgtgtttaactcaagccactacggttacaacgttgtggtgaagatccctgccggcgccactaatgtcgacattaggcagtactcgtatagtgggcagcccgatgattcttatctagcgctatcagacgctgaggggaatttcttgtttaacgggaacttccttctgtccaccagtaagaaggagattaatgttcaggggacacggacagtgattgaatactcgggcagtaacaacgccgtggagcgtataaattcaacgaataggcaggaaaaagagctgatcttacaagtgttgtgtgtcggtaatctctataatccagatgtgcactatagcttcaatataccgctagaagagcggagcgacatgtttacctgggacccgtatggcccctgggagggctgtacaaagatgtgccaggggttgcagcgaagaaacattacatgtatccacaagtccgatcacagtgtagtctccgacaaagagtgtgatcaccttccacttccttcgttcgtcacccagtcctgtaacacagactgtgaactccgctggcacgtaatcggtaagtcagaatgttcctcccagtgcgggcagggctatcgcaccctggacatccactgtatgaaatacagcatacacgaaggccagacagtgcaggtcgatgatcactactgtggcgatcagctgaagccccctacacaagaactgtgccatggaaattgcgtgtttacacggtggcattactctgaatggtcccagtgctcaagatcctgtggggggggagaaaggtcacgcgaatcatattgtatgaataatttcgggcatcgcttagctgataatgaatgccaggagctctcccgggtgaccagagagaactgcaacgagttctcctgcccatcatgggctgcatcagaatggagtgagtgcctcgttacctgtggaaaggggacaaagcagcggcaagtgtggtgccagctcaatgtagatcacctgtccgatggtttctgcaacagttccactaagcctgagtctctgagtccttgtgaattacacacctgcgcctcttggcaagtggggccgtggggtccttgcactacaacctgtggccacgggtatcagatgagagatgtcaagtgcgtcaatgagcttgcctctgccgtcctcgaggatacggaatgccacgaagcgtccaggccgtccgatcgacagtcgtgcgtacttacgccatgcagcttcattagcaagctcgagactgcgctgctgccgacagtgctcattaagaaaatggcgcaatggaggcatgggtcctggaccccctgttctgtcagttgcgggagaggaacacaggcccggtatgtgagctgtcgtgacgcgcttgatcggatagccgacgagtcatattgcgctcatctgccaagacccgcagagatttgggattgtttcactccctgcggggagtggcaagccggggactggagtccctgcagcgccagttgcggccacggcaaaaccacacgccaggtgctttgcatgaattatcaccagcccattgatgagaactattgcgatcctgaagttcgccctctgatggaacaggaatgttccctggcagcatgccctcccgctcattctcacttcccaagttctcctgtccagcccagctactacctgtctactaatctgcccctgactcagaagctggaggataacgaaaaccaggtggtgcatccctccgtccgcgggaaccagtggcggaccggtccatggggtagttgctcatcttcctgttctggaggtttgcaacacagggccgtggtttgccaggatgagaatgggcagtccgcctcctactgcgacgccgcctccaaacccccagagctgcagcagtgtgggcctgggccctgtcctcaatggaattatggtaactggggtgagtgttcccagacttgtggggggggaatcaagtcaaggctggtgatctgtcaatttccaaatgggcagattcttgaagaccataattgtgagattgtcaataagccaccaagcgttatccagtgccatatgcatgcctgtcccgccgatgtttcctggcatcaagaaccatggacaagttgcagcgcatcatgtgggaaaggcaggaagtatcgtgaggtcttctgcatcgaccaattccagcgcaagctggaagacaccaactgctcacaggtacagaaaccccctactcacaaagcatgccgatctgtgagatgccctagttggaaggctaattcctggaacgagtgctctgtgacatgcggtagtggggtgcagcaacgggatgtctattgccggctgaagggggtcggacaggtggtagaagagatgtgtgatcagtccacccgcccctgctcccaacggaggtgttggagccaggactgcgtgcagcacaagggcatggagcgaggacgtctgaactgttctacgtcttgcgaacgcaaagattcccaccaacgaatggagtgtacggataatcagatcaggcaggtcaacgagattgtctacaacagctcaacaatatcgctgacgtcaaagaattgtcgcaatccaccctgcaattatatagtagttaccgccgatagcagtcagtgtgccaataactgtggattcagttaccgtcagaggatcacttactgtaccgagatccccagcaccaaaaagcacaagctgcatcggttacgtcctatcgtgtatcaagaatgtcctgttgtgccaagctcacaggtctaccagtgtatcaattcctgtctgcatctggccacctggaaggttggcaaatggagcaagtgttctgtcacttgtgggatcggtattatgaagcggcaggtaaagtgcataaccaaacatggcctctcttcggacctgtgcctgaatcatctgaaaccaggagcacagaagaagtgctacgctaatgattgtaaatctttcactacctgcaaggaaatccaggtgaagaatcacataaggaaagacggagactactatctgaatatcaagggccgcatcatcaagatttactgtgccgacatgtacctggagaacccaaaggaataccttacgctggtgcagggtgaggagaacttttctgaagtgtatggatttagactgaagaatccctaccagtgccctttcaacggctcaagaagagaagattgcgagtgtgataacggccatcttgcagcagggtacactgtctttagtaaaatccgaattgatctcactagcatgcagataaagactaccgatctcctgttctccaaaactatcttcggcaatgctgtgccttttgcaaccgctggtgattgttactccgcatttcgctgtccccaaggacaattttctatcaaccttagcggcaccggaatgaagatctctagcaccgccaaatggcttactcagggctcatacacgtcggtgtcaatccggcgctctgaggatggaaccagattcttcggcaaatgcggtggatattgtggtaaatgcctaccacatatgactacgggcctccccattcaggttatctag

SEQ ID NO: 217676 - DNA, 1869 bp, Artificial Sequence
  derived and/or modified sequence
atgtttacctgggacccatacgggccgtgggaaggctgcacaaaaatgtgtcaagggcttcagcgaaggaacatcacatgcatccacaaatcagaccacagcgttgtctccgataaggaatgcgatcacctccctctcccgtctttcgttacccagtcttgcaacactgattgcgagctgcggtggcacgtgatcggaaagtccgaatgttcatctcagtgtggacagggctaccgcaccctcgacatccactgcatgaagtattctattcatgagggacaaaccgttcaggtggatgatcattactgtggtgatcagctaaagccgcctactcaggaactgtgccacggcaattgtgtgttcactcgctggcattacagtgaatggagtcagtgctctcgatcctgcggtgggggagagaggtcacgggagtcttattgtatgaacaacttcgggcataggctagcagacaacgagtgtcaggaactttcccgagtcacacgcgaaaactgtaacgagttctcctgtccctcctgggcggcatcagaatggtccgaatgtctcgttacttgcgggaagggcactaagcagcgccaggtgtggtgccagctgaacgtcgatcatttaagcgacggattttgtaactctagcaccaagccagagagcctttctccctgcgagttgcatacatgtgcatcctggcaggtgggcccatgggggccctgcacaaccacatgcggccacggataccaaatgagggatgtgaagtgtgtgaacgagctggctagcgctgtgctggaagacactgagtgtcatgaggcctcccggccctcagaccggcagtgtagcgtgagttgtggcagggggacccaggccagatacgtcagttgcagagacgcactggaccggattgctgacgagtcatactgtgcccacttacctcggccagcagagatttgggattgtttcaccccttgtggggagtggcaggccggagattggtcaccctgctccgcatcatgtggtcacggcaaaactactcggcaggtgttatgtatgaactatcaccagcccattgatgagaactactgcgaccccgaagttcggcctttaatggagcaggagtgttctctggcagcatgtccaccggcccactcccacttccccagttcccccgtccagccaagctactacctttctaccaacttgcccctcacacagaagctggaggataatgagaatcaggtggttcatcctagcgtccgggggaatcagtggcgcacaggcccttggggaagttgcagctcctcctgctctggcggcttacaacaccgtgcagtggtgtgtcaagacgagaacgggcagtctgcaagttactgtgatgcagcttccaagccgccggagctccagcagtgcggacccggcccatgtccccagtggaactatggcaattggggcgagtgtagtcagacctgcggtggcggaattaaatcacggttagtgatttgtcagttccccaatggccaaatccttgaggatcataactgcgagatcgttaataagccaccatccgtaattcaatgtcacatgcatgcctgtcctgccgacgtatcatggcaccaggaaccttggactagtgaagatctcaaggtgaaactgctgccgcagagaacaattatactgtgggagcttatgaagaacatcttttgtcacggcaagcactctcacatgtatctgatcaatgtggttacagatcaccttctttatccccggcactgtgaccccgagaccatagaaacttactttttatcattatggagtctccagtttacatggggggatctgaagtattataaaaatagcctctag

SEQ ID NO: 217677 - DNA, 4515 bp, Artificial Sequence
  derived and/or modified sequence
atgtgggtcgccaagtggctgactggactcctttaccacctgtccctattcattacacggtcctgggaagtggacttccacccaagacaggaggctcttgtccggacccttacatcctacgaagtcgtaatacccgagagagtgaatgaatttggcgaggtgttcccacagtcccaccacttttcgcgtcagaaaaggtccagcgaggccttggagccaatgccttttcgaacacattacaggttcacagcatacgggcagctattccagttgaatctaacagctgatgcctcgtttttggcagctggatatacagaggttcaccttggcacacctgaacgaggtgcgtgggaaagtgacgcgggcccctcagacttgcggcattgcttctatagaggacaggtgaatagccaggaggactacaaagctgtggtgagcctgtgtggcggactgacgggcacctttaaaggacaaaacggtgaatactttctagagcctatcatgaaggcggacggcaatgagtacgaggatggtcacaacaaacctcacctgatttacaggcaggacctaaacaatagctttttgcagactctgaagtactgctcagtgtcagagagccagattaaggaaacatccctgccttttcatacatattcaaatatgaatgaagatctgaacgttatgaaggaaagggtgttggggcacacctcaaaaaatgtccccctcaaagatgagcggcggcactcaagaaagaagagactcatctcatatccaaggtacatcgaaatcatggtgacagccgacgccaaggtcgtgtctgctcacggatccaatctccagaattatatattaacactgatgtcaattgtagctaccatatacaaggaccctagcattggaaatttaatccacattgtggttgtcaaattggtaatgatccacagagaagaggagggccctgtgatcaatttcgacggtgccactaccctcaaaaatttttgttcatggcaacaaactcagaatgatttagacgacgtgcacccaagtcaccacgacactgccgtgttaattacccgagaggacatttgtagcagcaaggagaagtgcaacatgttggggttatcgtatctcgggactatatgtgatccgctgcagagctgttttattaatgaagagaagggcctaatctccgctttcaccatcgcacatgaactgggtcacaccctgggtgtgcagcacgacgacaatcccagatgtaaagagatgaaagtgacaaaatatcacgtgatggcacctgcgctgagtttccatatgtcaccttggagttggtcgaactgttcgagaaaatatgtgactgaattcctggataccggctatggtgaatgtcttctggataaacccgatgaggagatctacaatcttcccagtgaactgcccggtagcagatatgatggcaacaagcagtgtgaacttgctttcggacccgggagccagatgtgtcctcacattaacatttgtatgcatctgtggtgtacctcaacagagaagctccataagggctgtttcacccagcacgttccaccagccgacggaaccgactgtgggcccggcatgcactgcaggcacggcctgtgcgtgaacaaagaaacagagacaaggcccgtaaatggcgagtggggaccctgggagccgtatagctcctgttcacggacctgcggcggggggatcgagtctgctacaaggaggtgtaaccgccctgagccgcggaacggaggcaactattgtgtaggtagacggatgaagttccgctcgtgcaacacagatagctgtcctaagggtacccaggacttcagagagaaacagtgttctgacttcaatggaaagcatttagatatttccggcatcccgtccaatgtgcgttggctgccccggtactccggaatcggcacgaaggatcgttgtaaactgtactgccaggtcgccggtactaattacttttacctcttgaaagatatggtggaagacggtactccctgcggcactgagacccacgatatctgtgttcagggacagtgcatggcagcaggctgcgaccatgtcctgaacagttcagctaagattgacaaatgtggtgtttgtggtggcgataatagttcatgcaaaacaattaccggggtctttaacagctctcattacggatacaacgtggtggtgaaaatccctgcgggcgccacaaacgtggacatccgccagtatagctacagcggacagccagatgacagctatcttgcgctgagcgatgccgagggtaactttttgttcaatgggaattttctgctgagcacatctaagaaggagatcaacgtccagggcacgcgcacagtgattgagtattcaggttctaacaacgcagttgagcggattaacagtacaaatcgacaggagaaagagctgatcctgcaagtcctctgtgtaggtaatctttacaacccagatgttcattacagcttcaacataccgctagaggaaagaagtgatatgtttacctgggacccctatgggccatgggaaggttgcacgaagatgtgccagggcttacaacggcgtaacattacttgtatccataaatctgaccactccgtagtgagcgataaggagtgcgatcacctccctctgccatcgttcgttacccagagttgtaacactgattgcgaacttaggtggcacgtgatcggcaaaagcgagtgttcctcccagtgtggccagggatatagaacactggatattcattgcatgaagtattctattcatgaagggcagacagtgcaggtggatgaccactactgcggggatcagctcaaaccccccacccaagagctgtgccacggcaattgcgttttcacgcggtggcattacagtgagtggtctcagtgttccagaagctgcggagggggtgagagaagccgcgagagctactgtatgaataattttggccatagattagcggataacgagtgccaggagctgtctagggttacgcgggaaaattgtaatgaattcagctgccccagctgggcagcatctgagtggagtgaatgcctggttacttgtggaaaaggcaccaaacaacggcaggtttggtgccaactgaatgtagatcatttatcggacggcttttgcaatagttccaccaagcctgaatccctgagtccttgtgaattgcatacctgtgctagctggcaggttggcccatgggggccgtgtaccacgacctgcggacacggatatcagatgagggacgtgaagtgcgtcaatgagcttgcctctgccgtgctagaagacacagaatgccatgaggcgtctcgcccctctgaccggcagtcgtgtgtactgactccctgtagtttcataagtaaactggaaaccgctctcctaccaacagtactgataaagaagatggcgcagtggaggcacgggtcctggacaccttgctctgtgtcatgcggcagggggactcaggcccgctacgtgagctgccgggatgcactggacagaatcgccgacgaaagctattgtgcccacctgccaagaccagccgaaatttgggattgcttcactccgtgcggcgaatggcaggccggagattggagcccgtgcagcgctagttgtggccatggcaagaccactcgccaagtgctgtgcatgaactaccaccagcccatcgatgagaactattgcgacccagaagttaggccgctgatggagcaggagtgttccctcgccgcctgccctccggcacactcacactttccttcgagccctgtgcagcctagctattacctaagtaccaacttgcctcttactcagaaactggaggacaacgagaaccaagtggtccacccatcggtccgggggaatcagtggcgcacaggtccatggggctcctgctcctctagttgtagcgggggactccaacacagggccgtggtttgccaagacgagaatggtcagagtgccagctattgtgacgctgcatccaaaccccccgagttgcaacagtgcggtcccggaccatgtccgcagtggaattacggaaactggggagagtgctctcagacttgcggcggcgggatcaaaagtcggctggtcatttgccaattccccaatggccagattctcgaagaccataactgcgagatcgtgaacaagcccccgtccgtcattcagtgccatatgcatgcgtgccccgccgatgtgtcttggcaccaagaaccatggacatccgaggatttaaaagttaagctgctgccacaacgcaccataattctgtgggagctgatgaagaacatcttctgccacggtaaacacagccacatgtatctcattaacgtagttactgaccatctgctctaccctagacattgtgatcctgaaacgatcgaaacatattttctttccctgtggagcctgcagttcacctggggtgacctcaagtactataagaattccctgtag

SEQ ID NO: 217678 - DNA, 4515 bp, Artificial Sequence
  derived and/or modified sequence
atgtgggtggccaagtggctgaccggcctgctgtaccacctgagcctcttcatcaccaggtcctgggaggtggacttccacccccggcaggaggccctggtgaggaccctgaccagctatgaggtggtgattcctgagcgggtgaatgaatttggagaggtgttcccccagagccaccacttcagccggcagaagaggagcagcgaggccctggagcccatgcccttccgcacccactaccgcttcaccgcctacggccagctgttccagctgaacctgacagcagatgccagcttcctggccgccggctacacagaggtgcacctgggcaccccagagcggggggcctgggagagtgatgctggccccagcgacctgcggcactgcttctaccggggccaggtgaacagccaggaggactacaaggctgtggtgtccctgtgtggcggcctgaccggcaccttcaagggccagaatggagagtacttcctggagcccatcatgaaggcagatggaaatgaatatgaagatggccacaacaagccccacctgatctaccggcaggacctgaacaacagcttcctgcagaccctgaagtactgcagcgtgtctgagagccagatcaaggagaccagcctgcccttccacacctacagcaacatgaatgaagacctgaatgtgatgaaggagcgggtgctgggccacaccagcaagaatgtgcccctgaaggatgagcggcggcacagcaggaagaagaggctcatctcctacccccgctacatcgagatcatggtgacagcagatgccaaggtggtgtctgcccacggcagcaacctgcagaactacatcctgaccctgatgagcatcgtggccaccatctacaaggaccccagcatcggcaacctgatccacatcgtggtggtgaagctggtgatgatccaccgggaggaggagggccctgtgatcaactttgatggagccaccaccctgaagaacttctgctcctggcagcagacccagaatgacctggatgatgtgcaccccagccaccacgacacagctgtgctgatcacccgggaggacatctgcagcagcaaggagaagtgcaacatgctgggcctgagctacctgggcaccatctgtgaccccctgcagagctgcttcatcaatgaggagaagggcctcatcagcgccttcaccatcgcccacgagctgggccacaccctgggcgtgcagcatgatgacaacccccgctgcaaggagatgaaggtgaccaagtaccacgtgatggccccagccctgtccttccacatgagcccctggagctggagcaactgcagcaggaaatatgtgacagagttcctggacaccggctatggagaatgtctgctggacaagccagatgaggagatctacaacctgcccagcgagctgcccggcagccgctatgatggcaacaagcagtgtgagctggcctttggacctggcagccagatgtgcccccacatcaacatctgcatgcacctgtggtgcaccagcacagagaagctgcacaagggctgcttcacccagcacgtgcccccagcagatggaacagactgtggccctggcatgcactgccgccacggcctgtgtgtgaacaaggagacagagaccaggcctgtgaatggagagtggggcccctgggagccctacagcagctgcagcaggacctgtggcggcggcatcgagagcgccacccggcgctgcaacagacctgagcccagaaatggaggcaactactgtgtgggccgcaggatgaagttccgcagctgcaacacagacagctgccccaagggcacccaggacttccgggagaagcagtgcagcgacttcaacgggaagcacctggacatcagcggcatccccagcaatgtgcgctggctgccccgctacagcggcatcggcaccaaggaccgctgcaagctgtactgccaggtggccggcaccaactacttctacctgctgaaggacatggtggaggatggcaccccctgtggcacagagagctacaacatcgactgcaactgtgtgctgaaggctgctggctgtgaccacgtgctgaacagcagcgccaagattgacaagtgtggggtgtgtggcggggacaacagcagctgcaagaccatcaccggggtcttcaacagcagccactacggctacaacgtggtggtgaagatcccagctggggccaccaacgtggacatccggcagtacagctacagcggccagccagatgacagctacctggccctgagtgatgctgagggcaacttcctgttcaatggaaacttcctgctgagcaccagcaagaaggagatcaacgtgcagggcaccaggacagtcatcgagtacagcggcagcaacaatgctgtggagcgcatcaacagcaccaaccggcaggagaaggagatcctgattgaggtgctgtgtgtgggcaacctgtacaacccagatgtgcactacagcttcaacatccccctggaggagaggagtgacatgttcacctgggacccctacggcccctgggagggctgcaccaagatgtgccagggcctgcagaggaggaacatcacctgcatccacaagagtgaccacagcgtggtgtctgacaaggaatgtgaccacctgcccctgcccagctttgtgacccagagctgcaacacagactgtgagctgcgctggcacgtgattggcaagtcagaatgtagcagccagtgtggccagggctaccgcaccctggacatccactgcatgaagtacagcatccacgagggccagacagtgcaggtggatgaccactactgtggggaccagctgaagccacccacccaggagctgtgccacggcaactgtgtgttcacccgctggcactacagcgagtggagccagtgcagccgcagctgtggcggcggggagaggagccgggagagctactgcatgaacaactttggccaccggctggccgacaatgaatgccaggagctgagccgggtgacccgggagaactgcaatgagttcagctgccccagctgggccgccagcgagtggagcgagtgcctggtgacctgtgggaagggcaccaagcagaggcaggtgtggtgccagctgaatgtggaccacctgagtgatggcttctgcaacagcagcaccaagccagagagcctgagcccctgtgagctgcacacctgtgcctcctggcaggtgggcccctggggcccctgcaccaccacctgtggccacggctaccagatgagagatgtgaagtgtgtgaatgagctggccagcgctgtgctggaggacacagagtgccacgaggccagccggcccagcgaccggcagagctgtgtgctgaccccctgcagcttcatcagcaagctggagacagccctgctgcccaccgtgctgatcaagaagatggcccagtggaggcatggctcctggaccccctgcagcgtgtcctgtggccggggcacccaggcccgctacgtgtcctgcagagatgccctggacagaattgctgatgagagctactgtgcccacctgcccaggcctgctgagatctgggactgcttcaccccctgtggggagtggcaggccggggactggagcccctgcagcgccagctgtggccacggcaagaccacccggcaggtgctgtgcatgaactaccaccagcccattgatgagaactactgtgaccctgaggtgcggcccctgatggagcaggagtgcagcctggccgcctgccccccagcccacagccacttccccagcagccctgtgcagcccagctactacctgagcaccaacctgcccctgacccagaagctggaggacaatgaaaaccaggtggtgcaccccagcgtgcggggcaaccagtggaggacaggcccctggggcagctgcagcagcagctgcagcggcggcctgcagcacagagctgtggtgtgccaggatgaaaatggccagagcgccagctactgtgatgctgccagcaagcccccagagctgcagcagtgtggccctggcccctgcccccagtggaactacggcaactggggagaatgttcccagacctgtggcggcggcatcaagagccggctggtgatctgccagttccccaacggccagatcctggaggaccacaactgtgagatcgtgaacaagccacccagcgtcatccagtgccacatgcacgcctgcccagcagatgtgtcctggcaccaggagccctggaccagcgaggacctgaaggtgaagctgctgccccagaggaccatcatcctgtgggagctgatgaagaacatcttctgccacggcaagcacagccacatgtacctgatcaacgtggtgacagaccacctgctgtaccccaggcactgtgaccctgagaccatcgagacctacttcctgagcctgtggagcctgcagttcacctggggagacctgaagtactacaagaacagcctgtag

SEQ ID NO: 217679 - DNA, 5733 bp, Artificial Sequence
  derived and/or modified sequence
atgtgggtggccaagtggctgaccggcctgctgtaccacctgagcctcttcatcaccaggtcctgggaggtggacttccacccccggcaggaggccctggtgaggaccctgaccagctatgaggtggtgattcctgagcgggtgaatgaatttggagaggtgttcccccagagccaccacttcagccggcagaagaggagcagcgaggccctggagcccatgcccttccgcacccactaccgcttcaccgcctacggccagctgttccagctgaacctgacagcagatgccagcttcctggccgccggctacacagaggtgcacctgggcaccccagagcggggggcctgggagagtgatgctggccccagcgacctgcggcactgcttctaccggggccaggtgaacagccaggaggactacaaggctgtggtgtccctgtgtggcggcctgaccggcaccttcaagggccagaatggagagtacttcctggagcccatcatgaaggcagatggaaatgaatatgaagatggccacaacaagccccacctgatctaccggcaggacctgaacaacagcttcctgcagaccctgaagtactgcagcgtgtctgagagccagatcaaggagaccagcctgcccttccacacctacagcaacatgaatgaagacctgaatgtgatgaaggagcgggtgctgggccacaccagcaagaatgtgcccctgaaggatgagcggcggcacagcaggaagaagaggctcatctcctacccccgctacatcgagatcatggtgacagcagatgccaaggtggtgtctgcccacggcagcaacctgcagaactacatcctgaccctgatgagcatcgtggccaccatctacaaggaccccagcatcggcaacctgatccacatcgtggtggtgaagctggtgatgatccaccgggaggaggagggccctgtgatcaactttgatggagccaccaccctgaagaacttctgctcctggcagcagacccagaatgacctggatgatgtgcaccccagccaccacgacacagctgtgctgatcacccgggaggacatctgcagcagcaaggagaagtgcaacatgctgggcctgagctacctgggcaccatctgtgaccccctgcagagctgcttcatcaatgaggagaagggcctcatcagcgccttcaccatcgcccacgagctgggccacaccctgggcgtgcagcatgatgacaacccccgctgcaaggagatgaaggtgaccaagtaccacgtgatggccccagccctgtccttccacatgagcccctggagctggagcaactgcagcaggaaatatgtgacagagttcctggacaccggctatggagaatgtctgctggacaagccagatgaggagatctacaacctgcccagcgagctgcccggcagccgctatgatggcaacaagcagtgtgagctggcctttggacctggcagccagatgtgcccccacatcaacatctgcatgcacctgtggtgcaccagcacagagaagctgcacaagggctgcttcacccagcacgtgcccccagcagatggaacagactgtggccctggcatgcactgccgccacggcctgtgtgtgaacaaggagacagagaccaggcctgtgaatggagagtggggcccctgggagccctacagcagctgcagcaggacctgtggcggcggcatcgagagcgccacccggcgctgcaacagacctgagcccagaaatggaggcaactactgtgtgggccgcaggatgaagttccgcagctgcaacacagacagctgccccaagggcacccaggacttccgggagaagcagtgcagcgacttcaacgggaagcacctggacatcagcggcatccccagcaatgtgcgctggctgccccgctacagcggcatcggcaccaaggaccgctgcaagctgtactgccaggtggccggcaccaactacttctacctgctgaaggacatggtggaggatggcaccccctgtggcacagagacccatgacatctgtgtgcagggccagtgcatggctgctggctgtgaccacgtgctgaacagcagcgccaagattgacaagtgtggggtgtgtggcggggacaacagcagctgcaagaccatcaccggggtcttcaacagcagccactacggctacaacgtggtggtgaagatcccagctggggccaccaacgtggacatccggcagtacagctacagcggccagccagatgacagctacctggccctgagtgatgctgagggcaacttcctgttcaatggaaacttcctgctgagcaccagcaagaaggagatcaacgtgcagggcaccaggacagtcatcgagtacagcggcagcaacaatgctgtggagcgcatcaacagcaccaaccggcaggagaaggagctgatcctgcaggtgctgtgtgtgggcaacctgtacaacccagatgtgcactacagcttcaacatccccctggaggagaggagtgacatgttcacctgggacccctacggcccctgggagggctgcaccaagatgtgccagggcctgcagaggaggaacatcacctgcatccacaagagtgaccacagcgtggtgtctgacaaggaatgtgaccacctgcccctgcccagctttgtgacccagagctgcaacacagactgtgagctgcgctggcacgtgattggcaagtcagaatgtagcagccagtgtggccagggctaccgcaccctggacatccactgcatgaagtacagcatccacgagggccagacagtgcaggtggatgaccactactgtggggaccagctgaagccacccacccaggagctgtgccacggcaactgtgtgttcacccgctggcactacagcgagtggagccagtgcagccgcagctgtggcggcggggagaggagccgggagagctactgcatgaacaactttggccaccggctggccgacaatgaatgccaggagctgagccgggtgacccgggagaactgcaatgagttcagctgccccagctgggccgccagcgagtggagcgagtgcctggtgacctgtgggaagggcaccaagcagaggcaggtgtggtgccagctgaatgtggaccacctgagtgatggcttctgcaacagcagcaccaagccagagagcctgagcccctgtgagctgcacacctgtgcctcctggcaggtgggcccctggggcccctgcaccaccacctgtggccacggctaccagatgagagatgtgaagtgtgtgaatgagctggccagcgctgtgctggaggacacagagtgccacgaggccagccggcccagcgaccggcagagctgtgtgctgaccccctgcagcttcatcagcaagctggagacagccctgctgcccaccgtgctgatcaagaagatggcccagtggaggcatggctcctggaccccctgcagcgtgtcctgtggccggggcacccaggcccgctacgtgtcctgcagagatgccctggacagaattgctgatgagagctactgtgcccacctgcccaggcctgctgagatctgggactgcttcaccccctgtggggagtggcaggccggggactggagcccctgcagcgccagctgtggccacggcaagaccacccggcaggtgctgtgcatgaactaccaccagcccattgatgagaactactgtgaccctgaggtgcggcccctgatggagcaggagtgcagcctggccgcctgccccccagcccacagccacttccccagcagccctgtgcagcccagctactacctgagcaccaacctgcccctgacccagaagctggaggacaatgaaaaccaggtggtgcaccccagcgtgcggggcaaccagtggaggacaggcccctggggcagctgcagcagcagctgcagcggcggcctgcagcacagagctgtggtgtgccaggatgaaaatggccagagcgccagctactgtgatgctgccagcaagcccccagagctgcagcagtgtggccctggcccctgcccccagtggaactacggcaactggggagaatgttcccagacctgtggcggcggcatcaagagccggctggtgatctgccagttccccaacggccagatcctggaggaccacaactgtgagatcgtgaacaagccacccagcgtcatccagtgccacatgcacgcctgcccagcagatgtgtcctggcaccaggagccctggaccagctgcagcgccagctgtgggaaaggaaggaagtaccgggaggtgttctgcatcgaccagttccagaggaagctggaggacaccaactgcagccaggtgcagaagccacccacccacaaggcctgccgctctgtgcgctgccccagctggaaggccaacagctggaatgaatgttctgtgacctgtggcagcggcgtgcagcagagagatgtgtactgccgcctgaagggcgtgggccaggtggtggaggagatgtgtgaccagagcacccggccctgcagccagaggcgctgctggagccaggactgtgtgcagcacaagggcatggagcggggccgcctgaactgcagcaccagctgtgagaggaaggacagccaccagaggatggagtgcacagacaaccagatccggcaggtgaatgaaattgtgtacaacagcagcaccatcagcctgaccagcaagaactgcaggaaccccccctgcaactacatcgtggtgacagctgacagcagccagtgtgccaacaactgtggcttctcctaccggcagaggatcacctactgcacagagatccccagcaccaagaagcacaagctgcaccggctgcggcccatcgtgtaccaggagtgccctgtggtgcccagcagccaggtgtaccagtgcatcaacagctgcctgcacctggccacctggaaggtgggcaagtggagcaaatgttctgtgacctgtggcatcggcatcatgaagaggcaggtgaagtgcatcaccaagcacggcctgagcagtgacctgtgcctgaaccacctgaagccaggggcccagaagaagtgctacgccaatgactgcaagagcttcaccacctgcaaggagatccaggtgaagaaccacatcaggaaggatggagactactacctgaacatcaagggccgcatcatcaagatctactgtgccgacatgtacctggagaaccccaaggagtacctgaccctggtgcagggcgaggagaacttcagcgaggtgtatggcttccggctgaagaacccctaccagtgccccttcaacggcagccggcgggaggactgtgaatgtgacaatggccacctggccgccggctacaccgtcttcagcaagatcagaattgacctgacctccatgcagatcaagaccacagacctgctcttcagcaagaccatctttggaaatgctgtgccctttgccacagctggggactgctacagcgccttccgctgcccccagggccagttcagcatcaacctgagcggcaccggcatgaagatcagcagcacagccaagtggctgacccagggcagctacacctctgtgtccatccgccgctcagaagatggcacccgcttctttggaaaatgtggcggctactgtgggaagtgcctgccccacatgaccaccggcctgcccatccaggtgatctag

SEQ ID NO: 217680 - DNA, 1869 bp, Artificial Sequence
  derived and/or modified sequence
atgttcacctgggacccctacggcccctgggagggctgcaccaagatgtgccagggcctgcagaggaggaacatcacctgcatccacaagagtgaccacagcgtggtgtctgacaaggaatgtgaccacctgcccctgcccagctttgtgacccagagctgcaacacagactgtgagctgcgctggcacgtgattggcaagtcagaatgtagcagccagtgtggccagggctaccgcaccctggacatccactgcatgaagtacagcatccacgagggccagacagtgcaggtggatgaccactactgtggggaccagctgaagccacccacccaggagctgtgccacggcaactgtgtgttcacccgctggcactacagcgagtggagccagtgcagccgcagctgtggcggcggggagaggagccgggagagctactgcatgaacaactttggccaccggctggccgacaatgaatgccaggagctgagccgggtgacccgggagaactgcaatgagttcagctgccccagctgggccgccagcgagtggagcgagtgcctggtgacctgtgggaagggcaccaagcagaggcaggtgtggtgccagctgaatgtggaccacctgagtgatggcttctgcaacagcagcaccaagccagagagcctgagcccctgtgagctgcacacctgtgcctcctggcaggtgggcccctggggcccctgcaccaccacctgtggccacggctaccagatgagagatgtgaagtgtgtgaatgagctggccagcgctgtgctggaggacacagagtgccacgaggccagccggcccagcgaccggcagtgcagcgtgtcctgtggccggggcacccaggcccgctacgtgtcctgcagagatgccctggacagaattgctgatgagagctactgtgcccacctgcccaggcctgctgagatctgggactgcttcaccccctgtggggagtggcaggccggggactggagcccctgcagcgccagctgtggccacggcaagaccacccggcaggtgctgtgcatgaactaccaccagcccattgatgagaactactgtgaccctgaggtgcggcccctgatggagcaggagtgcagcctggccgcctgccccccagcccacagccacttccccagcagccctgtgcagcccagctactacctgagcaccaacctgcccctgacccagaagctggaggacaatgaaaaccaggtggtgcaccccagcgtgcggggcaaccagtggaggacaggcccctggggcagctgcagcagcagctgcagcggcggcctgcagcacagagctgtggtgtgccaggatgaaaatggccagagcgccagctactgtgatgctgccagcaagcccccagagctgcagcagtgtggccctggcccctgcccccagtggaactacggcaactggggagaatgttcccagacctgtggcggcggcatcaagagccggctggtgatctgccagttccccaacggccagatcctggaggaccacaactgtgagatcgtgaacaagccacccagcgtcatccagtgccacatgcacgcctgcccagcagatgtgtcctggcaccaggagccctggaccagcgaggacctgaaggtgaagctgctgccccagaggaccatcatcctgtgggagctgatgaagaacatcttctgccacggcaagcacagccacatgtacctgatcaacgtggtgacagaccacctgctgtaccccaggcactgtgaccctgagaccatcgagacctacttcctgagcctgtggagcctgcagttcacctggggagacctgaagtactacaagaacagcctgtag

SEQ ID NO: 217681 - DNA, 4515 bp, Artificial Sequence
  derived and/or modified sequence
atgtgggtggccaagtggctgaccggcctgctgtaccacctgagcctcttcatcaccaggtcctgggaggtggacttccacccccggcaggaggccctggtgaggaccctgaccagctatgaggtggtgattcctgagcgggtgaatgaatttggagaggtgttcccccagagccaccacttcagccggcagaagaggagcagcgaggccctggagcccatgcccttccgcacccactaccgcttcaccgcctacggccagctgttccagctgaacctgacagcagatgccagcttcctggccgccggctacacagaggtgcacctgggcaccccagagcggggggcctgggagagtgatgctggccccagcgacctgcggcactgcttctaccggggccaggtgaacagccaggaggactacaaggctgtggtgtccctgtgtggcggcctgaccggcaccttcaagggccagaatggagagtacttcctggagcccatcatgaaggcagatggaaatgaatatgaagatggccacaacaagccccacctgatctaccggcaggacctgaacaacagcttcctgcagaccctgaagtactgcagcgtgtctgagagccagatcaaggagaccagcctgcccttccacacctacagcaacatgaatgaagacctgaatgtgatgaaggagcgggtgctgggccacaccagcaagaatgtgcccctgaaggatgagcggcggcacagcaggaagaagaggctcatctcctacccccgctacatcgagatcatggtgacagcagatgccaaggtggtgtctgcccacggcagcaacctgcagaactacatcctgaccctgatgagcatcgtggccaccatctacaaggaccccagcatcggcaacctgatccacatcgtggtggtgaagctggtgatgatccaccgggaggaggagggccctgtgatcaactttgatggagccaccaccctgaagaacttctgctcctggcagcagacccagaatgacctggatgatgtgcaccccagccaccacgacacagctgtgctgatcacccgggaggacatctgcagcagcaaggagaagtgcaacatgctgggcctgagctacctgggcaccatctgtgaccccctgcagagctgcttcatcaatgaggagaagggcctcatcagcgccttcaccatcgcccacgagctgggccacaccctgggcgtgcagcatgatgacaacccccgctgcaaggagatgaaggtgaccaagtaccacgtgatggccccagccctgtccttccacatgagcccctggagctggagcaactgcagcaggaaatatgtgacagagttcctggacaccggctatggagaatgtctgctggacaagccagatgaggagatctacaacctgcccagcgagctgcccggcagccgctatgatggcaacaagcagtgtgagctggcctttggacctggcagccagatgtgcccccacatcaacatctgcatgcacctgtggtgcaccagcacagagaagctgcacaagggctgcttcacccagcacgtgcccccagcagatggaacagactgtggccctggcatgcactgccgccacggcctgtgtgtgaacaaggagacagagaccaggcctgtgaatggagagtggggcccctgggagccctacagcagctgcagcaggacctgtggcggcggcatcgagagcgccacccggcgctgcaacagacctgagcccagaaatggaggcaactactgtgtgggccgcaggatgaagttccgcagctgcaacacagacagctgccccaagggcacccaggacttccgggagaagcagtgcagcgacttcaacgggaagcacctggacatcagcggcatccccagcaatgtgcgctggctgccccgctacagcggcatcggcaccaaggaccgctgcaagctgtactgccaggtggccggcaccaactacttctacctgctgaaggacatggtggaggatggcaccccctgtggcacagagacccatgacatctgtgtgcagggccagtgcatggctgctggctgtgaccacgtgctgaacagcagcgccaagattgacaagtgtggggtgtgtggcggggacaacagcagctgcaagaccatcaccggggtcttcaacagcagccactacggctacaacgtggtggtgaagatcccagctggggccaccaacgtggacatccggcagtacagctacagcggccagccagatgacagctacctggccctgagtgatgctgagggcaacttcctgttcaatggaaacttcctgctgagcaccagcaagaaggagatcaacgtgcagggcaccaggacagtcatcgagtacagcggcagcaacaatgctgtggagcgcatcaacagcaccaaccggcaggagaaggagctgatcctgcaggtgctgtgtgtgggcaacctgtacaacccagatgtgcactacagcttcaacatccccctggaggagaggagtgacatgttcacctgggacccctacggcccctgggagggctgcaccaagatgtgccagggcctgcagaggaggaacatcacctgcatccacaagagtgaccacagcgtggtgtctgacaaggaatgtgaccacctgcccctgcccagctttgtgacccagagctgcaacacagactgtgagctgcgctggcacgtgattggcaagtcagaatgtagcagccagtgtggccagggctaccgcaccctggacatccactgcatgaagtacagcatccacgagggccagacagtgcaggtggatgaccactactgtggggaccagctgaagccacccacccaggagctgtgccacggcaactgtgtgttcacccgctggcactacagcgagtggagccagtgcagccgcagctgtggcggcggggagaggagccgggagagctactgcatgaacaactttggccaccggctggccgacaatgaatgccaggagctgagccgggtgacccgggagaactgcaatgagttcagctgccccagctgggccgccagcgagtggagcgagtgcctggtgacctgtgggaagggcaccaagcagaggcaggtgtggtgccagctgaatgtggaccacctgagtgatggcttctgcaacagcagcaccaagccagagagcctgagcccctgtgagctgcacacctgtgcctcctggcaggtgggcccctggggcccctgcaccaccacctgtggccacggctaccagatgagagatgtgaagtgtgtgaatgagctggccagcgctgtgctggaggacacagagtgccacgaggccagccggcccagcgaccggcagagctgtgtgctgaccccctgcagcttcatcagcaagctggagacagccctgctgcccaccgtgctgatcaagaagatggcccagtggaggcatggctcctggaccccctgcagcgtgtcctgtggccggggcacccaggcccgctacgtgtcctgcagagatgccctggacagaattgctgatgagagctactgtgcccacctgcccaggcctgctgagatctgggactgcttcaccccctgtggggagtggcaggccggggactggagcccctgcagcgccagctgtggccacggcaagaccacccggcaggtgctgtgcatgaactaccaccagcccattgatgagaactactgtgaccctgaggtgcggcccctgatggagcaggagtgcagcctggccgcctgccccccagcccacagccacttccccagcagccctgtgcagcccagctactacctgagcaccaacctgcccctgacccagaagctggaggacaatgaaaaccaggtggtgcaccccagcgtgcggggcaaccagtggaggacaggcccctggggcagctgcagcagcagctgcagcggcggcctgcagcacagagctgtggtgtgccaggatgaaaatggccagagcgccagctactgtgatgctgccagcaagcccccagagctgcagcagtgtggccctggcccctgcccccagtggaactacggcaactggggagaatgttcccagacctgtggcggcggcatcaagagccggctggtgatctgccagttccccaacggccagatcctggaggaccacaactgtgagatcgtgaacaagccacccagcgtcatccagtgccacatgcacgcctgcccagcagatgtgtcctggcaccaggagccctggaccagcgaggacctgaaggtgaagctgctgccccagaggaccatcatcctgtgggagctgatgaagaacatcttctgccacggcaagcacagccacatgtacctgatcaacgtggtgacagaccacctgctgtaccccaggcactgtgaccctgagaccatcgagacctacttcctgagcctgtggagcctgcagttcacctggggagacctgaagtactacaagaacagcctgtag

SEQ ID NO: 217682 - DNA, 4515 bp, Artificial Sequence
  derived and/or modified sequence
atgtgggtggccaagtggctgaccggcctgctgtaccacctgagcctgtttatcactagatcctgggaggtagactttcatcctcgacaagaagccctggtcaggaccttaacctcttacgaggtggttattcctgagcgcgtgaacgaatttggggaggttttccctcagtctcatcatttctctcggcagaaacgaagcagcgaggccctggagccgatgcccttccggacgcattataggttcacggcctacggacagctcttccagctgaacctcactgccgatgctagtttcctcgccgctggatatacagaggtccacctgggaaccccggaacgtggcgcctgggagagtgacgctggcccatctgacctccgccattgcttctatcgcggtcaagtcaacagccaagaagattacaaggccgtcgtctccctgtgcggtggcctaactggaaccttcaaggggcagaacggggagtatttcctagaaccaattatgaaggccgatggcaacgagtacgaggatggtcacaacaagccacatctgatctatcgacaggatctgaataattccttcctgcagactctcaaatactgctcggtctccgaaagccagataaaagaaactagcctcccatttcacacctactccaacatgaacgaagacctgaacgtaatgaaagaaagggtgttggggcacacttctaaaaatgttcccttgaaggatgagaggagacattctcgcaaaaaaagattaattagctacccaagatacattgagattatggtaactgcggacgcgaaggttgtctccgcacatgggtctaatctgcagaactatatcctgacactgatgtcaattgtggcaacgatctacaaggacccatctatcggaaatctgattcacattgtagtagtgaagctagtgatgatacatagggaggaggagggacctgtcattaactttgatggagccactacactaaaaaacttttgttcctggcagcagacccagaatgacctagacgatgtgcaccctagccaccatgatacggctgtgctgattacgcgggaggatatctgttctagcaaagagaagtgcaatatgctgggcctgtcttaccttgggactatctgcgaccccctgcagagctgctttattaacgaggagaagggcctgattagtgcctttacgattgctcacgaattaggacatacactcggagtgcaacatgatgacaatcctcggtgcaaagagatgaaggttactaagtatcacgtaatggctccagcacttagctttcacatgagtccatggagttggtccaattgttcccggaagtacgtgacagagtttcttgacacagggtacggcgaatgccttcttgacaagcctgacgaggagatttacaacctgccatcggagcttcccgggagcagatatgacgggaacaagcagtgtgaattagccttcggacctggcagccagatgtgcccccacatcaatatctgtatgcacctgtggtgtactagtacggagaaattacacaagggctgcttcactcagcatgtgcctccggccgacggtacggattgcggccccggcatgcactgtaggcacggactctgcgttaacaaggagacggagaccagacccgtcaacggcgaatggggtccttgggaaccctattcaagctgctcgcgcacctgtggtggagggatagaatcggccactcgcaggtgcaatagaccagagcctagaaacggaggaaattattgtgtggggaggaggatgaagttccgtagttgcaacacagattcctgtccaaagggcacccaggactttcgcgaaaaacagtgctcagactttaatggtaagcacctagacatttcaggaattccatcaaacgttcggtggctgcccaggtatagtggtatagggacgaaggataggtgcaaactgtattgccaggtcgccggcaccaactacttctatctcctgaaagatatggtggaggacgggacaccgtgtggcacagagtcgtataatatcgactgcaactgtgtgcttaaggcagccggctgcgatcacgtccttaacagctcagcaaagatcgacaagtgtggtgtttgtggcggggacaacagctcgtgcaaaacaattactggagttttcaactccagtcactacggctacaatgtagtagtgaagattccggctggagcgactaacgttgacattcggcagtacagttacagcgggcagcccgacgactcctatttagccctgtcagacgccgagggcaacttcctgtttaatggcaactttctgctcagcacctcaaagaaggagattaacgtccaggggacccgaacagtgatcgagtatagcggaagcaataatgccgtggagcgtatcaactcaactaatcgacaggagaaagaaatcctcatcgaagtgttgtgcgtaggtaatctctacaaccccgacgtgcattatagtttcaatattccactggaagagagaagtgacatgttcacatgggacccatatggcccttgggaaggttgcacaaaaatgtgccaggggttgcaacgcagaaatattacctgtatccataaatcggatcattccgtggtttccgacaaagaatgtgaccacctacccctcccctccttcgtcacccaaagctgtaacaccgactgcgagctgcgatggcacgtcattggcaagtccgagtgctcaagccagtgcggccagggctataggactctggatattcattgtatgaagtactcgattcacgagggacagaccgtgcaggtggacgatcactactgcggggatcagttaaagcctcccacacaggagctctgccatggtaactgcgtgttcactaggtggcactacagtgagtggagccagtgcagccggtcctgcggaggaggcgagcgttctagggagagctactgcatgaataatttcggtcaccgtctagcagacaatgagtgtcaagaactttcccgagtaacccgcgaaaactgcaacgaattcagttgccctagttgggccgcaagcgaatggtctgagtgtctggtcacgtgtgggaaaggtaccaagcaaagacaggtttggtgccaactcaacgttgaccacctgtccgatggcttttgcaactctagcacaaaaccagaaagtctaagcccttgcgaactccatacctgcgcttcttggcaggtgggcccatggggtccctgtaccaccacgtgcggacatggttatcagatgcgagatgtcaaatgcgtgaacgagttagcttccgcggtcctagaggacactgagtgccatgaagcttcaagaccaagcgacagacagtcatgtgtattaaccccctgcagctttatctcaaagctagaaacagcacttctgcctacagtcctgataaaaaagatggctcagtggagacatggcagttggacaccttgctccgtatcttgcgggcgtggcacacaggcccggtatgtatcctgtcgcgacgccctggatagaattgcagacgagagctattgcgcccacctgccgcggcccgcggagatttgggattgcttcactccctgcggagagtggcaagcaggggattggtcaccttgctctgcgtcgtgtgggcatggtaagacaacaaggcaggtactgtgtatgaactatcaccagccaattgacgagaattactgcgatcctgaggtgcgccctttgatggaacaagaatgttccctggccgcctgcccaccggcccactcacacttcccctcttctcccgtgcaaccttcgtactatctctcaaccaatctgcccctcactcagaagcttgaagacaatgagaatcaggttgtgcatccgtcagtcagaggcaaccagtggcggacaggcccctggggtagttgctcctcatcctgcagcgggggcctgcagcatcgagccgtggtttgtcaggatgaaaatggccagagcgcctcctattgcgatgctgcttcaaagcctccagaattgcagcagtgcgggcctggcccttgccctcaatggaattacggaaactggggtgagtgtagccagacctgtggcggcggtataaaaagccgcttggttatttgccagtttcctaacggtcagatcctggaagaccacaattgcgagatcgtgaataaacctccctcagtgatacagtgtcatatgcacgcttgccctgccgatgttagctggcaccaggaaccctggacatcagaggacctcaaagtgaaattgctgccacagcgtactattatactttgggagttaatgaagaatattttttgtcatggaaagcactctcacatgtatcttattaatgttgtgaccgatcacctcttgtacccacggcactgtgaccccgagaccatcgagacatatttcctctccctttggtccctgcagttcacttggggggacctgaagtactacaagaactcgctgtag

SEQ ID NO: 217683 - DNA, 5733 bp, Artificial Sequence
  derived and/or modified sequence
atgtgggtggccaagtggctgaccggcctgctgtaccacctgagcctgttcataactcgctcctgggaagtggattttcaccctaggcaggaagcgttagtgagaactttgacatcatacgaagtcgtgatcccggagcgggttaacgaattcggagaagtgttcccacagtcgcaccacttttccagacagaaacggagctcagaagccctggagccgatgccatttcgcactcattatcgttttaccgcctatggacagctgttccaactcaatttgacagcggatgcctcttttctagccgcagggtacactgaggtgcatcttggaacccctgaaagaggtgcatgggagtcagacgcaggaccctccgatctgagacattgcttttatagaggacaagtgaattcccaggaggattataaagcagtcgtatcgctgtgtggggggctaacagggacctttaagggccaaaacggggagtactttctcgagccaatcatgaaggccgatggcaatgagtacgaagatggccataataagcctcacctgatctataggcaggacctgaataacagcttccttcagaccctcaaatattgcagtgtctctgaatcacaaatcaaagaaacctccctcccatttcatacctacagcaacatgaatgaagacctgaatgtcatgaaggaaagggtacttggccacacttccaagaacgtgcctctgaaggatgagcggcgccactctaggaagaaacgtcttatctcttatccccgctacattgaaatcatggttaccgccgatgccaaagtcgtgtctgcccacgggtctaacctgcagaactatatcttaactctcatgtcaatagtggccactatttataaggacccgtcaatcggaaatcttattcacattgtggtggtcaagctagtgatgatccacagagaggaagaagggcctgtgatcaattttgatggggccaccacgctcaaaaatttttgcagctggcagcagactcaaaatgacctggatgacgtgcacccctctcaccacgacacagcggttctgatcacacgcgaagatatctgctccagcaaggagaagtgcaacatgctggggctgtcttatcttggcactatctgtgatcctcttcagtcgtgtttcataaacgaagaaaagggtctcatcagtgcctttaccatcgcccacgagctcggacacactctgggcgtgcaacacgatgacaatcccaggtgtaaggagatgaaagtcactaagtaccacgtcatggcccctgccctctcctttcatatgtccccctggagctggtctaactgcagcagaaaatacgtgaccgaattcctagatacggggtacggtgagtgtcttctagacaaacccgatgaggaaatctataacctgccaagtgagctgcccgggagccggtacgacgggaacaagcagtgcgagctggcttttggtccgggcagccagatgtgcccccacattaacatatgtatgcatctctggtgcacttcaacggaaaaactgcataagggctgcttcacgcagcacgtcccccccgccgacggcacagattgcggccccggcatgcactgtaggcatggtctgtgtgtgaataaggagaccgagacccgccctgttaatggggagtggggcccatgggagccttactccagttgttctaggacctgtggtggaggcatcgaaagtgccacccggaggtgtaatagaccagaacccagaaatggcggaaactactgtgttgggaggcgcatgaagttccggtcctgtaatacagactcctgtcctaagggaacgcaggactttcgtgaaaagcagtgttcagattttaacgggaagcaccttgacatctccgggatcccatccaatgtacgatggctcccccgatactcgggaattggcacaaaggatcgctgtaagctgtactgccaggttgccggcacgaactacttttacttacttaaggacatggtggaggacgggacaccctgtgggaccgagacccatgatatctgcgtacagggacagtgtatggcggcgggttgcgaccacgttctgaactctagtgcaaagatagacaagtgtggggtctgtgggggagacaattcatcctgcaaaacgataacgggtgtgtttaactctagccactacgggtataacgtggttgtgaagatccccgccggtgccacaaacgtggacattcgccagtactcttactcaggacagcctgacgactcctatcttgctctctccgatgcggagggcaacttcttattcaacggaaacttccttctgtccacaagcaaaaaggagatcaatgtccagggcacacgtacagttatcgagtacagcggtagtaacaatgccgtcgagcgaattaacagcacaaatcgccaggaaaaagaactcatcctgcaggtgctgtgtgtgggtaatctctacaatccggatgtccattactctttcaatattcccctggaggagagatccgatatgttcacctgggacccctatggtccttgggagggctgcactaagatgtgtcaaggcctgcagcgaagaaacattacttgtatccataagtccgatcacagcgtggtgagcgacaaggagtgtgatcaccttcctctgccttcattcgtgactcagagttgtaatacagattgcgagctgcggtggcacgtcattgggaagagcgagtgcagctcccaatgcggccaaggctaccgcaccctagacatccactgtatgaaatacagcatccatgaagggcagaccgtccaagtggatgatcactactgcggagaccagttaaagcctccaacccaggagctgtgccacggcaactgtgtgttcacccgttggcactacagcgagtggtcgcagtgttctcggtcctgcggcggcggagagaggtccagagaatcctattgcatgaataatttcggccaccgactagccgacaatgaatgccaggagctgtccagggtgacacgagaaaactgcaatgagttcagttgcccgagctgggctgcgagcgaatggagtgagtgtttggtgacgtgtggaaaaggcaccaagcagcgtcaggtctggtgccaactgaatgtggatcatctcagtgacggcttctgcaactcaagtacgaaacccgaatcactatccccttgtgaactgcacacatgcgctagttggcaggtgggcccatggggtccttgtacgactacctgcggacatggataccaaatgagggatgtcaagtgcgttaatgagcttgcgtcagcagtcctcgaagacacggagtgtcacgaggcctcacgaccttccgatcgccagtcctgcgtgcttacaccctgcagtttcatatctaagctggaaacagctctcctccctactgtgcttattaagaaaatggcccaatggaggcatggatcttggactccttgctctgtttcctgcggccggggcacacaggctaggtacgtgagctgccgtgacgccctggacagaatcgcagatgaaagctactgcgcccacctacctcgccctgccgaaatatgggattgtttcaccccctgtggcgaatggcaagcgggggattggtccccgtgcagcgctagttgtgggcacggaaaaaccacaagacaggtgttatgtatgaattatcatcagccaattgacgagaattattgcgaccctgaggtacgcccacttatggaacaggagtgttcgctagccgcatgtccgcctgcccatagccactttccctcaagcccagtccagccttcctactacctgagtactaaccttccgctgactcaaaagctggaggataatgaaaaccaggtggtgcatcccagcgtgcgtggcaaccagtggagaacagggccttggggaagctgtagcagcagctgttcaggagggctacagcaccgcgccgttgtctgtcaagatgaaaatggccaatctgcctcctattgcgatgcagcctccaagccaccagaactacagcagtgtggccctggaccatgccctcaatggaactacggaaactggggagaatgcagtcagacatgcggtgggggcatcaagtcaagactcgtgatatgccagttcccaaacgggcaaatattagaggatcataattgtgagattgttaataagccgccctcagttatacagtgtcatatgcacgcatgtcccgctgacgtatcgtggcatcaagagccatggacctcctgctcagctagctgtggaaaagggcggaagtacagagaagtcttctgcatcgatcagttccaacgcaaattggaagacactaattgctctcaggtgcagaaaccccctacacataaagcatgcaggagcgtgcgctgcccaagctggaaggcaaactcttggaacgagtgctctgtgacttgcggtagtggcgtccagcaacgagatgtgtactgtaggctgaaaggagtaggacaggtggtggaggaaatgtgtgaccaaagtactcgcccatgctcccagaggcggtgctggagccaggactgtgtgcaacataaaggcatggagcgcggccgtctgaactgttcaacttcttgcgaacgaaaagacagccaccaacgcatggaatgtacagacaatcagattagacaggtaaatgaaatcgtttataacagcagcaccattagcctgacgagcaaaaattgtcgcaacccaccctgcaattacatcgttgtcacggcggactcttcacaatgcgccaacaattgcggcttcagctacaggcaacgaattacgtattgtacggaaataccaagtacaaagaagcacaaactgcatcgcttgaggcctattgtttatcaggagtgtccggtggtaccaagctctcaggtgtaccagtgtattaatagttgccttcatctcgctacctggaaagtgggaaagtggtctaagtgctctgtaacatgcggcataggtattatgaagcgacaggtcaaatgtattacaaagcatggcctgagctccgatctgtgtttgaatcatctgaaacccggggcacagaagaaatgctacgctaacgactgcaagagtttcacaacgtgcaaagagatacaggtaaagaaccacatccgaaaggacggagactattacttgaacattaagggaagaataattaaaatttactgcgcagatatgtacctcgaaaaccccaaagaatacttgaccctggtgcagggggaggagaacttctccgaggtgtacggctttcggctgaagaacccatatcaatgtccgtttaacggatccagacgtgaggactgcgaatgtgacaatgggcacctggccgccggctacaccgtattttccaagataaggatcgacttgacgagcatgcagattaagactaccgatctcctgttctctaaaacaatttttggtaatgcagtgcctttcgccactgccggtgattgttacagtgcctttaggtgtcctcagggtcagttctctattaacctctcgggcacagggatgaagatcagcagcaccgctaaatggctgacccaaggtagctacacatccgtttcaatcagacggtctgaagacggtaccaggttctttggtaaatgcggcggctactgcggcaagtgtcttccccatatgaccactggactgcccattcaggtcatttag

SEQ ID NO: 217684 - DNA, 1869 bp, Artificial Sequence
  derived and/or modified sequence
atgttcacctgggacccctacggcccctgggagggctgcaccaagatgtgccagggcctgcagagaagaaatataacatgtatacacaaaagcgatcattcagtagtttcggacaaggagtgcgaccaccttccactgccttcattcgtcacccagagctgcaacacggactgtgaactgagatggcacgtgattggcaagtctgaatgctcttcgcagtgcggccaggggtatcgaacactggacatccattgtatgaagtacagtattcatgagggccagacagtgcaggttgacgaccattactgcggggatcagctgaagccccctacccaggaactctgtcatggcaattgcgtattcacgcggtggcactatagcgaatggagccaatgctcacgtagttgcggggggggtgaaagaagcagggagtcctactgcatgaataacttcgggcaccgcttggccgacaacgagtgtcaggagttaagtagagtgacgagagagaactgtaacgagttttcatgtccgagctgggcagccagtgagtggtcagagtgtcttgtcacatgcggcaagggtacaaaacagaggcaggtttggtgtcagctgaatgtggaccacctctcagacggcttctgtaactcttccaccaagccggagagccttagtccgtgtgagctccacacatgcgcttcctggcaggtgggtccatggggtccttgcacaacaacttgcgggcacggctaccaaatgagagatgtaaaatgtgtcaatgagctcgccagtgcagtgttagaagacacagagtgccatgaggcctccagacccagcgaccgacagtgtagtgtgagttgcggccgaggtacacaggcccggtacgtgtcctgtcgcgatgcactggacaggatcgccgacgaaagctactgcgctcacctgcctagacccgcagagatttgggactgtttcaccccttgcggggagtggcaggccggggattggtcaccctgcagcgcaagctgtggacatggcaaaaccacacgccaagtcctctgtatgaattatcaccagcccattgacgagaactactgcgacccagaggtccggccacttatggaacaggagtgctccctcgctgcatgccctccagcccactcccattttccctcatcgccagtgcagccttcctactatctgagcacaaacctgccactgactcagaaactcgaggataacgagaatcaggtggtccacccatccgtccggggtaatcagtggaggaccggtccgtgggggagttgctcctctagctgtagtggaggcctgcaacaccgcgccgtggtgtgccaagatgaaaatggacagtcagccagttactgtgacgcagcttccaaaccacccgaactacaacagtgtggacccggcccctgtccacagtggaactatgggaactggggcgagtgctcacagacctgtggtggcggtatcaagtctcggctggtgatatgccaatttcccaacggccaaattcttgaagaccacaactgcgagattgtcaacaagcccccttcggtcatacagtgtcacatgcatgcttgtcctgctgatgtcagctggcaccaggagccttggacatccgaggacctaaaagtcaagcttttacctcaaagaacaataattttgtgggagctgatgaaaaatatcttctgtcacgggaagcacagccatatgtatctcattaacgtggttactgaccaccttctataccctcggcattgcgacccagaaactattgaaacctatttcctgagcctctggtcacttcagtttacgtggggagacctgaagtattacaagaacagcctctag

SEQ ID NO: 217685 - DNA, 4515 bp, Artificial Sequence
  derived and/or modified sequence
atgtgggtggccaagtggctgaccggcctgctgtaccacctgagcttgttcattacaagaagttgggaggtggattttcaccctaggcaggaagcgctcgtgagaacccttacatcatacgaggtggtgatccccgaacgcgttaatgaatttggcgaagtatttcctcaatcacatcacttcagccgacaaaagcgatcatctgaagctctcgagccaatgcccttccgcacacactaccggtttacagcttatggccagcttttccaactgaacctgacagcagacgcctccttccttgcggccggatatacagaggttcaccttggcacccccgagaggggggcgtgggaaagtgacgccgggccttctgatcttaggcactgtttttacaggggccaagtgaatagtcaggaggattacaaggccgtggtgtccctgtgcggcgggctgaccggaacctttaaggggcaaaacggcgaatactttctggagcccatcatgaaggcagatgggaacgaatacgaggacggacacaacaaacctcacctgatttatcggcaggacctgaacaatagctttctacaaacactcaagtattgctccgtctccgaaagccagattaaggagacctcccttcccttccacacatatagcaacatgaacgaggacctcaacgtgatgaaagagagggttctcggtcatacttccaaaaacgttccgctgaaagatgaaaggcggcacagccgaaagaagcggctaataagctacccccggtacattgagatcatggttactgccgatgccaaggttgtgtccgcacacggaagcaacttgcagaactatatcttaacgctgatgtcgatcgtagctactatctataaagaccccagcatcgggaacttgattcacatcgtcgtggtgaaacttgtcatgatccatcgggaagaagagggccccgtgatcaattttgacggggccacaaccctgaaaaatttctgttcatggcaacagactcaaaatgacctggatgacgttcaccctagccatcacgacactgcagtgttaatcaccagagaagacatctgttctagcaaggagaaatgcaatatgctcgggctgtcctacctagggacaatctgtgaccctttgcagagttgcttcataaatgaagaaaagggcctcatcagtgcattcaccatcgctcatgagctgggccacaccttaggcgtgcaacacgatgacaaccccagatgcaaggaaatgaaagttactaaataccacgtcatggctcctgcccttagttttcacatgtcaccctggtcttggagcaattgttctcgcaagtacgtgacagagtttctagatactggttacggtgaatgtctcttggataaacccgatgaggaaatctataatctgcccagcgaactgccgggcagtcgctacgacggcaacaagcagtgtgagctagctttcggccccggttctcagatgtgtccacatatcaacatttgcatgcatctttggtgcacttcaacagagaagctgcataaaggatgtttcacccagcacgtgccgccagcggatgggacagattgtggaccaggcatgcattgcagacatgggctgtgcgtgaataaggagaccgaaacccgacctgtgaatggcgaatggggaccttgggagccctatagtagctgcagcaggacttgcggaggtggtatcgagtccgccacgcgaaggtgcaatcgcccagagccacgtaacggcggaaactactgtgtgggccggaggatgaagttccgttcatgcaacacggacagttgcccgaaaggaacccaagacttcagagagaagcagtgcagcgacttcaacggaaagcaccttgacatttccggcatcccatctaacgtgcgatggcttcccagatattctggcataggcactaaggataggtgtaagttgtactgccaggttgctgggacaaactacttctacctgctgaaagatatggtcgaggacgggaccccttgcggtaccgagacacacgacatttgtgtacagggccagtgcatggcagccggctgtgaccacgtgctgaactcttcagctaaaatcgataaatgtggcgtgtgtgggggagataactctagctgcaagaccattacaggagtctttaactctagccactacggctataacgtcgtggttaagatacctgccggcgccacaaatgtggatatcaggcagtactcatacagtggccagcccgatgactcctatctcgcactgtccgacgcagaaggcaatttcctgttcaacggcaacttcctattgagcacttccaagaaagaaataaacgtgcagggcaccaggacagtaatagagtacagtgggtcgaacaatgcggtggagagaattaatagtaccaaccgccaagaaaaggagctcattctacaagtgttatgtgtgggcaatctgtacaaccctgatgttcactactcatttaatatccctctcgaggagcgaagtgatatgttcacctgggacccatatggcccttgggaaggatgtactaaaatgtgccaagggctacaaagaaggaacatcacttgtatccacaagtctgatcactcagttgtaagcgacaaggagtgtgatcatcttcccctgcctagcttcgttacccagtcctgcaacaccgattgcgaactgaggtggcatgtcatcggcaaatccgagtgcagttctcaatgcggccaaggatataggacccttgacatccactgcatgaaatactccattcacgagggtcagaccgtccaggtcgatgaccattactgtggagaccagttaaagccccccactcaggagttgtgccatgggaactgtgtctttaccagatggcactattccgagtggagccagtgttctcgatcatgcggcggcggcgagcggtctagagagtcctattgcatgaacaacttcggacacaggctagctgacaatgaatgtcaggaactgagtcgcgtgacgcgagagaactgtaacgagtttagttgcccttcttgggccgccagcgaatggagtgagtgtcttgtcacatgtggtaaagggaccaaacaaagacaggtgtggtgccaactcaatgtggatcatttgtctgatggcttctgcaattcaagcacaaaaccggagtctctgtccccatgcgaacttcacacatgtgcgagctggcaagtcggtccctggggcccttgtactactacttgtgggcacgggtatcagatgcgggacgtgaaatgtgtgaacgagctagctagtgccgttttagaggataccgagtgtcacgaagccagtcggccatccgacaggcaatcctgtgtgctgacaccctgctcctttatctctaaactagagaccgccttgctcccaaccgtgctcatcaaaaaaatggcacagtggaggcacgggtcctggactccatgttcagtttcgtgcggtcgcgggacccaggcccgatacgtctcttgcagggacgcactcgatcgcatagcagacgagagctactgtgcccaccttccgcgtcccgctgagatatgggactgtttcacaccttgtggggaatggcaggctggcgactggagcccgtgctccgcctcatgtggccacgggaaaacaacacgacaggtcttgtgcatgaattatcaccagccgatagacgagaattattgcgaccctgaagttagaccgctgatggagcaggagtgcagccttgccgcctgtccccccgcgcactcacatttcccctcaagccccgtccaaccatcatactatctgtctacaaacttgccactgacccagaaattagaagacaatgagaaccaggttgtccatccttccgtgcgtggtaatcagtggcgcaccgggccatggggtagttgtagtagtagctgcagtggcgggttgcagcacagggcggtcgtgtgccaggacgagaacggacagagcgcatcttattgtgacgccgcaagcaagcctcctgaactgcaacagtgcggccctggcccttgcccccagtggaattacggcaactggggtgagtgttcacaaacctgtggtggaggtataaagtctcgactggttatctgccagttcccgaacggccaaattttggaggatcacaattgtgagattgtgaataaacccccatccgtgatccagtgtcatatgcacgcctgccctgcagatgtgtcttggcaccaagaaccatggaccagcgaggaccttaaggtgaagttgctgccgcagaggaccataatcttgtgggaattaatgaaaaatatcttctgccatgggaagcatagccacatgtatttaatcaatgtggtgacggatcatctgctatacccaagacattgcgatccagaaactatcgagacctacttcctcagcctctggtcactccagtttacgtggggggacttaaagtactataaaaactctctctag

SEQ ID NO: 217686 - DNA, 4515 bp, Artificial Sequence
  derived and/or modified sequence
atgtgggtcgcgaagtggctgacggggctgctttaccacttgtccttgttcatcaccagaagctgggaggtggactttcatcccaggcaagaagctcttgtcaggactctgaccagctacgaggtggtcatcccagagcgggtcaatgagtttggcgaagtgttccctcagtctcaccatttcagcaggcagaagcgctcaagcgaagcactcgagcctatgccttttaggacgcattaccgcttcacggcttatggacagctgttccaactgaacctcacggccgatgcatctttcctcgccgctggttacacagaagttcacctgggcacaccagaacggggagcctgggagtcagacgccggaccctccgacctgagacattgcttttacagaggccaagtgaacagccaggaggactacaaggccgtggtgagtctctgtgggggattgaccgggacgttcaagggccagaacggagaatatttccttgagccaattatgaaggctgatggtaatgaatatgaggatggccataacaaaccgcacctgatctacagacaggatcttaacaatagctttctgcagactttgaagtattgtagtgtgtccgaaagccagattaaggagacatcacttccattccacacgtattcaaacatgaacgaagacctcaacgtaatgaaagaacgagtcttgggccacaccagcaaaaacgtgcctctgaaagatgagaggagacatagcaggaagaaaagactcatctcttatccaaggtatattgaaatcatggtaacagcagacgctaaagtcgtctctgcccacgggtcaaatcttcagaattacatattgacccttatgtccattgtggccacaatttataaggaccctagcattgggaatctgattcacattgttgtggtaaagctggtgatgattcacagagaggaggaggggcctgtcataaacttcgatggcgctacaactctgaagaacttctgcagctggcagcagacacagaacgatctcgacgatgttcaccctagccaccacgatactgcagttctgattacacgagaggacatctgcagctccaaagagaaatgtaatatgcttggactttcttacttgggcacaatctgtgatcctctccagagttgtttcatcaatgaggagaagggcttgatctcggcgttcaccatcgctcacgagctggggcacaccctcggagttcagcatgacgataacccaaggtgcaaggaaatgaaagttaccaaataccacgtgatggccccagccctctcattccacatgtccccctggagctggagtaactgcagcagaaagtacgtgaccgagttcctcgataccggttacggagaatgcctgctggacaaaccggacgaggaaatttacaacctaccctccgagctgcccggtagcaggtacgatggtaataagcagtgtgagctggccttcggccctggttcacagatgtgcccccatattaatatatgcatgcacctgtggtgtacaagcactgagaaactgcacaaaggttgtttcactcagcacgttccaccagccgacggcacagattgtggacccggaatgcattgcaggcacgggttatgcgtaaacaaggagaccgaaaccagaccagtcaatggtgagtgggggccatgggaaccgtactccagctgctcacgaacatgcgggggagggatcgagtcagctactaggaggtgcaatagacctgagcctagaaatggcggtaactactgtgttggtagaaggatgaaatttcgatcctgtaatacagactcatgccctaaaggcacccaggactttcgagaaaaacagtgctccgactttaacgggaagcacttggacatctccggtatccctagcaacgtgcgttggctcccgcgatattccggcataggcacgaaagatcggtgtaagctctattgccaggttgctggaaccaactatttttatctgcttaaagatatggtggaagacggaacaccctgtggaactgaatcttacaatattgactgcaactgcgttctcaaggccgcagggtgcgatcacgttttgaacagcagtgccaaaatcgataagtgtggcgtgtgcggaggtgacaactcctcatgcaagactataaccggggtattcaattccagccactatggctataacgtggtggtcaaaataccagctggcgctaccaacgttgacattaggcaatattcatatagcggccagccagacgactcttacctggccctgtccgatgcagaggggaacttcctgtttaacgggaactttctgctctctacatcaaagaaagaaataaacgtgcaaggcaccagaactgtgattgaatactcagggtctaataacgcggtcgagcgcatcaattctactaacaggcaagagaaggaaatacttatcgaagtcctgtgcgtaggcaatctgtataacccggacgttcactatagcttcaatattccactggaagaaagatctgatatgtttacatgggatccatatggtccctgggagggttgcacaaaaatgtgtcaaggtctccagcgacgcaacataacctgcattcacaagagcgaccatagcgtggtttctgacaaggaatgtgaccacctgccccttccgtcattcgtcacacaatcatgcaacacggattgcgagcttcggtggcacgtgattgggaaatctgaatgttcctcgcaatgtgggcaggggtatagaacacttgatatccactgtatgaaatactcaatccatgagggacagaccgtgcaggtggatgatcattattgcggagaccaacttaaacctcccacccaggaattgtgccatggcaactgtgtgtttactaggtggcactattcagaatggagccagtgtagccgcagctgtggaggcggtgagagaagtcgcgagtcctactgcatgaacaacttcggccaccgcttggcggacaacgagtgccaggagctgtcacgtgtgactcgagagaattgcaatgagttttcttgccccagttgggccgcaagtgaatggagcgaatgtctagttacctgtggtaaaggcaccaagcaacgccaggtgtggtgtcaactgaacgtcgatcacctgtccgacggtttttgcaatagctcaaccaaacctgagagcctctcaccatgtgagctccatacctgcgcttcatggcaggtgggtccatggggcccttgcaccactacgtgcggacatggttatcaaatgagagatgtgaagtgcgtgaacgaactggcatccgccgtcctggaggatacggaatgtcacgaggcttcacgacctagtgacaggcagagttgtgtgctgaccccctgtagcttcatcagtaagttggaaacagctttgctgccaaccgtcctaataaaaaagatggctcaatggcggcacggctcctggaccccatgttccgttagttgtggcaggggaactcaggcccgatacgtgtcatgcagggacgccctggaccgcatcgccgatgagtcttattgtgcacacctgccccgacctgcagaaatctgggactgctttactccttgtggagagtggcaagccggtgactggagtccttgcagtgctagctgcggtcatggtaagactacgcggcaggtactctgcatgaattaccaccaaccaatcgacgagaactattgtgatccagaggttaggcctctaatggaacaggagtgcagcctcgccgcttgcccaccagcccacagccacttccctagctccccagtgcagccttcctactacttatcaactaatttgcctctcacacagaagttagaagacaacgagaatcaggtggttcacccctccgttcgcggaaaccagtggaggaccgggccttggggaagttgctcctcctcatgtagcggaggccttcagcaccgggctgtagtgtgccaagacgagaacgggcagtccgcctcatactgtgacgcagcatcaaaacctcccgaacttcagcaatgtggccctgggccatgtcctcagtggaactatggaaactggggggagtgctctcagacctgcggcggagggataaagtcgcgtctggtcatctgccagtttcccaacggccagatcctagaagaccacaattgcgagatcgtgaataagccccctagcgtcattcagtgccatatgcacgcttgtcctgccgatgtgtcttggcatcaggagccctggaccagtgaggatctgaaggtgaagttgcttccccagcggactataatattgtgggaactgatgaaaaacattttctgtcacggcaagcactcacacatgtatctgatcaatgtggtgaccgatcatctcctgtaccctcgccactgtgatccagagacgattgaaacatacttcttaagcctgtggagtcttcagttcacctggggcgatctgaaatattacaagaattcactgtag

SEQ ID NO: 217687 - DNA, 5732 bp, Artificial Sequence
  derived and/or modified sequence
atgtgggttgccaagtggttaacagggctgctttatcatttgtctctgttcataacacggtcctgggaggtagattttcatcccagacaagaagctctagtacgcacactgaccagctacgaggtggtgataccggagagagtgaacgaatttggcgaggtatttccccaatctcaccatttctcgcgccagaaacggagctctgaggcccttgagcctatgccctttaggacccattacaggtttacggcgtatgggcagctgttccagctgaacttgaccgcagacgctagctttctcgccgcaggatacacggaagtgcacctcggaacacctgaaaggggcgcttgggaaagcgatgcaggaccctccgacctccggcattgcttctatcgaggacaggttaatagccaggaagactataaagcggtcgtctctttgtgtgggggactcactgggacatttaagggccagaacggggagtactttctcgaacctattatgaaagcagacggcaacgagtacgaagacgggcataataaacctcacctgatttatcgccaagatcttaacaacagcttcttacaaactctgaagtattgtagtgtgtcagagtcacagattaaggagacctcactgcccttccatacatatagtaacatgaacgaagacctgaacgtgatgaaagagcgcgtcttgggacacaccagcaaaaatgtgccactgaaggacgaaagaagacatagccgtaaaaagagactcatttcttaccctagatacatcgagattatggtcacagcagatgccaaagtcgtctctgcccacgggtcaaatctgcagaattatattctgactttgatgagtattgtcgcaaccatttataaagatccatccataggaaatctcattcacattgttgtcgtcaagcttgtaatgattcacagggaagaagagggccctgtgatcaattttgacggagccactaccctcaagaacttttgtagttggcagcagactcagaatgatctggatgatgtacatccctcacaccacgacaccgctgtgttaatcacaagggaagatatttgttctagtaaagaaaagtgcaacatgctcgggctgtcctatcttggtactatctgcgacccactacagtcatgcttcattaacgaggaaaaggggctgataagcgcatttaccattgcccacgaattaggacacactctgggcgtacagcacgatgacaatcctaggtgcaaagagatgaaagtgacgaaatatcacgtcatggcgcctgccctgtcattccacatgtctccatggagctggtccaattgttctagaaagtacgttactgagttcttggacaccggttacggagaatgtctcctcgataagcctgacgaggaaatttacaatctccctagcgaactgcccggatctcggtatgatgggaataagcagtgcgagctggcatttgggccaggcagtcagatgtgcccacacataaacatctgtatgcatttgtggtgtacttcaaccgagaagcttcacaagggctgttttactcagcacgttccaccggctgacggcacagattgcggaccaggtatgcattgccgacacggcctatgtgtgaacaaagagaccgagacaaggcccgttaatggagaatggggcccttgggaaccgtactcctcttgcagccggacgtgtgggggtggcatcgagagtgctacacgcagatgcaaccggccagagcccaggaacggtggcaactattgtgttggtaggcgcatgaagtttcgcagctgcaatacagattcctgtccaaagggcacccaggacttccgagaaaagcagtgttcagattttaacggaaagcacttggacatctctggcattcccagtaatgtgaggtggctgcctcggtacagtgggatcggtactaaggaccgctgcaagctgtactgccaagtggcgggaactaactatttttatctgttgaaagatatggtagaagacggtacaccctgcggaaccgaaacgcacgacatttgcgttcagggccagtgcatggctgccggatgcgatcacgtcctcaattctagcgcgaagatcgataaatgcggcgtgtgtggcggagataacagttcatgcaagacgatcactggagtgtttaactcctctcactacggctacaacgtggtggttaagataccagctggcgcaacgaatgtggatatcaggcagtattcttactccggccaacctgacgattcctacttggcgcttagcgatgctgaagggaattttctgttcaacggaaactttcttctcagtaccagtaaaaaggagattaacgtgcagggcacgaggaccgtcattgaatactcaggcagcaataatgccgttgagaggatcaatagcaccaacagacaggagaaggagctgatcttgcaagtcctgtgcgttggaaatctgtacaaccctgatgtccactacagcttcaacattcctttagaagaacgctccgacatgttcacttgggatccatacggtccatgggagggctgcaccaagatgtgtcagggcctccaaagaaggaatatcacatgcattcacaaatctgatcacagcgtcgttagcgataaagaatgcgatcatctccccctgcccagcttcgttacacagtcctgcaacaccgactgcgagctcagatggcacgtgatagggaagtctgagtgttccagccagtgcggacaggggtataggaccttagacatacactgtatgaagtattctattcacgagggccagacggtacaggtggacgaccattactgtggagatcagctcaagcccccaacgcaggaactttgccacgggaattgtgtgtttacaaggtggcactactccgaatggtcccaatgctcacgaagctgtggcggaggcgaacgatcaagagagagttactgtatgaacaactttgggcaccgactggccgacaacgagtgccaggaactgtcccgcgtgactagagagaattgtaatgagtttagctgcccatcatgggctgcttcggagtggtcagagtgcctggttacctgtggcaaaggtacaaagcaacgccaggtgtggtgccagttaaatgtggatcacttatcggatggattctgcaacagttctaccaagcctgaaagcctgagcccttgtgagctgcacacctgcgctagctggcaggtgggtccgtgggggccttgcaccactacatgtggccacggttaccaaatgcgtgatgtgaaatgcgtgaacgagttggccagcgccgtgctagaggatactgaatgccacgaagcgtcacgcccatcagatcgtcagagctgcgtcctgaccccatgtagtttcatcagcaagcttgagactgctttattgcctaccgtgctgattaaaaaaatggcccagtggagacacggcagttggaccccttgcagtgtgtcctgcggcagaggaacgcaggcaagatatgtgtcctgccgcgacgctctggacaggatcgcagacgaatcatactgcgcccatttacccaggccagcagagatctgggactgtttcacaccttgtggggaatggcaggccggagattggtctccctgctccgcaagctgtggacatgggaagaccacacgccaagtcctctgcatgaattaccaccaaccaattgacgaaaactactgcgaccctgaggtgcggcctctgatggagcaagaatgctcgctggcagcctgtcccccagctcatagtcacttcccttccagtccagtgcagccgagctactacctgagcacaaacctgcccctgactcagaagttggaagacaatgaaaaccaggtcgtgcatcctagcgtccgcggaaaccagtggcgcaccgggccatggggctcatgcagctctagttgttctggtggccttcaacatcgggctgtcgtgtgtcaagacgaaaatggacaaagcgctagctactgtgatgccgctagcaaaccacctgagttgcaacaatgcggacccggaccatgtccccaatggaattatggcaactggggagagtgctcccaaacttgcggagggggaattaagagtcgattggtcatttgtcagtttcccaacggacagatactcgaggaccacaactgcgagatcgtgaacaagccgccatctgtcatccagtgccacatgcatgcatgcccagccgacgtttcctggcatcaagagccctggactagctgcagtgcgtcctgcggaaaggggaggaagtacagagaggtgttctgtatcgaccagttccagaggaaactggaggataccaattgtagccaggtccaaaagccacccacgcacaaggcctgtagaagtgtccggtgtccgtcctggaaagcgaactcctggaacgaatgctccgtgacctgcggcagcggagtccagcagcgagatgtgtactgtcggctgaaaggcgtcggacaggtggtcgaggagatgtgcgatcagagtaccagaccctgctcccagaggcgttgttggtcccaggattgcgtgcagcataagggaatggagagaggtagactgaactgtagcactagttgtgagcgaaaggatagccaccaaaggatggagtgcacggacaaccaaattcgccaagttaacgagattgtttacaattcctccaccatctccttgactagcaagaactgccgaaacccaccctgcaattacatcgttgtgaccgctgatagcagccaatgcgccaataattgtggtttttcttatcgacaacgtatcacatactgtactgagataccatcaacaaagaaacacaagctgcataggcttcggcctatcgtctaccaagagtgtccagtcgtgccatcttctcaagtgtatcaatgtattaactcctgtctccatctggccacttggaaggtgggcaaatggtctaagtgctctgttacgtgcggcatcgggatcatgaaaaggcaggtgaaatgtataacaaagcacgggctctcgtcggatttatgcttaaatcatctcaagcccggtgcgcagaagaaatgctatgctaatgattgtaaatccttcaccacatgtaaggaaattcaggtcaaaaaccatattagaaaagatggggactactacctgaatattaaggggagaattataaaaatttattgcgccgacatgtacctagagaaccccaaggagtatctgaccttggtccaaggggaagagaacttctctgaggtctacggcttccggctgaaaaatccctaccaatgtcctttcaacgggtccaggcgcgaggattgcgagtgcgacaacggccatctcgccgcaggctatacggtgtttagtaagattagaatcgacctgactagtatgcagatcaagacgaccgacctactgttttctaagacaatctttggcaacgcagtgccattcgctactgcaggcgattgctactccgcgtttagatgcccacagggtcaattctccattaaccttagtggcaccggaatgaagataagctccacagcgaaatggctgactcagggcagttacacatctgtgtctattcggaggagcgaagacggtacccggttctttggcaagtgtggcggttattgtgggaaatgcctgcctcatatgacaaccggtctgcccatccaagtcatcta

SEQ ID NO: 217688 - DNA, 1869 bp, Artificial Sequence
  derived and/or modified sequence
atgtttacctgggatccgtatggcccttgggagggttgtacaaagatgtgtcagggtttgcagcgacgcaatataacttgcatccacaaatccgaccattctgtggtaagtgacaaggagtgcgatcatctgcccttaccatcattcgtgactcagagttgcaatactgactgtgagttgcgctggcacgtcatcggaaaaagtgagtgttcaagtcagtgcgggcagggctatcgcaccctggacattcactgcatgaagtattccatccatgagggtcagactgtgcaagtggatgatcactactgcggggatcagctgaaaccgcctacccaggaactctgtcatggcaactgtgtgttcaccagatggcactattcagaatggagccagtgttcaagatcctgcggcggaggcgaaagatctcgcgagtcctactgtatgaataactttgggcacagactggctgataatgagtgtcaggaactgagccgcgtgacccgtgaaaactgcaatgaatttagctgccctagctgggctgcctcagagtggtctgagtgcctggtgacatgcgggaagggcacgaaacagaggcaggtgtggtgtcagcttaacgtggatcacctatccgacggtttctgcaacagcagtactaagccagaaagcctgagtccatgcgagctgcacacctgcgcttcctggcaggtggggccatggggcccatgcaccaccacatgcggacacgggtatcaaatgcgcgacgtcaaatgtgtcaacgagctcgcatccgccgtgttggaggatacagagtgccacgaggcctccagaccatctgatagacagtgttctgtatcctgtgggagaggcacccaggccagatatgtgtcctgcagagacgccctcgacaggattgccgacgaaagctactgtgctcatttgccccgacccgcagagatttgggactgctttaccccttgcggagagtggcaggcaggcgattggagcccatgttcagccagttgtggtcatggaaaaaccacccggcaggtactgtgcatgaactaccaccaaccaattgatgaaaattattgcgatcccgaagtgcgtcccttgatggagcaggagtgctccctagctgcatgcccacccgctcacagccactttccgtctagcccggtacaaccctcttactatctgagtaccaatcttccattaactcagaaactggaggataatgaaaaccaggtggtccacccttcagtgcgtggcaaccagtggaggactggaccttggggatcttgttcctcctcctgttccggaggtttgcagcacagagcagtggtgtgtcaggacgagaacggacagtccgctagttattgcgatgcagcctccaagccacccgaacttcaacagtgcggccctggaccatgtccccagtggaactacggaaattggggggaatgctctcaaacgtgcggagggggtattaaaagccggctggtcatctgccagttccccaacggccaaattctcgaagaccacaactgcgagattgtgaacaaacctcctagcgtgattcagtgtcacatgcacgcctgtcccgctgacgttagctggcaccaggaaccttggacctccgaagacctgaaagtcaaactgctgccccagcgtactatcattttgtgggaacttatgaaaaacatattctgccacggcaagcattctcacatgtatctcattaacgtggtgactgaccatctgttataccccaggcattgcgatccagagactatagaaacatattttctgtcgctgtggagtctgcagtttacttggggcgatctgaagtattataaaaatagcctgtag

SEQ ID NO: 217689 - DNA, 4515 bp, Artificial Sequence
  derived and/or modified sequence
atgtgggtcgccaagtggctcacggggctgctgtaccacttgtccttgtttatcacacgcagctgggaggtcgacttccatcctagacaggaggctttggtacggaccctaacttcctacgaggtggtaattcctgaaagggtgaacgagtttggtgaagtgttcccgcaatcacatcacttcagccgccagaagcgctcttcagaagcgctcgaacccatgccatttcggacacactacagattcacagcctatgggcagctattccagctaaaccttacagccgacgctagcttcctggcagccggatacaccgaggtgcaccttggtactcctgaacggggtgcctgggaaagcgacgccggaccatccgacctgcggcactgtttctatcggggacaagtgaactcgcaagaagattacaaggccgtggtcagtttgtgcggtgggctgaccggcacttttaaggggcaaaatggggagtactttctagagcccattatgaaagctgacgggaatgaatatgaggacggccataataaacctcacctcatctacagacaagacctcaacaattctttcctgcagacattgaaatactgctccgtgagcgaaagtcaaataaaggagactagcctcccttttcatacttactctaacatgaatgaggacctgaatgtcatgaaggagcgggtgctggggcacacgagcaaaaatgtacccttaaaagacgaacgcaggcattctaggaagaaaaggctgatctcttatcccaggtacatcgagatcatggtcactgccgacgctaaggtggtgtccgcccacggttccaatcttcaaaattacatccttacacttatgtccattgtcgctactatttacaaggaccccagcatcggtaacctgatccatattgttgttgtgaaacttgtcatgatacatagagaagaggaggggcctgtcattaatttcgatggagcaaccaccttgaaaaatttctgctcgtggcagcagactcagaatgacctggacgacgtgcacccttctcatcatgacacggcagtgcttatcactcgggaggacatctgttccagcaaagaaaaatgtaacatgttaggcttatcttacttaggcaccatttgcgatccacttcagtcgtgtttcattaacgaagagaagggccttatttccgctttcacaattgctcacgagctgggccatacacttggcgtgcaacacgatgataacccacgatgcaaagagatgaaggtaactaaatatcacgtgatggcccctgccctgtccttccacatgagcccctggtcctggtcaaattgttcacgcaaatacgttacagagttccttgacactggctatggcgagtgtctgctggacaaacccgatgaagaaatttacaatctgccctccgagcttcccggatcccgatacgacgggaacaagcagtgtgagttagcgtttggaccaggcagccaaatgtgtcctcacattaatatctgcatgcatctctggtgtacctccactgagaagttacacaagggatgctttacccagcacgtgccccctgcagacgggaccgattgtggaccaggaatgcattgccggcatgggctctgcgttaataaagagaccgagacaaggccagtgaatggcgagtggggcccatgggagccttactcttcctgttccagaacctgcgggggagggatcgagtcagccaccagacggtgtaacaggcccgagccacgcaacgggggtaattactgcgtagggagacgcatgaaattccgcagttgcaatactgattcgtgcccaaaaggaacgcaggactttagagaaaagcagtgctctgacttcaatggtaagcatttagatattagtggaatcccatctaatgtccgctggttgccacgctattccggaattggaaccaaggatcgttgcaagttgtactgtcaggtcgcaggcacaaactacttttacctgctcaaggacatggttgaggatggcacaccttgtggcacagagacccacgacatctgtgtgcaggggcaatgtatggcggctggatgtgaccatgttctgaatagcagtgcaaagattgacaaatgtggcgtgtgtgggggagacaatagcagctgcaagaccattacgggcgtgttcaacagttcacactacggttacaatgttgtcgtcaaaatcccagccggagctacaaatgtggacattcggcagtatagctactctggccagccagatgacagttatctcgccttgagcgacgccgaggggaacttcttgtttaatggtaactttttgctaagtacatccaagaaggagattaacgtacagggtaccaggactgtcatcgagtattcgggttccaacaacgccgtcgagcggataaactccacaaaccgccaggagaaggagttaatcttacaggtgctgtgtgtgggaaatttgtacaatccagatgtgcactacagctttaacatacccctggaagagagaagtgacatgtttacctgggacccctatggtccctgggagggatgtactaaaatgtgccaaggcctgcagcgcaggaatatcacctgcattcacaaaagtgatcattccgtcgtttccgataaggagtgcgatcaccttcccctgccatcctttgtcacacagtcctgtaataccgattgtgaattacgttggcatgttatagggaaaagcgagtgcagctctcaatgtggccagggctaccggactttggacatccattgtatgaagtactccattcacgaggggcaaactgtccaagtggatgaccattattgcggagaccagctgaagccacccacccaggaactgtgtcatggcaactgtgtgtttacccgctggcattacagcgagtggtcccaatgttcgcgttcctgcggaggaggagagcgctcaagggagagttactgcatgaataatttcgggcatcgcctcgctgataatgaatgtcaggagctgtcacgggtcactagggagaattgcaacgagttttcctgccccagttgggcagctagtgagtggagcgaatgtctcgtcacctgtggtaaaggcacgaaacagcgtcaggtctggtgccagcttaacgttgaccatcttagcgatggtttctgcaattcatccaccaaacctgaaagtttgtcgccatgtgaactccatacttgcgctagctggcaagtgggaccttggggcccttgtaccacaacttgcgggcacgggtatcagatgagagatgttaaatgtgtgaacgagctagcctctgctgtgttggaagacaccgaatgccatgaggcatcaagaccatccgataggcagtcctgcgtattaactccatgctcgttcatcagcaaactcgaaacagctctgctgccgactgtcctaatcaaaaaaatggcacaatggcggcatggctcttggacaccttgttctgtaagctgtggcaggggtactcaggctcgctacgtgagctgccgggacgcgctcgaccggatcgcggacgagtcatattgtgcccacctgcctaggcctgccgaaatctgggactgtttcactccatgcggcgaatggcaggccggtgattggagtccttgctctgccagttgtggacatggcaagaccacgagacaggtattgtgcatgaactaccaccagcccatcgacgagaattattgcgacccagaagttagaccactgatggagcaagaatgcagtttagcagcatgtcccccagctcatagtcactttccatcaagccctgtgcagccgagctattatctgtccacaaatctgcctctgacacaaaaattggaggataatgaaaatcaggtggttcacccttcagtgcgcggaaaccaatggaggactggtccctgggggagttgctcgagcagttgttcagggggactgcagcacagggccgtggtttgccaggatgaaaacggacaatccgcgtcgtactgtgatgcagcttctaagccccctgagcttcagcagtgtggcccaggcccttgcccccaatggaactatgggaattggggcgaatgttcacagacctgcggcggaggaattaagtctcgactggtgatttgccagttcccaaatggacaaatcttggaggaccacaattgcgaaatcgtgaataaacccccttctgtgatccagtgccacatgcatgcctgccccgctgatgtgtcctggcatcaggaaccttggacctcagaggatctcaaggtcaaactgctcccccagcgaacaataatcctctgggagctgatgaagaatatcttctgtcacgggaagcactctcacatgtacctaattaacgtcgtgactgatcacctgctttacccccgtcactgtgaccccgaaaccatagaaacttactttctctcactttggagtctacaatttacctggggcgatctcaagtattacaaaaacagtttgtag

SEQ ID NO: 217690 - DNA, 4515 bp, Artificial Sequence
  derived and/or modified sequence
atgtgggtggccaagtggctgaccggcctgctgtaccacctgagcctgttcatcaccagaagctgggaggtggacttccaccccagacaggaggccctggtgagaaccctgaccagctacgaggtggtgatccccgagagagtgaacgagttcggcgaggtgttcccccagagccaccacttcagcagacagaagagaagcagcgaggccctggagcccatgcccttcagaacccactacagattcaccgcctacggccagctgttccagctgaacctgaccgccgacgccagcttcctggccgccggctacaccgaggtgcacctgggcacccccgagagaggcgcctgggagagcgacgccggccccagcgacctgagacactgcttctacagaggccaggtgaacagccaggaggactacaaggccgtggtgagcctgtgcggcggcctgaccggcaccttcaagggccagaacggcgagtacttcctggagcccatcatgaaggccgacggcaacgagtacgaggacggccacaacaagccccacctgatctacagacaggacctgaacaacagcttcctgcagaccctgaagtactgcagcgtgagcgagagccagatcaaggagaccagcctgcccttccacacctacagcaacatgaacgaggacctgaacgtgatgaaggagagagtgctgggccacaccagcaagaacgtgcccctgaaggacgagagaagacacagcagaaagaagagactgatcagctaccccagatacatcgagatcatggtgaccgccgacgccaaggtggtgagcgcccacggcagcaacctgcagaactacatcctgaccctgatgagcatcgtggccaccatctacaaggaccccagcatcggcaacctgatccacatcgtggtggtgaagctggtgatgatccacagagaggaggagggccccgtgatcaacttcgacggcgccaccaccctgaagaacttctgcagctggcagcagacccagaacgacctggacgacgtgcaccccagccaccacgacaccgccgtgctgatcaccagagaggacatctgcagcagcaaggagaagtgcaacatgctgggcctgagctacctgggcaccatctgcgaccccctgcagagctgcttcatcaacgaggagaagggcctgatcagcgccttcaccatcgcccacgagctgggccacaccctgggcgtgcagcacgacgacaaccccagatgcaaggagatgaaggtgaccaagtaccacgtgatggcccccgccctgagcttccacatgagcccctggagctggagcaactgcagcagaaagtacgtgaccgagttcctggacaccggctacggcgagtgcctgctggacaagcccgacgaggagatctacaacctgcccagcgagctgcccggcagcagatacgacggcaacaagcagtgcgagctggccttcggccccggcagccagatgtgcccccacatcaacatctgcatgcacctgtggtgcaccagcaccgagaagctgcacaagggctgcttcacccagcacgtgccccccgccgacggcaccgactgcggccccggcatgcactgcagacacggcctgtgcgtgaacaaggagaccgagaccagacccgtgaacggcgagtggggcccctgggagccctacagcagctgcagcagaacctgcggcggcggcatcgagagcgccaccagaagatgcaacagacccgagcccagaaacggcggcaactactgcgtgggcagaagaatgaagttcagaagctgcaacaccgacagctgccccaagggcacccaggacttcagagagaagcagtgcagcgacttcaacggcaagcacctggacatcagcggcatccccagcaacgtgagatggctgcccagatacagcggcatcggcaccaaggacagatgcaagctgtactgccaggtggccggcaccaactacttctacctgctgaaggacatggtggaggacggcaccccctgcggcaccgagagctacaacatcgactgcaactgcgtgctgaaggccgccggctgcgaccacgtgctgaacagcagcgccaagatcgacaagtgcggcgtgtgcggcggcgacaacagcagctgcaagaccatcaccggcgtgttcaacagcagccactacggctacaacgtggtggtgaagatccccgccggcgccaccaacgtggacatcagacagtacagctacagcggccagcccgacgacagctacctggccctgagcgacgccgagggcaacttcctgttcaacggcaacttcctgctgagcaccagcaagaaggagatcaacgtgcagggcaccagaaccgtgatcgagtacagcggcagcaacaacgccgtggagagaatcaacagcaccaacagacaggagaaggagatcctgatcgaggtgctgtgcgtgggcaacctgtacaaccccgacgtgcactacagcttcaacatccccctggaggagagaagcgacatgttcacctgggacccctacggcccctgggagggctgcaccaagatgtgccagggcctgcagagaagaaacatcacctgcatccacaagagcgaccacagcgtggtgagcgacaaggagtgcgaccacctgcccctgcccagcttcgtgacccagagctgcaacaccgactgcgagctgagatggcacgtgatcggcaagagcgagtgcagcagccagtgcggccagggctacagaaccctggacatccactgcatgaagtacagcatccacgagggccagaccgtgcaggtggacgaccactactgcggcgaccagctgaagccccccacccaggagctgtgccacggcaactgcgtgttcaccagatggcactacagcgagtggagccagtgcagcagaagctgcggcggcggcgagagaagcagagagagctactgcatgaacaacttcggccacagactggccgacaacgagtgccaggagctgagcagagtgaccagagagaactgcaacgagttcagctgccccagctgggccgccagcgagtggagcgagtgcctggtgacctgcggcaagggcaccaagcagagacaggtgtggtgccagctgaacgtggaccacctgagcgacggcttctgcaacagcagcaccaagcccgagagcctgagcccctgcgagctgcacacctgcgccagctggcaggtgggcccctggggcccctgcaccaccacctgcggccacggctaccagatgagagacgtgaagtgcgtgaacgagctggccagcgccgtgctggaggacaccgagtgccacgaggccagcagacccagcgacagacagagctgcgtgctgaccccctgcagcttcatcagcaagctggagaccgccctgctgcccaccgtgctgatcaagaagatggcccagtggagacacggcagctggaccccctgcagcgtgagctgcggcagaggcacccaggccagatacgtgagctgcagagacgccctggacagaatcgccgacgagagctactgcgcccacctgcccagacccgccgagatctgggactgcttcaccccctgcggcgagtggcaggccggcgactggagcccctgcagcgccagctgcggccacggcaagaccaccagacaggtgctgtgcatgaactaccaccagcccatcgacgagaactactgcgaccccgaggtgagacccctgatggagcaggagtgcagcctggccgcctgcccccccgcccacagccacttccccagcagccccgtgcagcccagctactacctgagcaccaacctgcccctgacccagaagctggaggacaacgagaaccaggtggtgcaccccagcgtgagaggcaaccagtggagaaccggcccctggggcagctgcagcagcagctgcagcggcggcctgcagcacagagccgtggtgtgccaggacgagaacggccagagcgccagctactgcgacgccgccagcaagccccccgagctgcagcagtgcggccccggcccctgcccccagtggaactacggcaactggggcgagtgcagccagacctgcggcggcggcatcaagagcagactggtgatctgccagttccccaacggccagatcctggaggaccacaactgcgagatcgtgaacaagccccccagcgtgatccagtgccacatgcacgcctgccccgccgacgtgagctggcaccaggagccctggaccagcgaggacctgaaggtgaagctgctgccccagagaaccatcatcctgtgggagctgatgaagaacatcttctgccacggcaagcacagccacatgtacctgatcaacgtggtgaccgaccacctgctgtaccccagacactgcgaccccgagaccatcgagacctacttcctgagcctgtggagcctgcagttcacctggggcgacctgaagtactacaagaacagcctgtag

SEQ ID NO: 217691 - DNA, 5733 bp, Artificial Sequence
  derived and/or modified sequence
atgtgggtggccaagtggctgaccggcctgctgtaccacctgagcctgttcatcaccagaagctgggaggtggacttccaccccagacaggaggccctggtgagaaccctgaccagctacgaggtggtgatccccgagagagtgaacgagttcggcgaggtgttcccccagagccaccacttcagcagacagaagagaagcagcgaggccctggagcccatgcccttcagaacccactacagattcaccgcctacggccagctgttccagctgaacctgaccgccgacgccagcttcctggccgccggctacaccgaggtgcacctgggcacccccgagagaggcgcctgggagagcgacgccggccccagcgacctgagacactgcttctacagaggccaggtgaacagccaggaggactacaaggccgtggtgagcctgtgcggcggcctgaccggcaccttcaagggccagaacggcgagtacttcctggagcccatcatgaaggccgacggcaacgagtacgaggacggccacaacaagccccacctgatctacagacaggacctgaacaacagcttcctgcagaccctgaagtactgcagcgtgagcgagagccagatcaaggagaccagcctgcccttccacacctacagcaacatgaacgaggacctgaacgtgatgaaggagagagtgctgggccacaccagcaagaacgtgcccctgaaggacgagagaagacacagcagaaagaagagactgatcagctaccccagatacatcgagatcatggtgaccgccgacgccaaggtggtgagcgcccacggcagcaacctgcagaactacatcctgaccctgatgagcatcgtggccaccatctacaaggaccccagcatcggcaacctgatccacatcgtggtggtgaagctggtgatgatccacagagaggaggagggccccgtgatcaacttcgacggcgccaccaccctgaagaacttctgcagctggcagcagacccagaacgacctggacgacgtgcaccccagccaccacgacaccgccgtgctgatcaccagagaggacatctgcagcagcaaggagaagtgcaacatgctgggcctgagctacctgggcaccatctgcgaccccctgcagagctgcttcatcaacgaggagaagggcctgatcagcgccttcaccatcgcccacgagctgggccacaccctgggcgtgcagcacgacgacaaccccagatgcaaggagatgaaggtgaccaagtaccacgtgatggcccccgccctgagcttccacatgagcccctggagctggagcaactgcagcagaaagtacgtgaccgagttcctggacaccggctacggcgagtgcctgctggacaagcccgacgaggagatctacaacctgcccagcgagctgcccggcagcagatacgacggcaacaagcagtgcgagctggccttcggccccggcagccagatgtgcccccacatcaacatctgcatgcacctgtggtgcaccagcaccgagaagctgcacaagggctgcttcacccagcacgtgccccccgccgacggcaccgactgcggccccggcatgcactgcagacacggcctgtgcgtgaacaaggagaccgagaccagacccgtgaacggcgagtggggcccctgggagccctacagcagctgcagcagaacctgcggcggcggcatcgagagcgccaccagaagatgcaacagacccgagcccagaaacggcggcaactactgcgtgggcagaagaatgaagttcagaagctgcaacaccgacagctgccccaagggcacccaggacttcagagagaagcagtgcagcgacttcaacggcaagcacctggacatcagcggcatccccagcaacgtgagatggctgcccagatacagcggcatcggcaccaaggacagatgcaagctgtactgccaggtggccggcaccaactacttctacctgctgaaggacatggtggaggacggcaccccctgcggcaccgagacccacgacatctgcgtgcagggccagtgcatggccgccggctgcgaccacgtgctgaacagcagcgccaagatcgacaagtgcggcgtgtgcggcggcgacaacagcagctgcaagaccatcaccggcgtgttcaacagcagccactacggctacaacgtggtggtgaagatccccgccggcgccaccaacgtggacatcagacagtacagctacagcggccagcccgacgacagctacctggccctgagcgacgccgagggcaacttcctgttcaacggcaacttcctgctgagcaccagcaagaaggagatcaacgtgcagggcaccagaaccgtgatcgagtacagcggcagcaacaacgccgtggagagaatcaacagcaccaacagacaggagaaggagctgatcctgcaggtgctgtgcgtgggcaacctgtacaaccccgacgtgcactacagcttcaacatccccctggaggagagaagcgacatgttcacctgggacccctacggcccctgggagggctgcaccaagatgtgccagggcctgcagagaagaaacatcacctgcatccacaagagcgaccacagcgtggtgagcgacaaggagtgcgaccacctgcccctgcccagcttcgtgacccagagctgcaacaccgactgcgagctgagatggcacgtgatcggcaagagcgagtgcagcagccagtgcggccagggctacagaaccctggacatccactgcatgaagtacagcatccacgagggccagaccgtgcaggtggacgaccactactgcggcgaccagctgaagccccccacccaggagctgtgccacggcaactgcgtgttcaccagatggcactacagcgagtggagccagtgcagcagaagctgcggcggcggcgagagaagcagagagagctactgcatgaacaacttcggccacagactggccgacaacgagtgccaggagctgagcagagtgaccagagagaactgcaacgagttcagctgccccagctgggccgccagcgagtggagcgagtgcctggtgacctgcggcaagggcaccaagcagagacaggtgtggtgccagctgaacgtggaccacctgagcgacggcttctgcaacagcagcaccaagcccgagagcctgagcccctgcgagctgcacacctgcgccagctggcaggtgggcccctggggcccctgcaccaccacctgcggccacggctaccagatgagagacgtgaagtgcgtgaacgagctggccagcgccgtgctggaggacaccgagtgccacgaggccagcagacccagcgacagacagagctgcgtgctgaccccctgcagcttcatcagcaagctggagaccgccctgctgcccaccgtgctgatcaagaagatggcccagtggagacacggcagctggaccccctgcagcgtgagctgcggcagaggcacccaggccagatacgtgagctgcagagacgccctggacagaatcgccgacgagagctactgcgcccacctgcccagacccgccgagatctgggactgcttcaccccctgcggcgagtggcaggccggcgactggagcccctgcagcgccagctgcggccacggcaagaccaccagacaggtgctgtgcatgaactaccaccagcccatcgacgagaactactgcgaccccgaggtgagacccctgatggagcaggagtgcagcctggccgcctgcccccccgcccacagccacttccccagcagccccgtgcagcccagctactacctgagcaccaacctgcccctgacccagaagctggaggacaacgagaaccaggtggtgcaccccagcgtgagaggcaaccagtggagaaccggcccctggggcagctgcagcagcagctgcagcggcggcctgcagcacagagccgtggtgtgccaggacgagaacggccagagcgccagctactgcgacgccgccagcaagccccccgagctgcagcagtgcggccccggcccctgcccccagtggaactacggcaactggggcgagtgcagccagacctgcggcggcggcatcaagagcagactggtgatctgccagttccccaacggccagatcctggaggaccacaactgcgagatcgtgaacaagccccccagcgtgatccagtgccacatgcacgcctgccccgccgacgtgagctggcaccaggagccctggaccagctgcagcgccagctgcggcaagggcagaaagtacagagaggtgttctgcatcgaccagttccagagaaagctggaggacaccaactgcagccaggtgcagaagccccccacccacaaggcctgcagaagcgtgagatgccccagctggaaggccaacagctggaacgagtgcagcgtgacctgcggcagcggcgtgcagcagagagacgtgtactgcagactgaagggcgtgggccaggtggtggaggagatgtgcgaccagagcaccagaccctgcagccagagaagatgctggagccaggactgcgtgcagcacaagggcatggagagaggcagactgaactgcagcaccagctgcgagagaaaggacagccaccagagaatggagtgcaccgacaaccagatcagacaggtgaacgagatcgtgtacaacagcagcaccatcagcctgaccagcaagaactgcagaaaccccccctgcaactacatcgtggtgaccgccgacagcagccagtgcgccaacaactgcggcttcagctacagacagagaatcacctactgcaccgagatccccagcaccaagaagcacaagctgcacagactgagacccatcgtgtaccaggagtgccccgtggtgcccagcagccaggtgtaccagtgcatcaacagctgcctgcacctggccacctggaaggtgggcaagtggagcaagtgcagcgtgacctgcggcatcggcatcatgaagagacaggtgaagtgcatcaccaagcacggcctgagcagcgacctgtgcctgaaccacctgaagcccggcgcccagaagaagtgctacgccaacgactgcaagagcttcaccacctgcaaggagatccaggtgaagaaccacatcagaaaggacggcgactactacctgaacatcaagggcagaatcatcaagatctactgcgccgacatgtacctggagaaccccaaggagtacctgaccctggtgcagggcgaggagaacttcagcgaggtgtacggcttcagactgaagaacccctaccagtgccccttcaacggcagcagaagagaggactgcgagtgcgacaacggccacctggccgccggctacaccgtgttcagcaagatcagaatcgacctgaccagcatgcagatcaagaccaccgacctgctgttcagcaagaccatcttcggcaacgccgtgcccttcgccaccgccggcgactgctacagcgccttcagatgcccccagggccagttcagcatcaacctgagcggcaccggcatgaagatcagcagcaccgccaagtggctgacccagggcagctacaccagcgtgagcatcagaagaagcgaggacggcaccagattcttcggcaagtgcggcggctactgcggcaagtgcctgccccacatgaccaccggcctgcccatccaggtgatctag

SEQ ID NO: 217692 - DNA, 1869 bp, Artificial Sequence
  derived and/or modified sequence
atgttcacctgggacccctacggcccctgggagggctgcaccaagatgtgccagggcctgcagagaagaaacatcacctgcatccacaagagcgaccacagcgtggtgagcgacaaggagtgcgaccacctgcccctgcccagcttcgtgacccagagctgcaacaccgactgcgagctgagatggcacgtgatcggcaagagcgagtgcagcagccagtgcggccagggctacagaaccctggacatccactgcatgaagtacagcatccacgagggccagaccgtgcaggtggacgaccactactgcggcgaccagctgaagccccccacccaggagctgtgccacggcaactgcgtgttcaccagatggcactacagcgagtggagccagtgcagcagaagctgcggcggcggcgagagaagcagagagagctactgcatgaacaacttcggccacagactggccgacaacgagtgccaggagctgagcagagtgaccagagagaactgcaacgagttcagctgccccagctgggccgccagcgagtggagcgagtgcctggtgacctgcggcaagggcaccaagcagagacaggtgtggtgccagctgaacgtggaccacctgagcgacggcttctgcaacagcagcaccaagcccgagagcctgagcccctgcgagctgcacacctgcgccagctggcaggtgggcccctggggcccctgcaccaccacctgcggccacggctaccagatgagagacgtgaagtgcgtgaacgagctggccagcgccgtgctggaggacaccgagtgccacgaggccagcagacccagcgacagacagtgcagcgtgagctgcggcagaggcacccaggccagatacgtgagctgcagagacgccctggacagaatcgccgacgagagctactgcgcccacctgcccagacccgccgagatctgggactgcttcaccccctgcggcgagtggcaggccggcgactggagcccctgcagcgccagctgcggccacggcaagaccaccagacaggtgctgtgcatgaactaccaccagcccatcgacgagaactactgcgaccccgaggtgagacccctgatggagcaggagtgcagcctggccgcctgcccccccgcccacagccacttccccagcagccccgtgcagcccagctactacctgagcaccaacctgcccctgacccagaagctggaggacaacgagaaccaggtggtgcaccccagcgtgagaggcaaccagtggagaaccggcccctggggcagctgcagcagcagctgcagcggcggcctgcagcacagagccgtggtgtgccaggacgagaacggccagagcgccagctactgcgacgccgccagcaagccccccgagctgcagcagtgcggccccggcccctgcccccagtggaactacggcaactggggcgagtgcagccagacctgcggcggcggcatcaagagcagactggtgatctgccagttccccaacggccagatcctggaggaccacaactgcgagatcgtgaacaagccccccagcgtgatccagtgccacatgcacgcctgccccgccgacgtgagctggcaccaggagccctggaccagcgaggacctgaaggtgaagctgctgccccagagaaccatcatcctgtgggagctgatgaagaacatcttctgccacggcaagcacagccacatgtacctgatcaacgtggtgaccgaccacctgctgtaccccagacactgcgaccccgagaccatcgagacctacttcctgagcctgtggagcctgcagttcacctggggcgacctgaagtactacaagaacagcctgtag

SEQ ID NO: 217693 - DNA, 4515 bp, Artificial Sequence
  derived and/or modified sequence
atgtgggtggccaagtggctgaccggcctgctgtaccacctgagcctgttcatcaccagaagctgggaggtggacttccaccccagacaggaggccctggtgagaaccctgaccagctacgaggtggtgatccccgagagagtgaacgagttcggcgaggtgttcccccagagccaccacttcagcagacagaagagaagcagcgaggccctggagcccatgcccttcagaacccactacagattcaccgcctacggccagctgttccagctgaacctgaccgccgacgccagcttcctggccgccggctacaccgaggtgcacctgggcacccccgagagaggcgcctgggagagcgacgccggccccagcgacctgagacactgcttctacagaggccaggtgaacagccaggaggactacaaggccgtggtgagcctgtgcggcggcctgaccggcaccttcaagggccagaacggcgagtacttcctggagcccatcatgaaggccgacggcaacgagtacgaggacggccacaacaagccccacctgatctacagacaggacctgaacaacagcttcctgcagaccctgaagtactgcagcgtgagcgagagccagatcaaggagaccagcctgcccttccacacctacagcaacatgaacgaggacctgaacgtgatgaaggagagagtgctgggccacaccagcaagaacgtgcccctgaaggacgagagaagacacagcagaaagaagagactgatcagctaccccagatacatcgagatcatggtgaccgccgacgccaaggtggtgagcgcccacggcagcaacctgcagaactacatcctgaccctgatgagcatcgtggccaccatctacaaggaccccagcatcggcaacctgatccacatcgtggtggtgaagctggtgatgatccacagagaggaggagggccccgtgatcaacttcgacggcgccaccaccctgaagaacttctgcagctggcagcagacccagaacgacctggacgacgtgcaccccagccaccacgacaccgccgtgctgatcaccagagaggacatctgcagcagcaaggagaagtgcaacatgctgggcctgagctacctgggcaccatctgcgaccccctgcagagctgcttcatcaacgaggagaagggcctgatcagcgccttcaccatcgcccacgagctgggccacaccctgggcgtgcagcacgacgacaaccccagatgcaaggagatgaaggtgaccaagtaccacgtgatggcccccgccctgagcttccacatgagcccctggagctggagcaactgcagcagaaagtacgtgaccgagttcctggacaccggctacggcgagtgcctgctggacaagcccgacgaggagatctacaacctgcccagcgagctgcccggcagcagatacgacggcaacaagcagtgcgagctggccttcggccccggcagccagatgtgcccccacatcaacatctgcatgcacctgtggtgcaccagcaccgagaagctgcacaagggctgcttcacccagcacgtgccccccgccgacggcaccgactgcggccccggcatgcactgcagacacggcctgtgcgtgaacaaggagaccgagaccagacccgtgaacggcgagtggggcccctgggagccctacagcagctgcagcagaacctgcggcggcggcatcgagagcgccaccagaagatgcaacagacccgagcccagaaacggcggcaactactgcgtgggcagaagaatgaagttcagaagctgcaacaccgacagctgccccaagggcacccaggacttcagagagaagcagtgcagcgacttcaacggcaagcacctggacatcagcggcatccccagcaacgtgagatggctgcccagatacagcggcatcggcaccaaggacagatgcaagctgtactgccaggtggccggcaccaactacttctacctgctgaaggacatggtggaggacggcaccccctgcggcaccgagacccacgacatctgcgtgcagggccagtgcatggccgccggctgcgaccacgtgctgaacagcagcgccaagatcgacaagtgcggcgtgtgcggcggcgacaacagcagctgcaagaccatcaccggcgtgttcaacagcagccactacggctacaacgtggtggtgaagatccccgccggcgccaccaacgtggacatcagacagtacagctacagcggccagcccgacgacagctacctggccctgagcgacgccgagggcaacttcctgttcaacggcaacttcctgctgagcaccagcaagaaggagatcaacgtgcagggcaccagaaccgtgatcgagtacagcggcagcaacaacgccgtggagagaatcaacagcaccaacagacaggagaaggagctgatcctgcaggtgctgtgcgtgggcaacctgtacaaccccgacgtgcactacagcttcaacatccccctggaggagagaagcgacatgttcacctgggacccctacggcccctgggagggctgcaccaagatgtgccagggcctgcagagaagaaacatcacctgcatccacaagagcgaccacagcgtggtgagcgacaaggagtgcgaccacctgcccctgcccagcttcgtgacccagagctgcaacaccgactgcgagctgagatggcacgtgatcggcaagagcgagtgcagcagccagtgcggccagggctacagaaccctggacatccactgcatgaagtacagcatccacgagggccagaccgtgcaggtggacgaccactactgcggcgaccagctgaagccccccacccaggagctgtgccacggcaactgcgtgttcaccagatggcactacagcgagtggagccagtgcagcagaagctgcggcggcggcgagagaagcagagagagctactgcatgaacaacttcggccacagactggccgacaacgagtgccaggagctgagcagagtgaccagagagaactgcaacgagttcagctgccccagctgggccgccagcgagtggagcgagtgcctggtgacctgcggcaagggcaccaagcagagacaggtgtggtgccagctgaacgtggaccacctgagcgacggcttctgcaacagcagcaccaagcccgagagcctgagcccctgcgagctgcacacctgcgccagctggcaggtgggcccctggggcccctgcaccaccacctgcggccacggctaccagatgagagacgtgaagtgcgtgaacgagctggccagcgccgtgctggaggacaccgagtgccacgaggccagcagacccagcgacagacagagctgcgtgctgaccccctgcagcttcatcagcaagctggagaccgccctgctgcccaccgtgctgatcaagaagatggcccagtggagacacggcagctggaccccctgcagcgtgagctgcggcagaggcacccaggccagatacgtgagctgcagagacgccctggacagaatcgccgacgagagctactgcgcccacctgcccagacccgccgagatctgggactgcttcaccccctgcggcgagtggcaggccggcgactggagcccctgcagcgccagctgcggccacggcaagaccaccagacaggtgctgtgcatgaactaccaccagcccatcgacgagaactactgcgaccccgaggtgagacccctgatggagcaggagtgcagcctggccgcctgcccccccgcccacagccacttccccagcagccccgtgcagcccagctactacctgagcaccaacctgcccctgacccagaagctggaggacaacgagaaccaggtggtgcaccccagcgtgagaggcaaccagtggagaaccggcccctggggcagctgcagcagcagctgcagcggcggcctgcagcacagagccgtggtgtgccaggacgagaacggccagagcgccagctactgcgacgccgccagcaagccccccgagctgcagcagtgcggccccggcccctgcccccagtggaactacggcaactggggcgagtgcagccagacctgcggcggcggcatcaagagcagactggtgatctgccagttccccaacggccagatcctggaggaccacaactgcgagatcgtgaacaagccccccagcgtgatccagtgccacatgcacgcctgccccgccgacgtgagctggcaccaggagccctggaccagcgaggacctgaaggtgaagctgctgccccagagaaccatcatcctgtgggagctgatgaagaacatcttctgccacggcaagcacagccacatgtacctgatcaacgtggtgaccgaccacctgctgtaccccagacactgcgaccccgagaccatcgagacctacttcctgagcctgtggagcctgcagttcacctggggcgacctgaagtactacaagaacagcctgtag

SEQ ID NO: 217694 - protein, 1140 aa, Artificial Sequence
  derived and/or modified sequence
MTTAVERKYINIRKRLDQLGYRQTLTVECLPLVEKLFSDLVHTTESLRQSKLSAVKAEKESANFDFVLEPYKLENARLSRENNELYLELMKLREHSDQHVKELKTSLKKCARETADLKFLNNQYAHKLKLLEKESKAKNERIQQLQEKNLHAVVQTPGGKKRSIAFRRQRMQIDEPVPPSEVSSYPVPQPDDPYIADLLQVADNRIQELQQEVHQLQEKLAMMESGVRDYSKQIELREREIERLSVALDGGRSPDVLSLESRNKTNEKLIAHLNIQVDFLQQANKDLEKRIRELMETKETVTSEVVNLSNKNEKLCQELTEIDQLAQQLERHKEEVLETADKELGEAKKEIKRKLSEMQDLEETMAKLQLELNLCQKEKERLSDELLVKSDLETVVHQLEQEKQRLSKKVESFAVTERQLTLEVERMRLEHGIKRRDRSPSRLDTFLKGIEEERDYYKKELERLQHIIQRRSCSTSYSAREKSSIFRTPEKGDYNSEIHQITRERDELQRMLERFEKYMEDIQSNVKLLTAERDKLSVLYNEAQEELSALRKESTQTTAPHNIVSLMEKEKELALSDLRRIMAEKEALREKLEHIEEVSLFGKSELEKTIEHLTCVNHQLESEKYELKSKVLIMKETIESLENKLKVQAQKFSHVAGDSSHQKTEVNSLRIVNEQLQRSVDDYQHRLSIKRGELESAQAQIKILEEKIDELNLKMTSQDEEAHVMKKTIGVIDKEKDFLQETVDEKTEKIANLQENLANKEKAVAQMKIMISECESSVNQLKETLVNRDREINSLRRQLDAAHKELDEVGRSREIAFKENRRLQDDLATMARENQEISLELEAAVQEKEEMKSRVHKYITEVSRWESLMAAKEKENQDLLDRFQMLHNRAEDWEVKAHQAEGESSSVRLELLSIDTERRHLRERVELLEKEIQEHINAHHAYESQISSMAKAMSRLEEELRHQEDEKATVLNDLSSLRELCIKLDSGKDIMTQQLNSKNLEFERVVVELENVKSESDLLKKQLSNERHTVKNLESLLATNRDKEFHSHLTSHEKDTEIQLLKEKLTLSESKLTSQSRENTMLRAKVAQLQTDYDALKRQISTERYERERAIQEMRRHGLATPPLSSTLRSPSHSPEHRNV

SEQ ID NO: 217695 - protein, 249 aa, Artificial Sequence
  derived and/or modified sequence
MTTAVERKYINIRKRLDQLGYRQTLTVECLPLVEKLFSDLVHTTESLRQSKLSAVKAEKESANFDFVLEPYKLENARLSRENNELYLELMKLREHSDQHVKELKTSLKKCARETADLKFLNNQYAHKLKLLEKESKAKNERIQQLQEKNLHAVVQTPGGKKRSIAFRRQRMQIDEPVPPSEVSSYPVPQPDDPYIADLLQVADNRIQELQQEVHQLQEKLAMMESGVRDYSKQVGFLFTCIVGIEIGML

SEQ ID NO: 217696 - DNA, 3423 bp, Artificial Sequence
  derived and/or modified sequence
atgaccactgcagtggaaagaaaatacataaacataagaaagcgactggatcagttggggtacaggcagacactgacagtcgagtgtctccccctggtggagaaattattcagcgatctcgtacacaccactgaatcattgcgtcaatctaaactaagtgcagtgaaagccgagaaggagtccgccaatttcgatttcgtgcttgaaccgtataaattggagaacgcacgactgtcacgagaaaacaatgaactgtatctcgagctgatgaagcttagagaacactcggatcagcatgtcaaagagctaaagacaagcctgaaaaagtgcgccagggagaccgccgatttgaagttccttaacaatcagtacgcccacaagctcaaactcctcgaaaaagagtccaaggccaagaatgagagaattcagcagttgcaggaaaaaaacctacacgctgtggtccagacccccggagggaaaaagagaagcatcgctttccgccggcagagaatgcagatcgacgaaccagtgccccccagcgaagtctctagctaccctgttccccagcctgacgatccgtacattgctgatctgctgcaggtagccgataaccgcatacaagaattgcaacaggaggttcaccaactccaggagaagcttgctatgatggaaagtggagtcagagattactcaaaacaaatcgaattgcgggagcgggagatcgagcgcctctctgtcgccctggacggcggcagatcacctgacgtcctgagccttgagagccgcaacaaaaccaatgagaaattgatagcgcacctgaatatccaggtcgactttctgcaacaggctaacaaggatctggagaagcggattcgtgaactgatggaaaccaaggagactgtgacgtcagaggtggtgaacttatctaataaaaacgagaagctgtgtcaggagctcacagaaatcgatcagctggctcagcagctggaacggcacaaggaggaggtgctcgagacggccgacaaagagctgggggaagcaaagaaagaaataaaacggaagctcagcgagatgcaggatcttgaagagacaatggccaaactgcagctcgaactgaatttatgccagaaggaaaaggaacgtttgtcagacgaactccttgtgaagtccgatttggagaccgtggtgcatcagctagaacaggaaaagcagaggctctctaagaaggtggaatcatttgccgtgaccgaacggcaattaacactagaagttgaaaggatgagactggagcatgggattaagaggcgggaccggagtccaagtagattggacaccttcttgaagggaatcgaagaggagcgggattattacaagaaagagctggaacgtctgcagcatattattcagagaagaagctgctcaacatcctacagtgcgagggagaaaagttccattttccgaactcccgagaaaggcgactacaacagcgaaatacatcagatcacaagggaacgcgatgaacttcagcgaatgctggaacgtttcgaaaaatatatggaggacatccaatccaatgtaaagcttctgacagctgaacgcgacaagctctctgtgttatacaatgaagcccaggaggagctctctgcactacgaaaagaaagcacccagaccaccgctcctcataacattgtaagtctgatggagaaggagaaggagttggccctctctgacctgcgtcgcatcatggcagagaaggaagctcttcgtgaaaaattggaacacatagaggaagtgtctttgtttgggaaatcagagttggaaaaaactattgaacatttgacatgtgtgaatcatcagctggaatctgagaagtacgagttaaagagcaaagtcctgattatgaaagagactatcgaaagcctggaaaacaaactgaaggtgcaggcccaaaaatttagccacgttgctggagacagctcacatcagaaaaccgaggttaacagcctgagaatagtgaatgaacagcttcagcggtcagtcgatgattaccaacatcgccttagcatcaaaaggggtgagttagagtctgcacaggcccagattaagatcctggaggagaagattgatgagctgaaccttaagatgacatcccaggatgaggaggcccacgttatgaagaagactattggcgtgattgataaggagaaagactttcttcaggagaccgtagatgaaaagaccgaaaagatcgccaaccttcaagagaatctcgcaaataaagaaaaagctgtggcacagatgaaaatcatgattagtgaatgcgaatccagtgtcaatcagctgaaagagacactggtgaatcgcgatcgcgaaattaattcactaaggaggcagctggatgccgcccataaggagctggatgaagtgggtagatcaagagagattgccttcaaagaaaaccgaagacttcaagacgatctggcgacaatggcacgggagaaccaggagatctccctcgaactcgaagcagctgttcaggagaaggaagagatgaagagccgtgtccataaatacatcactgaagttagccgttgggagtcccttatggcggcgaaggaaaaagaaaaccaagatctgctggaccgatttcaaatgctccataacagggctgaggactgggaggttaaggcccaccaagccgagggggagagctctagcgtccgacttgagctgctttccatagacactgagaggcggcatttgagggagcgggtggagctgctagagaaagagatacaggaacatatcaatgcacatcacgcttacgagtcccaaatctcatccatggcaaaggccatgagccgactggaggaggagctgcgacaccaagaggatgaaaaagccacagtattgaatgacttgagtagcttacgtgaactgtgtattaagctggattctgggaaagacatcatgacacagcagctgaactctaagaatttggagtttgagagagttgtggtcgaactcgagaatgtgaagagtgaaagcgacctgctgaagaagcaactatctaacgagcgacacaccgtgaagaatctggagtcccttctggctacaaaccgggataaagaatttcattcacacctgacatctcacgaaaaagacacggaaattcagctgctcaaggagaagttgactctgtcagaaagtaagctcaccagccagtcccgggagaacactatgttgagggccaaagtcgcacagctccagactgactatgatgcgcttaaacgtcagatctccacggagagatacgagagagagcgggcaatccaggagatgcgacggcacggcctcgccactccccccctctcctccactttacgtagcccctcgcactcacctgagcaccgcaatgtctag

SEQ ID NO: 217697 - DNA, 3423 bp, Artificial Sequence
  derived and/or modified sequence
atgaccacagctgtggagaggaagtacatcaacatcaggaagaggctggaccagctgggctaccggcagaccctgactgtggagtgcctgcccctggtggagaagctgttcagtgacctggtgcacaccacagagagcctgcggcagagcaagctgtctgctgtgaaggccgagaaggagagcgccaactttgattttgtgctggagccctacaagctggagaatgcccggctgagcagagaaaataatgagctgtacctggagctgatgaagctgcgggagcacagcgaccagcacgtgaaggagctgaagaccagcctgaagaagtgtgcccgggagacagctgacctgaagttcctgaacaaccagtatgcccacaagctgaagctgctggagaaggagagcaaggccaagaatgaaagaatccagcagctgcaggagaagaacctgcatgctgtggtgcagaccccaggcggcaagaagaggagcatcgccttccggcggcagaggatgcagattgatgagcctgtgccccccagcgaggtgagcagctaccctgtgccccagccagatgacccctacatcgctgacctgctgcaggtggccgacaaccgcatccaggagctgcagcaggaggtgcaccagctgcaggagaagctggccatgatggagagcggcgtgcgggactacagcaagcagatcgagctgcgggagcgggagattgagcggctgtctgtggccctggatggcggccgcagcccagatgtgctgagcctggagagcaggaacaagaccaatgagaagctgattgcccacctgaacatccaggtggacttcctgcagcaggccaacaaggacctggagaagaggatccgggagctgatggagaccaaggagaccgtgaccagcgaggtggtgaacctgagcaacaagaatgagaagctgtgccaggagctgacagaaattgaccagctggcccagcagctggagcggcacaaggaggaggtgctggagacagctgacaaggagctgggggaggccaagaaggagatcaagaggaagctgtctgagatgcaggacctggaggagaccatggccaagctgcagctggagctgaacctgtgccagaaggagaaggagcggctgagtgatgagctgctggtgaagagtgacctggagaccgtggtgcaccagctggagcaggagaagcagaggctgagcaagaaggtggagagctttgctgtgacagagcggcagctgaccctggaggtggagaggatgaggctggagcacggcatcaagagaagagacaggagccccagccggctggacaccttcctgaagggcatcgaggaggagcgggactactacaagaaggagctggagcggctgcagcacatcatccagaggaggagctgcagcaccagctacagcgcccgggagaagagcagcatcttccgcaccccagagaagggggactacaacagcgagatccaccagatcacccgggagagagatgagctgcagaggatgctggagagatttgagaagtacatggaggacatccagagcaatgtgaagctgctgacagctgagcgggacaagctgtctgtgctgtacaatgaggcccaggaggagctgagcgccctgaggaaggagagcacccagaccacagccccccacaacatcgtgtccctgatggagaaggagaaggagctggccctgagtgacctgcggcgcatcatggccgagaaggaggccctgcgggagaagctggagcacatcgaggaggtgtccctgtttgggaagtctgagctggagaagaccatcgagcacctgacctgtgtgaaccaccagctggagagcgagaagtatgagctgaagagcaaggtgctgatcatgaaggagaccatcgagagcctggagaacaagctgaaggtgcaggcccagaagttcagccacgtggccggggacagcagccaccagaagacagaggtgaacagcctgagaattgtgaatgagcagctgcagaggtctgtggatgactaccagcaccggctgagcatcaagagaggagagctggagagcgcccaggcccagatcaagatcctggaggagaagattgatgagctgaacctgaagatgaccagccaggatgaggaggcccacgtgatgaagaagaccatcggggtcatcgacaaggagaaggacttcctgcaggagaccgtggatgagaagacagagaagatcgccaacctgcaggagaacctggccaacaaggagaaggctgtggcccagatgaagatcatgatcagtgaatgtgagagctctgtgaaccagctgaaggagaccctggtgaacagagaccgggagatcaacagcctgcggcggcagctggatgctgcccacaaggagctggatgaggtgggccgcagccgggagatcgccttcaaggaaaatagaaggctgcaggatgacctggccaccatggcccgggagaaccaggagatcagcctggagctggaggccgctgtgcaggagaaggaggagatgaagagccgggtgcacaagtacatcacagaggtgagccgctgggagagcctgatggccgccaaggagaaggagaaccaggacctgctggaccgcttccagatgctgcacaacagagctgaggactgggaggtgaaggcccaccaggccgagggggagagcagctctgtgcggctggagctgctgagcattgacacagagcggcggcacctgcgggagcgggtggagctgctggagaaggagatccaggagcacatcaatgcccaccacgcctatgagagccagatcagctccatggccaaggccatgagccggctggaggaggagctgcggcaccaggaggatgagaaggccaccgtgctgaatgacctgagcagcctgcgggagctgtgcatcaagctggacagcggcaaggacatcatgacccagcagctgaacagcaagaacctggagtttgagcgggtggtggtggagctggagaatgtgaagtctgagagtgacctgctgaagaagcagctgagcaatgaaagacacacagtgaagaacctggagagcctgctggccaccaacagagacaaggagttccacagccacctgaccagccatgagaaggacacagagatccagctgctgaaggagaagctgaccctgtctgagagcaagctgaccagccagagccgggagaacaccatgctgcgggccaaggtggcccagctgcagacagattatgatgccctgaagaggcagatcagcacagaaagatatgagcgggagcgggccatccaggagatgagaagacatggcctggccaccccacccctgagcagcaccctgcggagccccagccacagccctgagcacagaaatgtgtag

SEQ ID NO: 217698 - DNA, 3423 bp, Artificial Sequence
  derived and/or modified sequence
atgaccaccgccgtggagcggaagtacatcaacatccggaagcggttagaccagcttggctaccgacagactctgaccgtcgaatgcctgccattggtagaaaagctcttttcagacctggtccacacaaccgagtcactgcggcagtccaagctatcggctgtgaaagcagagaaggagtctgccaatttcgactttgtcctagagccatacaagctcgagaatgctcgcctttcacgggagaataacgaactttacttggagctgatgaaattgagagaacactcagatcagcacgttaaggagctcaaaacctccctgaaaaaatgcgcgcgggagacagctgaccttaaatttctcaacaaccagtatgcccacaagttgaagctgttagaaaaggagtccaaggctaagaatgaacgaatccagcagctccaggagaagaatctgcacgcagttgtccagactccaggtggaaaaaaacgctctatcgccttccggcgtcagcgcatgcagatcgacgagcctgtcccaccttctgaggtgtccagttacccagtgccccaacccgatgatccctacatcgcggatctgctacaggtggctgataatagaatacaggagctgcagcaggaggttcaccagctgcaagaaaaactcgccatgatggaatctggggttcgcgattactcaaagcagattgaactgagagagcgcgaaattgagcgcctgtcagtggcgttggacggaggcagatcacccgacgtgcttagtttagagtccaggaataagacgaacgagaagctaattgcgcatctgaacatccaggttgatttccttcagcaggcaaacaaggatctggagaaacgcataagagagctcatggagactaaggagacggtgacaagcgaggttgtcaatttgagcaataagaacgagaagctgtgccaggagctgaccgagatcgaccagctggcccagcagctggagcgacataaggaagaggttctggaaacagctgataaagaactgggtgaggccaagaaggaaataaagcgcaagctctctgagatgcaggacttagaggagaccatggcaaaactccagctcgagctgaacttgtgtcaaaaggaaaaagagcgtctttctgatgaactgctcgttaaaagtgacctggagacagtggttcatcagctcgagcaggaaaagcagcgtctgtcaaagaaagtagagagtttcgcagttaccgagcgccagctgacattagaagttgagagaatgcggcttgaacacggaattaaaaggcgtgaccggtcaccctcacgactcgacacttttctcaagggcatagaggaagaacgagattattacaagaaggagctcgaaaggctacaacacattatccagcgtagatcgtgttccaccagttactccgcccgggagaaatcaagtatctttcgtacccccgagaaaggagattacaactccgaaattcatcagatcactcgggagagggatgaactccagagaatgttggagcgatttgagaagtacatggaagatattcaaagcaatgttaagctgctcacagcagagcgcgataagttgtcagtcctttataacgaggctcaggaggagctgtcggctttacgcaaagagtcaactcagacaaccgctccccacaacattgtaagtctgatggagaaagaaaaagagcttgcgttgtcagacctccgtagaatcatggcggaaaaggaagccttgcgcgaaaaactggaacacattgaagaggtgtctctatttggcaagtctgagttggagaagaccatcgagcaccttacatgtgtaaaccatcagcttgaaagcgagaagtatgaactgaagtccaaagtcctgatcatgaaagaaacaatcgagagtttggagaacaagctgaaggtacaagcccagaaattcagccatgttgcgggcgactcatcccaccaaaagaccgaagttaattcgctgcggattgtcaacgagcagcttcagcgatccgtggacgattaccagcataggctgagcatcaagcgcggagagcttgaatccgctcaggcccagatcaagatcctggaagagaagatagacgagctgaatctcaagatgacaagccaggatgaggaagctcacgtcatgaagaagacgattggtgtcatagacaaagaaaaggatttccttcaagagaccgttgacgagaagactgagaagatcgccaatctccaagagaatctggctaataaggagaaggctgtggcccagatgaaaataatgattagtgaatgtgagagctccgtcaaccagctgaaggaaactcttgtgaatcgagaccgggagattaatagtttgaggagacagctggacgccgcacacaaggagctggatgaggtcggaaggagtagggagattgccttcaaggagaaccggcgtctgcaagacgaccttgctaccatggcccgtgagaaccaagagattagcctagagctagaggctgcagtccaggaaaaagaggaaatgaagagcagggtgcacaagtatattaccgaggtgagtcgttgggagtctctgatggcagccaaggaaaaggagaaccaggaccttctggacaggttccagatgttacacaaccgggcagaagattgggaagtcaaggcacatcaggcagagggggagagctcctctgtcagattggaactgttgagcattgataccgagaggagacacctccgggagcgggttgagctgctggaaaaggagattcaggaacacatcaatgctcatcatgcctacgaaagccaaataagcagcatggcaaaggccatgagccgactggaggaagagttgcggcaccaggaggatgagaaggctaccgtactaaatgatctttctagcctaagagagctgtgtattaaactggacagtggtaaagacataatgacgcaacagctaaattctaaaaacctggagttcgagagggtagtcgttgagctcgaaaatgtgaaatccgaaagcgacctgctgaagaagcaactatccaacgagcgtcacacagttaaaaacttggagtcactgttagcaaccaatcgggacaaggaatttcacagccacctgaccagtcatgagaaggacaccgagatacaattgctcaaagagaaacttacactttccgagtctaaacttacatctcagtcacgggaaaatacaatgctccgtgccaaggttgcccagttgcagactgattatgacgctttgaaaagacagatctctaccgagcgctacgagcgggaaagagccatccaggagatgagacggcacggcctcgcaacaccccctctgtcctccaccctccggtccccctcacacagccctgagcacaggaatgtgtag

SEQ ID NO: 217699 - DNA, 3423 bp, Artificial Sequence
  derived and/or modified sequence
atgacaaccgctgtcgaaagaaaatacatcaatatacgcaagcggctcgatcagctggggtaccggcaaaccctgacagtggagtgtctgcccttggtcgagaagctgttctcagacctggtgcacacaacggagagcctgcgtcaaagtaagctcagcgccgttaaggccgagaaagaatctgccaactttgactttgtgttagaaccctataagctcgagaacgccaggctcagtagggagaacaatgaactctacctggaactgatgaaattgagggaacactccgaccaacacgtcaaagaactcaaaaccagcctgaaaaagtgcgcgagggaaactgcagacctgaagttcctgaacaaccaatatgcgcacaaattgaagttgctggagaaggagtctaaagccaaaaacgagcggattcagcagctgcaggagaaaaatctgcacgcagtcgtgcaaacacctggtggcaaaaagcgatccatcgcctttcgaagacagaggatgcagatcgacgagcctgtgcccccttctgaagtcagctcctaccccgtccctcagcctgacgatccttacattgcggatcttctgcaggtggctgataaccgaatccaagagctgcagcaggaggtacatcagctgcaagaaaaactcgctatgatggagagtggggtgcgagattattctaaacaaatcgaattacgagaacgggaaatcgagagattatcagtggcgctggatggtggccgaagtcccgacgtactgtcacttgaaagccgaaacaaaacaaacgaaaaactcatagcccatctgaatattcaagtcgactttctccagcaggcaaataaggacctcgagaaacgcatccgagagctgatggaaactaaagagacagtgaccagtgaggtagtcaacctgtccaataagaacgaaaagctgtgccaggagctgaccgaaatcgatcagctagcacagcaactggagaggcacaaggaggaagtcctggaaacagctgataaggagctgggagaagcgaaaaaagagattaaaaggaagctgagtgagatgcaggacctggaagagactatggctaagctgcagttggagcttaacctgtgccagaaagaaaaagagagacttagtgatgaactgctggtcaaatcagatctggaaacagtggtgcaccagctcgagcaggaaaagcagagactgtctaagaaagtagagtcttttgccgttactgagagacaactgactttggaggtagaacggatgaggctcgaacatgggatcaagcgcagggatcggagtccatcgcgcctggacacattcctgaagggaattgaggaggaaagagattactacaaaaaagagctggagcgcttgcagcacatcatccagagacgatcttgtagtacatcatattctgctcgcgagaaatcctctatctttcggaccccagagaaaggcgactacaactctgagatacaccagataaccagagaacgcgatgagttacaaaggatgctcgagcgcttcgagaaatatatggaggacatacagagcaacgtgaagctcttaacagcggaaagagacaagctgagcgtcttatataacgaagcccaggaagagctcagtgcgctccgaaaggaatcgacacaaaccacagcccctcataacatcgtgtctctgatggagaaagaaaaggagctagctttgtccgacctgagaaggatcatggccgagaaggaggctctaagggagaagttagagcacatcgaagaagtgtcactgtttgggaagtccgaactcgaaaaaaccattgagcacttgacttgtgtgaaccatcaactggagagtgagaaatatgagcttaagtcgaaagtgctaatcatgaaagaaacgatcgaaagcctggaaaacaagttaaaggtacaggctcaaaaattttcacacgttgctggtgactccagccatcagaaaacagaggtgaactcacttcgcatagtgaatgagcaactgcagcgctctgtggacgattaccagcaccggctttctataaagcgaggggagctggaatccgcgcaagctcagatcaagattctggaagagaagatcgacgagcttaatttgaaaatgacttcgcaggatgaggaagcccatgtgatgaagaaaaccatcggggtcatcgataaggagaaggacttcctgcaggaaactgtcgacgaaaaaactgaaaaaatcgccaatctacaggagaaccttgccaacaaagagaaagccgtagcccagatgaagataatgattagtgagtgcgaaagctccgtgaatcagctgaaagaaaccctagtcaacagggaccgggagattaacagcctgcgtcgtcaattagacgccgcacataaagagctcgacgaggtgggccgatctagagagatcgctttcaaagaaaaccggaggcttcaagacgacttggcaaccatggctcgcgaaaatcaggaaatttccctggaactcgaggccgctgtacaggagaaggaggaaatgaagtccagagtccacaagtacattaccgaggtctcccggtgggaatctctcatggctgcaaaggagaaggagaaccaggatcttctcgatcgctttcagatgctgcataatcgggcagaggattgggaagtgaaagctcaccaggcagagggagagtcaagctcagtgagactcgaacttctgagcatcgatactgagcgtcggcacttgcgcgaacgagtggaacttctggagaaagaaattcaagagcatatcaacgcccaccatgcctacgaaagccagatttccagcatggctaaggcaatgtctcggttggaggaggaactgcgtcaccaagaggacgagaaagctaccgtgctgaatgacctctcatcactacgggaactctgcattaaactagactccggcaaggacatcatgactcaacagctaaattcaaagaacctggaattcgaacgggtagttgtagagttagaaaacgtcaagagcgaatctgatcttctgaaaaaacagttaagcaacgagcggcatacagtgaaaaacctggaatccctcttggccactaatagggacaaggagtttcactcacatctaacctcacacgagaaggacacagaaatacaactcttaaaagagaagctgacgttgagcgagtctaagctcacgagccagtcccgcgagaacacaatgttgcgagcaaaggtcgcccagctccagactgactacgacgctctgaagaggcaaatatccacggaaaggtacgaacgggaaagagcaattcaggagatgagaagacacggcctagcaactccaccactgagcagtaccctgaggagcccttctcacagtcctgagcatcgcaacgtttag

SEQ ID NO: 217700 - DNA, 4570 bp, Artificial Sequence
  derived and/or modified sequence
gacggaaggagctagtgggggactcgaggcctgagggcaatgcggctggaggcggaggcaacggcggctggagctgccggactttaatttttggaagtgaataaaacttgttttagaagacgagatgactacagctgtagagagaaagtatattaatattaggaaaaggctggatcagctgggataccgccagactctgacagtggagtgtttacctttggtagaaaaacttttcagcgacttagttcatacaactgagagccttcggcaatcaaaattatctgctgtgaaagctgaaaaagaaagtgccaattttgattttgttttggaaccctataaacttgaaaatgcaagattgagtagagaaaataatgaattatacctagagttaatgaaactgagagaacattcagaccaacacgttaaagagttgaaaacttcattgaagaaatgtgcacgtgaaacagctgatctgaaatttctgaataaccaatatgctcataaactcaaactgttggagaaagagagcaaagctaagaatgaaagaattcaacaacttcaagaaaagaatttgcatgctgtagtacaaactccaggtggcaagaaaagaagtattgctttcaggcgccagcgtatgcaaattgatgaaccggttcctccctctgaagtcagttcatatccagttcctcaaccagatgacccttacattgcagacctccttcaagtggctgataacaggattcaagaacttcaacaggaagtccaccagctacaagaaaagttagcaatgatggaaagtggggtgagagactatagcaagcagattgagctaagagaacgagagatagaacgactgtcagttgctttggatggtggtcggtcccctgatgtcctttctctggagtctagaaataaaaccaatgaaaagcttattgctcatttaaatattcaggttgactttcttcagcaagctaataaagacctggagaagcgtatacgagagcttatggaaaccaaggaaacagtgacatctgaagtcgttaatttaagtaacaaaaatgaaaaactctgccaagaattaactgaaatagatcagttagcacagcagttggaaagacataaagaagaagtgcttgagactgctgataaagagcttggggaagcaaagaaagagattaaaagaaagctctctgaaatgcaggatcttgaagaaacaatggcaaaacttcagctggaattgaacttatgccagaaagaaaaggagagactgagtgatgaactccttgtaaaatcagacctagaaactgttgttcatcagcttgaacaagaaaagcaaagacttagcaaaaaagttgaaagttttgcagttacagaacgacaacttactctggaggttgagaggatgagactagaacatggaataaaacgtcgagacaggtcaccttctcgtttagatacatttctgaaaggtatagaagaagaacgagattattataagaaagagctagagagactccaacatataatacagcgaagatcttgctctacaagttatagcgcacgtgaaaaaagttcaatatttagaacaccagaaaagggtgattacaattcagaaattcatcagatcacaagagaaagagatgaacttcagcgtatgctagaaagatttgaaaaatatatggaagatatacagtccaatgttaaattattgacagcagaaagagataaactaagtgtcttatataatgaagctcaggaagaattatctgccctaagaaaggaatccacccaaaccacagcaccccataatattgttagtcttatggaaaaggaaaaagaacttgcgttatctgacttaagaagaattatggcagaaaaggaagctttaagagaaaaattagagcatattgaagaagtgagtctttttggaaaatcagaattagagaaaactattgaacatttgacatgtgttaatcatcagcttgaaagcgaaaaatatgaattaaagtctaaagtgttaataatgaaagaaacaatagagtcgttagagaacaaattaaaagtccaagctcaaaaatttagccatgtggctggtgactcatctcatcagaaaacagaggtgaactcacttaggatagtgaatgagcagctacagcggtcagttgatgactatcagcaccgactttccataaaaagaggtgaacttgaatcagcccaagcacaaattaaaatactggaggaaaagatagatgaactaaaccttaagatgacttcacaggatgaggaggctcatgtaatgaaaaagaccattggtgttattgataaagaaaaagactttctccaggagactgtagatgagaagacagaaaagattgcaaatttgcaagaaaacctagctaataaagaaaaagctgttgctcaaatgaagataatgatctcagagtgtgaatcatctgtgaaccagctgaaagaaacattggttaatcgagatcgtgagataaacagcctccggcgccagcttgatgcagctcacaaagaactcgatgaagtaggaagatctagagaaatcgcttttaaggaaaacagaagactgcaagatgacctggctacaatggcaagagaaaatcaagaaatctcattggaattggaagcagcagtgcaagaaaaagaagaaatgaagagcagagttcataaatacataacagaggtgtcacgatgggagagcttaatggctgccaaggaaaaagaaaatcaagatttgttagatagatttcagatgcttcataaccgtgctgaagactgggaggtcaaagcccatcaagctgagggagaaagcagctcagttcgactggaacttctttctattgacactgagaggagacatcttcgagaaagagtggagctattagaaaaagaaattcaagagcacataaatgcccatcatgcttatgaatctcagatctcatcaatggcaaaagccatgtctcgattagaagaagagctgagacatcaagaagatgagaaagcaacagtattaaatgacttgtcatctcttagagaactttgcattaaacttgattcaggcaaagatattatgacccagcaattgaattcgaaaaaccttgagtttgagagggttgtggtggaattagaaaatgtaaagtcagagtcagacctactgaaaaaacaactttcaaatgagagacatacagttaaaaacctcgaatcattgttggctacaaacagagataaagaatttcattctcacttaacctcccacgagaaggatacagaaatccagctacttaaggagaagttaaccctttctgaaagcaaattaactagtcaaagccgggaaaacaccatgcttcgagctaaagtggcacagttacaaacagattatgatgctctgaaaaggcagatctcaactgaaagatacgaacgagaacgagcaatccaagagatgcgtcgacatggtcttgctacaccaccccttagttccactctgaggtctccttcacattctcctgaacatagaaatgtgtaattatcagaaagaataatggctttcaatgagttcctatgtggatttttaaaagaacagaacagtaatgaaatatttgaagtacttgttgctgaaaatcatgaacatggacacaaattctacctctgtcaacttttatttaaatcagtgaatatgttaaaaagtttggtttaaaagaactatatctatatgtatattttcatatatatgacagaacaagaatatgtattaatagtgcctaatgtatctatatttttattattcatgaattaaattactaaaagtatgtttatactgtgaattaatataatgtattcacattattctttaataatctgtttattaataagccatgatatgtgtatgtaaatattcttacagtacttgtttttagttgtcatgcctatgtttagaccatatcttaatgtattcacaaagaattatcaactttgatgctatgctgtcatgcttaactttttcttcttaaaattattcatagatctactgtctgttgtcaaggggaatatattcaggtctagtcttcttataatagcagaggtcttggtaaaataactaccatatataacgtgttattgccatctagaagaactatgatgagaaagatacatttatatattatgtaaaatgttaactatcatcatatggactctatgtaacacaaattcaaaagcaaactaaaagctatatgcagagttttgtataaaacaatagaacagaaatttgggacatttttctaggaaataaaattcctcggtgtattaatctaaggtttcaaagtataaaagtatatggggtaggccgggtgcagtggctcacgcctgtaatcccagcactttgggaggccgaggcgagtggatttcctaaggtcaggagtttgagaccagcctgagcaatgtggtgaaaccccatctctactaaaaatacaaaaattatctgggcttggtggcgggcacctgtaatcccagccacttgggaggctgaggcaggagaattgcttgaacccgg

SEQ ID NO: 217701 - DNA, 3423 bp, Artificial Sequence
  derived and/or modified sequence
atgaccaccgccgtggagagaaagtacatcaacatcagaaagagactggaccagctgggctacagacagaccctgaccgtggagtgcctgcccctggtggagaagctgttcagcgacctggtgcacaccaccgagagcctgagacagagcaagctgagcgccgtgaaggccgagaaggagagcgccaacttcgacttcgtgctggagccctacaagctggagaacgccagactgagcagagagaacaacgagctgtacctggagctgatgaagctgagagagcacagcgaccagcacgtgaaggagctgaagaccagcctgaagaagtgcgccagagagaccgccgacctgaagttcctgaacaaccagtacgcccacaagctgaagctgctggagaaggagagcaaggccaagaacgagagaatccagcagctgcaggagaagaacctgcacgccgtggtgcagacccccggcggcaagaagagaagcatcgccttcagaagacagagaatgcagatcgacgagcccgtgccccccagcgaggtgagcagctaccccgtgccccagcccgacgacccctacatcgccgacctgctgcaggtggccgacaacagaatccaggagctgcagcaggaggtgcaccagctgcaggagaagctggccatgatggagagcggcgtgagagactacagcaagcagatcgagctgagagagagagagatcgagagactgagcgtggccctggacggcggcagaagccccgacgtgctgagcctggagagcagaaacaagaccaacgagaagctgatcgcccacctgaacatccaggtggacttcctgcagcaggccaacaaggacctggagaagagaatcagagagctgatggagaccaaggagaccgtgaccagcgaggtggtgaacctgagcaacaagaacgagaagctgtgccaggagctgaccgagatcgaccagctggcccagcagctggagagacacaaggaggaggtgctggagaccgccgacaaggagctgggcgaggccaagaaggagatcaagagaaagctgagcgagatgcaggacctggaggagaccatggccaagctgcagctggagctgaacctgtgccagaaggagaaggagagactgagcgacgagctgctggtgaagagcgacctggagaccgtggtgcaccagctggagcaggagaagcagagactgagcaagaaggtggagagcttcgccgtgaccgagagacagctgaccctggaggtggagagaatgagactggagcacggcatcaagagaagagacagaagccccagcagactggacaccttcctgaagggcatcgaggaggagagagactactacaagaaggagctggagagactgcagcacatcatccagagaagaagctgcagcaccagctacagcgccagagagaagagcagcatcttcagaacccccgagaagggcgactacaacagcgagatccaccagatcaccagagagagagacgagctgcagagaatgctggagagattcgagaagtacatggaggacatccagagcaacgtgaagctgctgaccgccgagagagacaagctgagcgtgctgtacaacgaggcccaggaggagctgagcgccctgagaaaggagagcacccagaccaccgccccccacaacatcgtgagcctgatggagaaggagaaggagctggccctgagcgacctgagaagaatcatggccgagaaggaggccctgagagagaagctggagcacatcgaggaggtgagcctgttcggcaagagcgagctggagaagaccatcgagcacctgacctgcgtgaaccaccagctggagagcgagaagtacgagctgaagagcaaggtgctgatcatgaaggagaccatcgagagcctggagaacaagctgaaggtgcaggcccagaagttcagccacgtggccggcgacagcagccaccagaagaccgaggtgaacagcctgagaatcgtgaacgagcagctgcagagaagcgtggacgactaccagcacagactgagcatcaagagaggcgagctggagagcgcccaggcccagatcaagatcctggaggagaagatcgacgagctgaacctgaagatgaccagccaggacgaggaggcccacgtgatgaagaagaccatcggcgtgatcgacaaggagaaggacttcctgcaggagaccgtggacgagaagaccgagaagatcgccaacctgcaggagaacctggccaacaaggagaaggccgtggcccagatgaagatcatgatcagcgagtgcgagagcagcgtgaaccagctgaaggagaccctggtgaacagagacagagagatcaacagcctgagaagacagctggacgccgcccacaaggagctggacgaggtgggcagaagcagagagatcgccttcaaggagaacagaagactgcaggacgacctggccaccatggccagagagaaccaggagatcagcctggagctggaggccgccgtgcaggagaaggaggagatgaagagcagagtgcacaagtacatcaccgaggtgagcagatgggagagcctgatggccgccaaggagaaggagaaccaggacctgctggacagattccagatgctgcacaacagagccgaggactgggaggtgaaggcccaccaggccgagggcgagagcagcagcgtgagactggagctgctgagcatcgacaccgagagaagacacctgagagagagagtggagctgctggagaaggagatccaggagcacatcaacgcccaccacgcctacgagagccagatcagcagcatggccaaggccatgagcagactggaggaggagctgagacaccaggaggacgagaaggccaccgtgctgaacgacctgagcagcctgagagagctgtgcatcaagctggacagcggcaaggacatcatgacccagcagctgaacagcaagaacctggagttcgagagagtggtggtggagctggagaacgtgaagagcgagagcgacctgctgaagaagcagctgagcaacgagagacacaccgtgaagaacctggagagcctgctggccaccaacagagacaaggagttccacagccacctgaccagccacgagaaggacaccgagatccagctgctgaaggagaagctgaccctgagcgagagcaagctgaccagccagagcagagagaacaccatgctgagagccaaggtggcccagctgcagaccgactacgacgccctgaagagacagatcagcaccgagagatacgagagagagagagccatccaggagatgagaagacacggcctggccaccccccccctgagcagcaccctgagaagccccagccacagccccgagcacagaaacgtgtag

SEQ ID NO: 217702 - protein, 675 aa, Artificial Sequence
  derived and/or modified sequence
MADKEAGGSDGPRETAPTSAYSSPARSLGDTGITPLSPSHIVNDTDSNVSEQQSFLVVVAVDFGTTSSGYAYSFTKEPECIHVMRRWEGGDPGVSNQKTPTTILLTPERKFHSFGYAARDFYHDLDPNEAKQWLYLEKFKMKLHTTGDLTMDTDLTAANGKKVKALEIFAYALQYFKEQALKELSDQAGSEFENSDVRWVITVPAIWKQPAKQFMRQAAYQAGLASPENSEQLIIALEPEAASIYCRKLRLHQMIELSSKAAVNGYSGSDTVGAGFTQAKEHIRRNRQSRTFLVENVIGEIWSELEEGDKYVVVDSGGGTVDLTVHQIRLPEGHLKELYKATGGPYGSLGVDYEFEKLLYKIFGEDFIEQFKIKRPAAWVDLMIAFESRKRAAAPDRTNPLNITLPFSFIDYYKKFRGHSVEHALRKSNVDFVKWSSQGMLRMSPDAMNALFKPTIDSIIEHLRDLFQKPEVSTVKFLFLVGGFAEAPLLQQAVQAAFGDQCRIIIPQDVGLTILKGAVLFGLDPAVIKVRRSPLTYGVGVLNRYVEGKHPPEKLLVKDGTRWCTDVFDKFISADQSVALGELVKRSYTPAKPSQLVIVINIYSSEHDNVSFITDPGVKKCGTLRLDLTGTSGTAVPARREIQTLMQFGDTEIKATAIDIATSKSVKVGIDFLNY

SEQ ID NO: 217703 - DNA, 2028 bp, Artificial Sequence
  derived and/or modified sequence
atggcggacaaggaggctggcggctcagacggaccgagggaaaccgccccgacctcagcctattccagccctgcgaggtctctgggggacaccggtattacacccctgagcccttcccacatcgtgaacgacacagatagcaatgttagcgagcagcagagtttcctggtggtcgtggctgtggatttcggaactacaagcagcggctacgcatatagctttaccaaggaacccgagtgcatccatgtaatgaggagatgggaaggcggggaccccggagtttcgaatcagaagaccccgactaccattctcttgacccctgaaaggaagttccattcttttggctatgcagcaagagatttctatcacgatctggaccctaacgaagcgaaacagtggctctatctcgaaaagtttaagatgaaactgcatacgacaggcgatctcacaatggatacggatctcaccgcggctaacggaaagaaggtgaaagccttagaaatctttgcctacgcgctacagtatttcaaagaacaagctctcaaagaactgagcgatcaagccggtagtgaattcgaaaattcagatgtgagatgggtgattacagtgcccgccatctggaaacaacctgccaagcaattcatgcgtcaggccgcctatcaggcaggtctcgctagtcccgaaaattcagaacagctgatcatagcgctggagccagaggccgctagcatctattgtcgcaaactgcgcctacaccagatgatcgaactgtctagcaaggctgctgtcaacggttactccggctccgacaccgtgggagccggatttactcaggccaaggaacatattcggagaaatcgtcagtctaggacttttctggtagagaatgtgatcggcgagatctggtcagaactggaagagggcgataaatacgtcgtcgtcgatagtgggggcggtacagtcgacctaactgtgcatcagatccggctacccgagggccatcttaaagagttatacaaggcaaccgggggcccctatggctcactgggcgtggattatgaattcgaaaaactgttatataagattttcggggaggacttcatcgagcaattcaaaatcaagcgaccagctgcatgggtggatctgatgatcgccttcgagagcaggaagagagctgccgctcctgatcggacaaatcccctaaacattacacttcccttttcattcattgactactataaaaaatttcgaggtcacagcgttgaacatgcccttcggaaaagcaatgtggatttcgtgaaatggagttcccaggggatgttacggatgtccccggacgccatgaatgcactgtttaagcccacaatagatagcattatcgagcacctgcgggacctgttccaaaaacccgaggtgtctactgttaaattcctattcctggtaggaggttttgccgaggctccactgctacagcaggctgtacaggccgccttcggggaccagtgccgcatcatcatcccacaagacgtcggacttaccatactgaagggagcagtgctctttggactggatcccgcagtcatcaaagtgagaaggtctcctctgacctatggggtaggtgtgctgaacaggtatgtggaaggcaagcatccccccgagaaattactagtgaaagacggcaccaggtggtgcacagatgttttcgataaattcatctctgctgatcagtcagttgctcttggagaattggtgaagcggtcctacactcccgcaaagccatctcagctcgtgattgtcattaatatatattccagcgaacacgataatgtgagcttcattacagacccaggcgtgaagaagtgcgggacgctccggctagatctaactgggacctcaggcaccgctgtacctgctcgtcgcgaaatccagactttaatgcaattcggggatacagagatcaaagctaccgccatcgatatagcaactagcaaatcagtcaaggttgggattgacttcttgaattattag

SEQ ID NO: 217704 - DNA, 5722 bp, Artificial Sequence
  derived and/or modified sequence
ggcggctcagacacggcccgagcgccgccgcggacgcggacagagacccgcacgggcacgggcgctgcgctggaggctcccctcgcggtccggggctgcgcgaccatggcggacaaggaggccggcggcagcgacgggccccgagaaacggctcccacatctgcatattcatctccagcccggagtcttggggacacaggaataacgcctctgtccccctcccatattgtgaacgacactgactccaacgtctcagaacagcagtcatttctcgtggtggtggccgtcgactttgggaccacatccagtggctatgcctacagcttcaccaaggagccggaatgcatccatgtgatgaggcgatgggagggaggtgaccctggtgtgtccaatcagaagactccaaccaccatcttgctgactcccgagaggaagttccacagcttcgggtatgccgccagggacttttaccatgacctggatcccaatgaggccaagcagtggctgtacctggagaagttcaagatgaagctgcacaccactggggacctcaccatggatacagacctgacggcagcaaatggcaagaaagtcaaagcccttgaaatctttgcttatgccctgcagtactttaaggagcaggcgctgaaggagctgagtgaccaggcgggttcggagttcgagaactctgatgtcagatgggtcatcacggtgcctgccatctggaagcagccggccaagcagttcatgagacaagctgcctaccaggcaggcctggcctcccccgagaactcggagcagctcatcattgccttggagcctgaggcagcctctatctactgccgaaagctgcggctacaccagatgattgagctgagcagcaaggcagccgtcaatgggtacagcggcagtgacacagtaggagctgggtttacacaggctaaggaacacatacggcgtaatcggcagagtcggacctttttggtggagaatgtcataggagaaatctggtccgagctggaggaaggtgataagtatgtggttgtggacagtggcggtggcaccgtagacctgacagtccatcagatccggttaccggagggacaccttaaggaactgtataaagcaacaggcggaccctatggatctttaggagtagattatgagttcgaaaaacttctgtataaaatatttggagaggattttattgaacaattcaaaatcaaacgccctgcagcctgggttgacttaatgattgcgtttgagtctcgcaaaagggcggctgccccagacagaactaacccgctgaacatcaccctgcccttctccttcattgactactacaagaagttccgcgggcacagtgtggagcacgccttgcggaaaagcaatgtggattttgtgaagtggtcctcgcaggggatgctgcggatgagtccagatgccatgaacgccctttttaagccgaccatcgatagcatcattgagcatctccgggacctgtttcagaagcccgaggtgtccaccgtcaagttcctctttctggtgggcggctttgccgaggcgcccctgctgcagcaggcggtgcaggctgcttttggggaccagtgccggatcatcatcccccaggacgtgggcctcaccatcctcaagggtgccgtcctctttggcctggaccccgcggtcatcaaggtgcgccggtcgccgctcacctacggggtaggcgtgctgaaccgctacgtggagggcaagcacccgcctgagaagctgctggtgaaggatggcactcggtggtgcaccgacgtctttgacaagttcatctctgccgaccagtctgtggctctgggtgagctggtcaagcgtagctacaccccggccaagccctcccagctggtcattgtcatcaacatctacagctctgagcacgacaacgtcagcttcatcactgatcccggggtgaagaagtgtggcacgctccgcctggatctcacagggaccagtggcactgcggtgcccgcccggagggagatccagacccttatgcagttcggggacaccgagatcaaagccacagccattgatatagccacttcgaagagtgtcaaagttgggatcgacttcttaaattactaaccctcccgccccgctgcctgtccccttggactcaacttatctgcatctgctgacctcaaccttgactgttctttccctaaccttgaccctcaccattgcccatgtgaatttcagcagggaagatgagaacaatcagggctagaaataattagtgacttttgagggcacactggagtcagaaaaacagaaattaagattaaggtttaggcatagaaaattaaaggatcctggaggagcagctagttttcataggtacaaaagtggtgaaatggccacggagaagggaatcagtacatttctgcagcagtggttgcgctgctttgaacagatctccgttatgtagaatttaggatgccctattgctgtctttctagatttaaaatgagatctttgaaccaggaggagatcttcatctgagacttgtctttctaaattttttggatggccatcaatataaaatgccacccatctgcagttaatttcttttcctcatcatgtgattaaaagtggtgattcagtgggaactgggaatgtttttagctggtggtagaaggctgcctacactgggcactgttttagattctcatatcatttaaacagcaaggaggttcagggaagaataaccgtagccttgggtaatccactagggcttttgtgagtaggagagctgatacctcacattcttagcaggtgaaaacttgccatgatggaaacagatagtgaagagttactgacgtatcccaaattatatgctgtgacataaattcccagcatgcccagccctgatttctgagttcataagtaattctagtgaaccttagtaggaattctgggtaagaaaatgaggttgccattggtcttgtttgcatcaccaagaccagacatccagaagagcccctcaccttgaaaagcagacagattttaaattaaccccctccttcccactcaccttcatctccctaagagttttggccatttaattccacattttgaaaggaatacattggtgaaatttgggaagagaatctgtgctatgcaatgtttcattaaaatcttcagtttttcaagtctctctaaaaataatttgtagatctatacttgatgtattaagtcagttttttttcacagcgggcctgtggctcgcctgcatcagaattgcctgggtgcgtgttcagaacaggttcctggatctgagccctttttaactgaggccgactcttggagaggggcaccagaatctgcatttgtagtgtataccacatcgtggttcaactgaaattggagaaatactaacctgagattttgttgaagttcacacacagatcacagcccgccctctgcaggtgtcccctttgggctcctttaggaagagggcttccatgagaaggtgaccccataccttgccctcttggtcaatgggattggggctccacctggcttggagatggcccttttaaccctcacaggaagggccaggggaggaaaaaaattgcaagaaagcgacaccaagaacggagctgactgaggaaccaactggagggtcttcactctctccttccccagtgtacaaaaccagttttctgcaacattcaggagccaaatgaggaaaaagaatcaagaatctgactcacagcccatctgatctgttcaaagctgtcttttccacctgctgaaattcattaaatcactggaggcatgcataatgaatggagaatgagtgaacttccaatgcaacttggattcacaaacccattatcatagccaatatgcagattttaaacagcatttcacatttcatttgaccatgtcttctttttcgcatcgcctgctgcagaattccctactagaatgtgaaacaacgaacaaaccacagaacttagagtgtgctggttagtcacataacttagtagcaggattgtgtatccaggcacaaaggtgtctttgctaatgttctcttgctacctgccctgcttcaaacgctaaatggtatgggtctttctttgttgccagccatattctacaaataagacttttcaatatagttatgagtaatataattttatgtacatataatgttagaatattgtacagaatcttggtttctacgatgcgcttttcttgtttcaaaaagaggaaaatgcttgatttttgttgatgatacttttgttactgtccttaattttccatagtttggtttcttaattgtgctcactaagcatcgatctgtgctgatgccaagctatggactatgtacgcaagaccgagcaatagacagaggtgcctagggtccaaacacactgaacgcacgtggaccgcctggatcaggagcctcatcagacccttctccatgcacatccttcccaaacagtcacagattccattgaaaggagcagattctatcagttcttctgtgcagactttaagagctgaacgttctggttctggaagccatgtgactgcgcagaacaacctaagaaaccctttgtgtcctgaggggtcgttgacctctccttccgggtcggagcagtcactctgagggcaaagcgtggtccactgtgtgtgatgttttcaggatgctagggtcaaagaaagaaaccaagtggtacataagcccagcttttctgctgggctaagtgtaagtgtgagtaacatggtcaagcccctcttttttgggctaatgtaaagcctttcctgccttgcattaatgctatctccctgtgtactgtttctcttaaatgagcagatagaaatctgcagtgttggcagataggtgatggagaggatgataattttatcttctggccacagagctgcagccccagttgtcagagtccttaaatgaaacccccaaatccatccctccttccctacccccactggaatattctagaataagagcactggataagtacacttgaacacatttttctaaccttagaaaatacctacaaggcctgttgtcttgacccattactcaattgtccctggcatattatctgatcttcacgtttcttggaagcagaatcatcaaggctttcctttgtaactgccctttccgtacacagcaggcatgaataaatgctgagtaacagacaagttacagacaggaggggaaagaggaggaaccatacaactgtttttgcaaaatgatggctgagtccagattatagaggttgccttacccttagaatgttatttagaccaagtttagcttttagagtccaggtctggttaattgccagggtagcaaagaatcgcatgcaccaatgtaaacaggagtcagaatgcattattagtcaaagatcgaatttcacattgtagagatgtatagctgtgattaagctgcatatgtatgctgggaaacggcttgagtggatggctaatataaaagttgttggccataatgccacacctctcatctgcttgaaatatggaccagtattctaaaatatcagctactggggtctcattcactacaagataaattcaaacttcacagaactttgcagcagttcaccaccagacgggactgtgtctgcaaactctcttgtcttcacagacgcctaataaagcaaaactctgaatctca

SEQ ID NO: 217705 - DNA, 2028 bp, Artificial Sequence
  derived and/or modified sequence
atggctgacaaggaggccggcggcagtgatggcccccgggagacagcccccaccagcgcctacagcagccctgcccggagcctgggggacaccggcatcacccccctgagccccagccacatcgtgaatgacacagacagcaatgtgtctgagcagcagagcttcctggtggtggtggccgtggactttggcaccaccagcagcggctacgcctacagcttcaccaaggagcctgagtgcatccacgtgatgaggcgctgggagggcggggaccccggggtgagcaaccagaagacccccaccaccatcctgctgaccccagagaggaagttccacagctttggctatgctgcccgggacttctaccatgacctggaccccaatgaggccaagcagtggctgtacctggagaagttcaagatgaagctgcacaccaccggggacctgaccatggacacagacctgacagctgccaacgggaagaaggtgaaggccctggagatctttgcctatgccctgcagtacttcaaggagcaggccctgaaggagctgagtgaccaggccggcagcgagtttgaaaattctgatgtgcgctgggtgatcaccgtgcctgccatctggaagcagcctgccaagcagttcatgaggcaggccgcctaccaggccggcctggccagccctgagaacagcgagcagctgatcatcgccctggagcctgaggccgccagcatctactgcaggaagctgcggctgcaccagatgattgagctgagcagcaaggctgctgtgaatggctacagcggcagtgacacagtgggcgccggcttcacccaggccaaggagcacatcagaagaaaccggcagagcaggaccttcctggtggagaatgtcatcggggagatctggagcgagctggaggagggggacaagtatgtggtggtggacagcggcggcggcaccgtggacctgactgtgcaccagatccggctgcctgagggccacctgaaggagctgtacaaggccaccggcggcccctacggcagcctgggcgtggactatgaatttgagaagctgctgtacaagatctttggagaggacttcatcgagcagttcaagatcaagaggcctgctgcctgggtggacctgatgattgcctttgagagcaggaagagagctgctgccccagacaggaccaaccccctgaacatcaccctgcccttctccttcatcgactactacaagaagttccggggccacagcgtggagcacgccctgaggaagagcaatgtggactttgtgaagtggagcagccagggcatgctgaggatgagcccagatgccatgaatgccctcttcaagcccaccatcgacagcatcatcgagcacctgcgggacctcttccagaagccagaggtgtccacagtgaagttcctgttcctggtgggcggctttgctgaggcccccctgctgcagcaggccgtgcaggccgccttcggggaccagtgccgcatcatcatcccccaggatgtgggcctgaccatcctgaagggagctgtgctgtttggcctggaccctgctgtgatcaaggtgagaagaagccccctgacctatggagtgggcgtgctgaacagatatgtggagggcaagcaccccccagagaagctgctggtgaaggatggcacccgctggtgcacagatgtgtttgacaagttcatctctgctgaccagagcgtggccctgggggagctggtgaagaggagctacaccccagccaagcccagccagctggtgattgtcatcaacatctacagcagcgagcatgacaacgtgtccttcatcacagaccccggggtgaagaagtgtggcaccctgcggctggacctgaccggcaccagcggcacagctgtgcctgcccggcgggagatccagaccctgatgcagtttggagacacagagatcaaggccacagccatcgacatcgccaccagcaagtctgtgaaggtgggcatcgacttcctgaactactag

SEQ ID NO: 217706 - DNA, 2028 bp, Artificial Sequence
  derived and/or modified sequence
atggccgacaaggaggccggcggcagcgacggcccccgggagaccgctcccacgtccgcatatagcagtcctgcacgctccctaggagataccggcatcactcctctgtcacctagccatattgtgaatgacactgacagcaacgtgtccgagcagcaatcttttttggtcgtggtcgccgttgacttcggaacgaccagtagtgggtatgcctactctttcacaaaggagccagaatgtatccacgtgatgcgtagatgggaaggaggtgaccctggagtgtccaaccaaaaaactccaactacaattctgctgaccccagagagaaaatttcatagtttcggctatgccgctcgcgacttctatcacgacctagaccccaatgaggccaagcagtggctctaccttgagaagtttaagatgaagctccacacaactggtgatctcaccatggatacagatctgaccgcagccaacggcaagaaagttaaggccctggagattttcgcttacgccctgcaatatttcaaagagcaggcattgaaagagctttccgatcaggcaggctctgaatttgaaaactcagacgtccggtgggtcattacggtccccgccatctggaagcagcccgccaaacaattcatgcgacaggcggcctaccaggcaggcctcgcaagcccagagaatagcgagcagttgatcattgcgctggagcccgaggccgcaagcatttactgtagaaagctgcgactgcaccagatgatcgagctgtcgagcaaagcagctgtcaacggatattcgggatccgataccgtgggtgccggctttactcaggcaaaagaacacataagacgcaaccgccagagccgaacgtttttagtggaaaacgtaatcggtgaaatctggtctgagttagaggaaggcgacaagtacgtggtggttgactctggcggagggacggtggacctgactgtccaccagatccggctgcccgagggccacttgaaagagctgtataaggctaccggggggccatacggatcacttggcgtcgattatgaattcgaaaagctcctgtacaaaatctttggcgaggactttatcgagcagttcaaaattaagagacctgcagcctgggtggacttaatgatcgcgttcgagagcaggaaaagggcagctgccccagatcgcacaaacccattaaatatcactttgccattcagctttatcgattactataaaaagttccgaggtcatagcgtcgagcatgcattgagaaaatccaatgtggattttgttaaatggagctcccaggggatgttgagaatgagccctgatgccatgaatgcactgttcaaaccgaccatcgatagtatcatcgagcaccttagagatttgttccagaagcccgaagtctctaccgttaagtttctgttcttggtgggaggattcgctgaggcacctctcctccaacaagccgtccaagccgcttttggcgatcagtgtcggatcattatccctcaagacgtgggcctcactattctcaaaggcgcagtactgttcggtctcgatccagccgtgattaaggtaagaagaagcccacttacatatggagtgggagtgctcaacaggtacgtggagggtaaacacccccctgagaaactgctcgtgaaagatggcacgagatggtgtacagacgttttcgacaagtttattagtgcagatcagtccgtggccctgggtgaactggtgaagcggtcctacacaccagctaaaccatcacagctggtgattgttataaacatttattccagcgaacatgataacgtgtccttcatcacagatcccggggtgaaaaaatgtggtaccttgcgactggatttaactggcacctctgggacagcagtccccgcaaggcgggaaattcagactttgatgcagtttggcgacaccgaaattaaggctaccgccattgatatagcgaccagcaagtccgtcaaagtaggcatcgacttcctgaactactag

SEQ ID NO: 217707 - DNA, 2028 bp, Artificial Sequence
  derived and/or modified sequence
atggctgataaagaggcgggaggaagcgatggtccacgagagacggctcccaccagcgcttattcgagtcccgcacgtagcctaggagataccggtattacccccttgtccccatctcacattgtcaacgacactgatagcaacgtgagcgagcaacagagtttcctggttgtggtcgcagtagactttggaacaacatcatccgggtacgcttattcctttactaaggagccagagtgtattcatgttatgcgccgttgggaaggcggtgatcccggtgtttcaaaccagaagacgccaacaactattttgctaaccccagaaagaaagttccactcttttggctacgctgcgcgagacttctaccacgatctcgatcctaacgaggccaaacagtggctctacctggaaaagtttaagatgaaacttcacacgaccggcgatcttactatggataccgacctgaccgcagctaatggcaagaaggtgaaggcactggaaatatttgcctatgctctacagtattttaaagagcaagccctcaaagagttatcggaccaggccggaagcgagtttgaaaactcagacgtccgctgggtgatcaccgtccctgctatttggaagcaacccgctaagcaatttatgagacaggccgcttaccaagctggcctggccagtcccgagaactctgagcaacttatcatcgcactggagccagaggccgcttccatctactgccgaaagctgcgcttgcatcagatgatcgagctaagtagcaaagcggcagtaaacggctactctgggagcgatacagtgggcgctgggttcactcaagctaaggaacacattaggaggaaccgccagagcaggacgtttctggttgaaaacgtgataggtgagatatggtctgaattggaagagggcgataagtatgtggtggtcgactctggcggtggcaccgtggacctaacggtccaccagatacgcctacccgaaggccaccttaaagagttgtacaaagcgaccggcggaccttatggctcactgggcgtggattatgagttcgagaaactgttatacaagatttttggcgaagatttcattgaacagttcaagataaagaggcctgccgcttgggttgatcttatgattgcattcgagtcacggaagagagccgctgcacctgacagaactaatccactcaacataactctgccattcagtttcatcgactattacaagaagtttagggggcacagcgtggagcacgcattgaggaagtccaacgtcgacttcgtcaaatggagctctcaaggcatgctccgtatgagtcccgacgcaatgaacgctctgttcaaacccacaattgatagtatcattgagcacctgcgcgacctgtttcagaaacctgaggtgagcacagtgaagtttcttttcttggtgggcggttttgcggaagccccacttctgcagcaggctgtgcaggctgcattcggagaccaatgcaggatcatcattccgcaagacgtgggcctcacaatcttaaagggggctgtcctgttcggccttgatcctgccgtcattaaggtccgccgaagcccactgacgtacggcgtaggggttctgaatcgttatgtcgaaggcaagcaccctcccgagaagctcttggtaaaggacggtactcggtggtgtaccgacgtcttcgacaagtttattagcgcggatcagagcgtggctctcggggaattggtgaaacgctcctacaccccagcgaagccaagccagctggttatcgtaataaacatttactcttccgagcacgacaacgtgtctttcattactgatcccggtgtgaaaaaatgcggtaccctgcgcctcgacttaaccggaacctctggcacggccgtccctgccaggcgggagattcaaacactaatgcaattcggggacacagagattaaggcaacagctattgacattgcaaccagtaaaagcgtcaaggtagggatagatttccttaattattag

SEQ ID NO: 217708 - DNA, 2028 bp, Artificial Sequence
  derived and/or modified sequence
atggccgacaaggaggccggcggcagcgacggccccagagagaccgcccccaccagcgcctacagcagccccgccagaagcctgggcgacaccggcatcacccccctgagccccagccacatcgtgaacgacaccgacagcaacgtgagcgagcagcagagcttcctggtggtggtggccgtggacttcggcaccaccagcagcggctacgcctacagcttcaccaaggagcccgagtgcatccacgtgatgagaagatgggagggcggcgaccccggcgtgagcaaccagaagacccccaccaccatcctgctgacccccgagagaaagttccacagcttcggctacgccgccagagacttctaccacgacctggaccccaacgaggccaagcagtggctgtacctggagaagttcaagatgaagctgcacaccaccggcgacctgaccatggacaccgacctgaccgccgccaacggcaagaaggtgaaggccctggagatcttcgcctacgccctgcagtacttcaaggagcaggccctgaaggagctgagcgaccaggccggcagcgagttcgagaacagcgacgtgagatgggtgatcaccgtgcccgccatctggaagcagcccgccaagcagttcatgagacaggccgcctaccaggccggcctggccagccccgagaacagcgagcagctgatcatcgccctggagcccgaggccgccagcatctactgcagaaagctgagactgcaccagatgatcgagctgagcagcaaggccgccgtgaacggctacagcggcagcgacaccgtgggcgccggcttcacccaggccaaggagcacatcagaagaaacagacagagcagaaccttcctggtggagaacgtgatcggcgagatctggagcgagctggaggagggcgacaagtacgtggtggtggacagcggcggcggcaccgtggacctgaccgtgcaccagatcagactgcccgagggccacctgaaggagctgtacaaggccaccggcggcccctacggcagcctgggcgtggactacgagttcgagaagctgctgtacaagatcttcggcgaggacttcatcgagcagttcaagatcaagagacccgccgcctgggtggacctgatgatcgccttcgagagcagaaagagagccgccgcccccgacagaaccaaccccctgaacatcaccctgcccttcagcttcatcgactactacaagaagttcagaggccacagcgtggagcacgccctgagaaagagcaacgtggacttcgtgaagtggagcagccagggcatgctgagaatgagccccgacgccatgaacgccctgttcaagcccaccatcgacagcatcatcgagcacctgagagacctgttccagaagcccgaggtgagcaccgtgaagttcctgttcctggtgggcggcttcgccgaggcccccctgctgcagcaggccgtgcaggccgccttcggcgaccagtgcagaatcatcatcccccaggacgtgggcctgaccatcctgaagggcgccgtgctgttcggcctggaccccgccgtgatcaaggtgagaagaagccccctgacctacggcgtgggcgtgctgaacagatacgtggagggcaagcacccccccgagaagctgctggtgaaggacggcaccagatggtgcaccgacgtgttcgacaagttcatcagcgccgaccagagcgtggccctgggcgagctggtgaagagaagctacacccccgccaagcccagccagctggtgatcgtgatcaacatctacagcagcgagcacgacaacgtgagcttcatcaccgaccccggcgtgaagaagtgcggcaccctgagactggacctgaccggcaccagcggcaccgccgtgcccgccagaagagagatccagaccctgatgcagttcggcgacaccgagatcaaggccaccgccatcgacatcgccaccagcaagagcgtgaaggtgggcatcgacttcctgaactactag

SEQ ID NO: 217709 - protein, 792 aa, Artificial Sequence
  derived and/or modified sequence
MAAINPWASWGALTDQSWGMTAVDPWASWALCPQYPAWHVEGSLEEGRRATGLPAAQVQEPVTFKDVAVDFTQEEWGQLDLVQRTLYRDVMLETYGHLLSVGNQIAKPEVISLLEQGEEPWSVEQACPQRTCPEWVRNLESKALIPAQSIFEEEQSHGMKLERYIWDDPWFSRLEVLGCKDQLEMYHMNQSTAMRQMVFMQKQVLSQRSSEFCGLGAEFSQNLNFVPSQRVSQIEHFYKPDTHAQSWRCDSAIMYADKVTCENNDYDKTVYQSIQPIYPARIQTGDNLFKCTDAVKSFNHIIHFGDHKGIHTGEKLYEYKECHQIFNQSPSFNEHPRLHVGENQYNYKEYENIFYFSSFMEHQKIGTVEKAYKYNEWEKVFGYDSFLTQHTSTYTAEKPYDYNECGTSFIWSSYLIQHKKTHTGEKPYECDKCGKVFRNRSALTKHERTHTGIKPYECNKCGKAFSWNSHLIVHKRIHTGEKPYVCNECGKSFNWNSHLIGHQRTHTGEKPFECTECGKSFSWSSHLIAHMRMHTGEKPFKCDECEKAFRDYSALSKHERTHSGAKPYKCTECGKSFSWSSHLIAHQRTHTGEKPYNCQECGKAFRERSALTKHEIIHSGIKPYECNKCGKSCSQMAHLVRHQRTHTGEKPYECNKCGKSFSQSCHLVAHRRIHTGEKPYKCNQCERSFNCSSHLIAHRRTHTGEKPYRCNECGKAFNESSSLIVHLRNHTGEKPYKCNHCEKAFCKNSSLIIHQRMHSGEKRFICSECGKAFSGHSALLQHQRNHSEEKLN

SEQ ID NO: 217710 - protein, 702 aa, Artificial Sequence
  derived and/or modified sequence
MLETYGHLLSVGNQIAKPEVISLLEQGEEPWSVEQACPQRTCPEWVRNLESKALIPAQSIFEEEQSHGMKLERYIWDDPWFSRLEVLGCKDQLEMYHMNQSTAMRQMVFMQKQVLSQRSSEFCGLGAEFSQNLNFVPSQRVSQIEHFYKPDTHAQSWRCDSAIMYADKVTCENNDYDKTVYQSIQPIYPARIQTGDNLFKCTDAVKSFNHIIHFGDHKGIHTGEKLYEYKECHQIFNQSPSFNEHPRLHVGENQYNYKEYENIFYFSSFMEHQKIGTVEKAYKYNEWEKVFGYDSFLTQHTSTYTAEKPYDYNECGTSFIWSSYLIQHKKTHTGEKPYECDKCGKVFRNRSALTKHERTHTGIKPYECNKCGKAFSWNSHLIVHKRIHTGEKPYVCNECGKSFNWNSHLIGHQRTHTGEKPFECTECGKSFSWSSHLIAHMRMHTGEKPFKCDECEKAFRDYSALSKHERTHSGAKPYKCTECGKSFSWSSHLIAHQRTHTGEKPYNCQECGKAFRERSALTKHEIIHSGIKPYECNKCGKSCSQMAHLVRHQRTHTGEKPYECNKCGKSFSQSCHLVAHRRIHTGEKPYKCNQCERSFNCSSHLIAHRRTHTGEKPYRCNECGKAFNESSSLIVHLRNHTGEKPYKCNHCEKAFCKNSSLIIHQRMHSGEKRFICSECGKAFSGHSALLQHQRNHSEEKLN

SEQ ID NO: 217711 - protein, 508 aa, Artificial Sequence
  derived and/or modified sequence
MAAINPWASWGALTDQSWGMTAVDPWASWALCPQYPAWHVEGSLEEGRRATGLPAAQVQEPVTFKDVAVDFTQEEWGQLDLVQRTLYRDVMLETYGHLLSVGNQIAKPEVISLLEQGEEPWSVEQACPQRTCPEWVRNLESKALIPAQSIFEEEQSHGMKLERYIWDDPWFSRLEVLGCKDQLEMYHMNQSTAMRQMVFMQKQVLSQRSSEFCGLGAEFSQNLNFVPSQRVSQIEHFYKPDTHAQSWRCDSAIMYADKVTCENNDYDKTVYQSIQPIYPARIQTGDNLFKCTDAVKSFNHIIHFGDHKGIHTGEKLYEYKECHQIFNQSPSFNEHPRLHVGENQYNYKEYENIFYFSSFMEHQKIGTVEKAYKYNEWEKVFGYDSFLTQHTSTYTAEKPYDYNECGTSFIWSSYLIQHKKTHTGEKPYECDKCGKVFRNRSALTKHERTHTGIKPYECNKCGKAFSWNSHLIVHKRIHTGEKPYVCNECGKSFNWNSHLIGHQRTHTG

SEQ ID NO: 217712 - DNA, 2379 bp, Artificial Sequence
  derived and/or modified sequence
atggccgccatcaacccctgggccagctggggcgccctgaccgaccagagctggggcatgaccgccgtggacccctgggccagctgggccctgtgcccccagtaccccgcctggcacgtggagggcagcctggaggagggcagaagagccaccggcctgcccgccgcccaggtgcaggagcccgtgaccttcaaggacgtggccgtggacttcacccaggaggagtggggccagctggacctggtgcagagaaccctgtacagagacgtgatgctggagacctacggccacctgctgagcgtgggcaaccagatcgccaagcccgaggtgatcagcctgctggagcagggcgaggagccctggagcgtggagcaggcctgcccccagagaacctgccccgagtgggtgagaaacctggagagcaaggccctgatccccgcccagagcatcttcgaggaggagcagagccacggcatgaagctggagagatacatctgggacgacccctggttcagcagactggaggtgctgggctgcaaggaccagctggagatgtaccacatgaaccagagcaccgccatgagacagatggtgttcatgcagaagcaggtgctgagccagagaagcagcgagttctgcggcctgggcgccgagttcagccagaacctgaacttcgtgcccagccagagagtgagccagatcgagcacttctacaagcccgacacccacgcccagagctggagatgcgacagcgccatcatgtacgccgacaaggtgacctgcgagaacaacgactacgacaagaccgtgtaccagagcatccagcccatctaccccgccagaatccagaccggcgacaacctgttcaagtgcaccgacgccgtgaagagcttcaaccacatcatccacttcggcgaccacaagggcatccacaccggcgagaagctgtacgagtacaaggagtgccaccagatcttcaaccagagccccagcttcaacgagcaccccagactgcacgtgggcgagaaccagtacaactacaaggagtacgagaacatcttctacttcagcagcttcatggagcaccagaagatcggcaccgtggagaaggcctacaagtacaacgagtgggagaaggtgttcggctacgacagcttcctgacccagcacaccagcacctacaccgccgagaagccctacgactacaacgagtgcggcaccagcttcatctggagcagctacctgatccagcacaagaagacccacaccggcgagaagccctacgagtgcgacaagtgcggcaaggtgttcagaaacagaagcgccctgaccaagcacgagagaacccacaccggcatcaagccctacgagtgcaacaagtgcggcaaggccttcagctggaacagccacctgatcgtgcacaagagaatccacaccggcgagaagccctacgtgtgcaacgagtgcggcaagagcttcaactggaacagccacctgatcggccaccagagaacccacaccggcgagaagcccttcgagtgcaccgagtgcggcaagagcttcagctggagcagccacctgatcgcccacatgagaatgcacaccggcgagaagcccttcaagtgcgacgagtgcgagaaggccttcagagactacagcgccctgagcaagcacgagagaacccacagcggcgccaagccctacaagtgcaccgagtgcggcaagagcttcagctggagcagccacctgatcgcccaccagagaacccacaccggcgagaagccctacaactgccaggagtgcggcaaggccttcagagagagaagcgccctgaccaagcacgagatcatccacagcggcatcaagccctacgagtgcaacaagtgcggcaagagctgcagccagatggcccacctggtgagacaccagagaacccacaccggcgagaagccctacgagtgcaacaagtgcggcaagagcttcagccagagctgccacctggtggcccacagaagaatccacaccggcgagaagccctacaagtgcaaccagtgcgagagaagcttcaactgcagcagccacctgatcgcccacagaagaacccacaccggcgagaagccctacagatgcaacgagtgcggcaaggccttcaacgagagcagcagcctgatcgtgcacctgagaaaccacaccggcgagaagccctacaagtgcaaccactgcgagaaggccttctgcaagaacagcagcctgatcatccaccagagaatgcacagcggcgagaagagattcatctgcagcgagtgcggcaaggccttcagcggccacagcgccctgctgcagcaccagagaaaccacagcgaggagaagctgaactag

SEQ ID NO: 217713 - DNA, 2109 bp, Artificial Sequence
  derived and/or modified sequence
atgctggagacctacggccacctgctgagcgtgggcaaccagatcgccaagcccgaggtgatcagcctgctggagcagggcgaggagccctggagcgtggagcaggcctgcccccagagaacctgccccgagtgggtgagaaacctggagagcaaggccctgatccccgcccagagcatcttcgaggaggagcagagccacggcatgaagctggagagatacatctgggacgacccctggttcagcagactggaggtgctgggctgcaaggaccagctggagatgtaccacatgaaccagagcaccgccatgagacagatggtgttcatgcagaagcaggtgctgagccagagaagcagcgagttctgcggcctgggcgccgagttcagccagaacctgaacttcgtgcccagccagagagtgagccagatcgagcacttctacaagcccgacacccacgcccagagctggagatgcgacagcgccatcatgtacgccgacaaggtgacctgcgagaacaacgactacgacaagaccgtgtaccagagcatccagcccatctaccccgccagaatccagaccggcgacaacctgttcaagtgcaccgacgccgtgaagagcttcaaccacatcatccacttcggcgaccacaagggcatccacaccggcgagaagctgtacgagtacaaggagtgccaccagatcttcaaccagagccccagcttcaacgagcaccccagactgcacgtgggcgagaaccagtacaactacaaggagtacgagaacatcttctacttcagcagcttcatggagcaccagaagatcggcaccgtggagaaggcctacaagtacaacgagtgggagaaggtgttcggctacgacagcttcctgacccagcacaccagcacctacaccgccgagaagccctacgactacaacgagtgcggcaccagcttcatctggagcagctacctgatccagcacaagaagacccacaccggcgagaagccctacgagtgcgacaagtgcggcaaggtgttcagaaacagaagcgccctgaccaagcacgagagaacccacaccggcatcaagccctacgagtgcaacaagtgcggcaaggccttcagctggaacagccacctgatcgtgcacaagagaatccacaccggcgagaagccctacgtgtgcaacgagtgcggcaagagcttcaactggaacagccacctgatcggccaccagagaacccacaccggcgagaagcccttcgagtgcaccgagtgcggcaagagcttcagctggagcagccacctgatcgcccacatgagaatgcacaccggcgagaagcccttcaagtgcgacgagtgcgagaaggccttcagagactacagcgccctgagcaagcacgagagaacccacagcggcgccaagccctacaagtgcaccgagtgcggcaagagcttcagctggagcagccacctgatcgcccaccagagaacccacaccggcgagaagccctacaactgccaggagtgcggcaaggccttcagagagagaagcgccctgaccaagcacgagatcatccacagcggcatcaagccctacgagtgcaacaagtgcggcaagagctgcagccagatggcccacctggtgagacaccagagaacccacaccggcgagaagccctacgagtgcaacaagtgcggcaagagcttcagccagagctgccacctggtggcccacagaagaatccacaccggcgagaagccctacaagtgcaaccagtgcgagagaagcttcaactgcagcagccacctgatcgcccacagaagaacccacaccggcgagaagccctacagatgcaacgagtgcggcaaggccttcaacgagagcagcagcctgatcgtgcacctgagaaaccacaccggcgagaagccctacaagtgcaaccactgcgagaaggccttctgcaagaacagcagcctgatcatccaccagagaatgcacagcggcgagaagagattcatctgcagcgagtgcggcaaggccttcagcggccacagcgccctgctgcagcaccagagaaaccacagcgaggagaagctgaactag

SEQ ID NO: 217714 - DNA, 1527 bp, Artificial Sequence
  derived and/or modified sequence
atggccgccatcaacccctgggccagctggggcgccctgaccgaccagagctggggcatgaccgccgtggacccctgggccagctgggccctgtgcccccagtaccccgcctggcacgtggagggcagcctggaggagggcagaagagccaccggcctgcccgccgcccaggtgcaggagcccgtgaccttcaaggacgtggccgtggacttcacccaggaggagtggggccagctggacctggtgcagagaaccctgtacagagacgtgatgctggagacctacggccacctgctgagcgtgggcaaccagatcgccaagcccgaggtgatcagcctgctggagcagggcgaggagccctggagcgtggagcaggcctgcccccagagaacctgccccgagtgggtgagaaacctggagagcaaggccctgatccccgcccagagcatcttcgaggaggagcagagccacggcatgaagctggagagatacatctgggacgacccctggttcagcagactggaggtgctgggctgcaaggaccagctggagatgtaccacatgaaccagagcaccgccatgagacagatggtgttcatgcagaagcaggtgctgagccagagaagcagcgagttctgcggcctgggcgccgagttcagccagaacctgaacttcgtgcccagccagagagtgagccagatcgagcacttctacaagcccgacacccacgcccagagctggagatgcgacagcgccatcatgtacgccgacaaggtgacctgcgagaacaacgactacgacaagaccgtgtaccagagcatccagcccatctaccccgccagaatccagaccggcgacaacctgttcaagtgcaccgacgccgtgaagagcttcaaccacatcatccacttcggcgaccacaagggcatccacaccggcgagaagctgtacgagtacaaggagtgccaccagatcttcaaccagagccccagcttcaacgagcaccccagactgcacgtgggcgagaaccagtacaactacaaggagtacgagaacatcttctacttcagcagcttcatggagcaccagaagatcggcaccgtggagaaggcctacaagtacaacgagtgggagaaggtgttcggctacgacagcttcctgacccagcacaccagcacctacaccgccgagaagccctacgactacaacgagtgcggcaccagcttcatctggagcagctacctgatccagcacaagaagacccacaccggcgagaagccctacgagtgcgacaagtgcggcaaggtgttcagaaacagaagcgccctgaccaagcacgagagaacccacaccggcatcaagccctacgagtgcaacaagtgcggcaaggccttcagctggaacagccacctgatcgtgcacaagagaatccacaccggcgagaagccctacgtgtgcaacgagtgcggcaagagcttcaactggaacagccacctgatcggccaccagagaacccacaccggctag

SEQ ID NO: 217715 - DNA, 2379 bp, Artificial Sequence
  derived and/or modified sequence
atggctgcgataaacccctgggcttcctggggtgcgcttacagaccagagctggggcatgacagccgtggatccctgggcttcatgggcgctttgcccacagtacccggcctggcacgtagaaggcagtttagaggagggcagacgagctacagggctacctgctgcacaggtgcaggagcccgtgaccttcaaggatgtggctgtcgatttcacccaggaggaatggggccagctcgacctagttcagagaactctgtatcgggatgttatgctcgagacatatggacaccttctctctgtaggcaatcaaattgctaagccagaggttatttcactactcgaacagggtgaagaaccttggtccgttgaacaggcctgtccgcagcgaacatgcccagaatgggtgagaaatctggaatcaaaggccctgatccccgcacagtccatctttgaggaagaacagagtcacgggatgaaattggagcgctatatttgggatgacccctggttttcgagactggaagtgctggggtgcaaggatcaactcgagatgtatcacatgaaccagtccacagcaatgcggcagatggtgtttatgcagaaacaagtcctgagccagaggtcctctgagttttgcggcctgggcgccgaattctcacagaacctgaactttgtcccatcccaacgcgtgagccagatcgagcatttttacaaacccgacacacacgcccagagttggagatgcgatagcgccattatgtacgctgacaaggtaacctgtgagaataacgattacgacaaaaccgtctatcagtctatccagccaatttacccagctagaatccagaccggtgacaatctcttcaaatgtaccgacgccgtgaagagcttcaaccacataattcatttcggtgaccacaaaggaatacacaccggagaaaaattgtacgaatataaagaatgccatcaaatctttaatcagtctccgtccttcaacgagcaccctcgtctgcatgtgggcgagaatcagtacaactataaagaatacgaaaacatcttttactttagcagttttatggagcatcagaaaatcggtactgtggagaaagcctacaagtacaacgagtgggaaaaggttttcggctatgacagctttctcacccagcatacaagcacctatacagctgaaaagccctacgactataacgaatgcggcacttctttcatttggtcgagctatttgatacagcacaagaagactcatacgggagagaagccttatgaatgtgataaatgcggtaaggtctttagaaacagatccgccctgacaaaacacgagaggacccatactggaattaagccctatgaatgcaacaagtgtggcaaagcattttcgtggaatagtcatctgatcgtccacaaacgaatccataccggcgagaaaccctacgtctgcaacgaatgcggaaagagcttcaactggaacagtcacctcatagggcaccagcgtacacacaccggcgagaagccgttcgaatgcacagaatgtggcaagagtttctcctggtcaagtcacctgattgcccacatgcgaatgcacactggagagaagccctttaagtgtgacgagtgtgagaaagcgttccgcgattattccgcactgtctaagcatgagcgaacgcatagcggcgcaaaaccttacaaatgtacagagtgcggcaagagtttctcgtggtcttcccacttgatcgcacaccagcgaacacacaccggggaaaagccctataattgccaagagtgtggtaaggcatttcgggagcggagcgcgcttacaaagcatgaaattattcattctgggataaagccctacgaatgtaataagtgcggtaaatcttgttcccaaatggcgcatctcgtgaggcaccagaggacccacaccggagaaaaaccctacgaatgtaacaaatgcggcaagtcattttcccaatcttgtcatctggttgctcacagacgcatccataccggtgagaaaccctacaagtgcaatcagtgtgaaagatcctttaattgctcgtcccatcttattgcccaccggagaactcataccggcgagaagccctataggtgtaatgaatgcggcaaggcgtttaatgaatcatcttcattgatagttcacctgcggaatcacaccggcgaaaaaccttataaatgtaaccactgtgaaaaggccttttgcaagaactctagcctgatcattcatcagagaatgcatagcggcgagaaaagatttatttgctcggaatgcggtaaagcttttagcggtcatagcgctttgctgcagcaccagcggaaccactctgaagaaaagcttaactag

SEQ ID NO: 217716 - DNA, 2109 bp, Artificial Sequence
  derived and/or modified sequence
atgctggagacttatggccatctgctgagcgtcgggaatcaaattgcaaagccagaggtcatcagtctactagagcaaggcgaagagccatggtccgtggaacaggcctgcccccagcgcacctgtcccgaatgggtacggaacctagagtcaaaagctcttatccccgcacagagtatcttcgaggaggagcaaagtcacgggatgaagctggaaaggtatatctgggatgatccctggttctctcgtttagaggtgctgggatgtaaagaccagttggaaatgtatcatatgaaccagtcaacggctatgcgccaaatggttttcatgcagaagcaggtgctttcccagaggtcatctgagttctgtggactgggagcagagttctcgcagaatctgaacttcgttccttcccagcgggtcagccagatcgaacatttttataaacctgatactcacgcccagtcttggcggtgcgactctgccattatgtacgcggataaagttacctgcgaaaacaatgattacgacaagacggtgtatcagagtatccagccgatatatcccgccagaatccagaccggggataacctgttcaagtgcacagacgccgtaaagagcttcaaccatatcatccactttggggatcataagggaattcacactggggaaaagctgtatgagtacaaggagtgccaccagattttcaaccagtcccccagtttcaacgaacatcctcgactccacgtgggtgagaatcagtacaactataaggagtacgagaatatcttctacttttcttcctttatggaacaccagaaaatcgggaccgtcgaaaaagcctataagtacaacgaatgggaaaaggtgtttgggtacgattcattcctcactcagcacactagcacttatacagccgagaagccctatgattacaacgagtgtggcacctccttcatctggtcatcctacctgatacaacataaaaaaacccacacaggcgagaagccttacgagtgcgataaatgtggtaaagtgttcaggaatagaagtgcccttacgaagcacgaacgaacacacaccggaatcaagccctacgaatgcaataagtgtggcaaggctttttcgtggaatagccatttgattgtgcataaacggatccacactggcgaaaaaccatacgtgtgtaatgagtgtggcaagagctttaactggaattctcacctgatagggcatcagagaacacacacaggagagaaacctttcgaatgcactgagtgcggcaagtctttcagctggagctcccacctgatagctcacatgcgcatgcacaccggcgaaaaaccgttcaagtgtgacgagtgcgaaaaagcattccgcgactatagcgcgctgtctaagcatgaacgcacacatagcggggcgaagccctataagtgtaccgaatgtgggaaaagcttcagctggtcgtcacacctcattgcacaccagcgaacccacacaggagagaaaccttacaactgccaggaatgcggcaaagcctttagagagagatctgccctaacgaagcatgagatcatccattccggcattaaaccatacgaatgcaacaaatgcggtaagtcgtgtagtcagatggctcatttggttaggcaccaacgcacccacacaggggaaaaaccctacgagtgcaacaagtgtgggaaaagcttcagtcaaagctgtcatctggtggctcaccgaaggatacacacaggagagaagccatataaatgcaaccaatgtgaaagatccttcaactgtagctcccatctgatagcacataggcgaacccacaccggcgagaaaccctataggtgtaatgagtgcgggaaggcctttaacgagagctccagcctaattgtgcatctgaggaatcacaccggtgagaagccctacaagtgcaaccattgtgaaaaggccttttgcaagaactccagcctcattatacaccaacggatgcacagcggtgagaaaaggttcatctgttctgagtgtggcaaggccttctctggccattccgctctcctgcagcatcaacggaatcacagcgaagaaaagctgaattag

SEQ ID NO: 217717 - DNA, 1527 bp, Artificial Sequence
  derived and/or modified sequence
atggcagcaattaacccatgggcgtcctggggagccctcactgaccagagttggggcatgactgcggtcgatccctgggcctcttgggctctgtgcccccagtacccagcatggcacgtcgagggctccttggaggaaggaaggcgagccaccggactcccggcagcccaagtgcaagagccggtgacgtttaaggacgtcgccgttgacttcactcaggaggagtggggccagcttgacctggtccagagaaccctgtacagagatgtgatgcttgagacctacggccatctactgagcgtcgggaaccagattgccaagcccgaggtaatctcacttctggagcaaggcgaggaaccctggtccgtggagcaggcatgtccccagaggacctgtccagagtgggtcagaaatcttgaaagcaaagccctcatacccgcgcagagcattttcgaggaggagcaaagccacggtatgaagctggaacgttatatttgggacgatccctggttttctcggctggaggtcttgggttgcaaagatcagcttgagatgtatcatatgaaccagagcaccgccatgcggcagatggtgttcatgcagaagcaagttctgagccagaggagctccgaattctgtggtctgggcgctgaattcagccagaaccttaactttgtcccctctcagagggtttctcagattgagcatttttataaaccggatacccacgcacaaagttggcgctgcgattcagcgatcatgtatgctgataaagttacttgcgagaacaacgattacgataaaaccgtgtaccagtctatccagcccatttaccccgccagaatacagacaggggacaatttattcaagtgtactgatgcagtgaagagtttcaaccacatcatccatttcggagaccataagggtatacacacaggggaaaaactatatgagtataaggagtgccatcaaattttcaatcagagccctagctttaacgaacaccctcgactacacgtgggcgagaatcagtacaattataaggagtatgaaaatatattctatttctcttcctttatggagcatcagaagattggtacagttgaaaaggcctacaagtacaatgagtgggagaaggtgtttggctacgatagctttttaacgcagcacacttcaacatatacggccgagaaaccttacgactacaacgagtgcggaacttcttttatctggtccagctacctgatccagcacaagaagacccacactggtgaaaagccatacgagtgcgataaatgtggtaaggtgttcagaaatagaagcgccctcaccaagcacgaaaggactcatacaggaattaaaccatatgaatgtaacaagtgcgggaaagcgttcagttggaattcccatctcattgttcacaagcgtatccacactggggagaagccctatgtgtgcaatgaatgtgggaaatccttcaactggaacagtcatctgatcggtcatcagaggacacatacaggttag

SEQ ID NO: 217718 - DNA, 2379 bp, Artificial Sequence
  derived and/or modified sequence
atggccgccatcaacccctgggcctcctggggcgccctgacagaccagagctggggcatgacagctgtggacccctgggcctcctgggccctgtgcccccagtacccagcctggcacgtggagggcagcctggaggagggccggcgggccaccggcctgcctgctgcccaggtgcaggagcctgtgaccttcaaggatgtggccgtggacttcacccaggaggagtggggccagctggacctggtgcagaggaccctgtacagagatgtgatgctggagacctacggccacctgctgtctgtgggcaaccagatcgccaagccagaggtgatcagcctgctggagcagggcgaggagccctggagcgtggagcaggcctgcccccagaggacctgcccagagtgggtgaggaacctggagagcaaggccctgatcccagcccagagcatctttgaggaggagcagagccacggcatgaagctggagcgctacatctgggatgacccctggttcagccggctggaggtgctgggctgcaaggaccagctggagatgtaccacatgaaccagagcacagccatgaggcagatggtgttcatgcagaagcaggtgctgagccagaggagcagcgagttctgtggcctgggcgctgagttcagccagaacctgaactttgtgcccagccagagggtgtcccagatcgagcacttctacaagccagacacccacgcccagagctggaggtgtgacagcgccatcatgtatgctgacaaggtgacctgtgagaacaatgactatgacaagacagtgtaccagagcatccagcccatctacccagcccgcatccagacaggagacaacctcttcaagtgcacagatgctgtgaagagcttcaaccacatcatccactttggagaccacaagggcatccacactggagagaagctgtatgagtacaaggagtgccaccagatcttcaaccagagccccagcttcaatgagcacccccggctgcacgtgggggagaaccagtacaactacaaggagtatgagaacatcttctacttcagcagcttcatggagcaccagaagattggaacagtggagaaggcctacaagtacaatgagtgggagaaggtgtttggctatgacagcttcctgacccagcacaccagcacctacacagctgagaagccctatgactacaatgaatgtggcaccagcttcatctggagcagctacctgatccagcacaagaagacccacactggagagaagccctatgaatgtgacaagtgtgggaaggtgttcaggaacagaagtgccctgaccaagcatgagaggacccacacaggcatcaagccctatgagtgcaacaagtgtgggaaggccttctcctggaacagccacctgattgtgcacaagaggatccacactggagagaagccctacgtgtgcaatgaatgtgggaagagcttcaactggaacagccacctgattggccaccagaggacccacactggagagaagccctttgaatgtacagaatgtgggaagagcttctcctggagcagccacctgattgcccacatgaggatgcacactggagagaagcccttcaagtgtgatgaatgtgagaaggccttccgggactacagcgccctgagcaagcatgagaggacccacagcggggccaagccctacaagtgcacagaatgtgggaagagcttctcctggagcagccacctgattgcccaccagaggacccacactggagagaagccctacaactgccaggagtgtgggaaggccttccgggagaggtctgccctgaccaagcatgagatcatccacagcggcatcaagccctatgagtgcaacaagtgtgggaagagctgcagccagatggcccacctggtgcgccaccagaggacccacactggagagaagccctatgagtgcaacaagtgtgggaagagcttcagccagagctgccacctggtggcccaccggcgcatccacactggagagaagccctacaagtgcaaccagtgtgagaggagcttcaactgcagcagccacctgattgcccacaggaggacccacactggagagaagccctaccgctgcaatgaatgtgggaaggccttcaatgaaagcagcagcctcatcgtgcacctgaggaaccacactggagagaagccctacaagtgcaaccactgtgagaaggccttctgcaagaacagcagcctcatcatccaccagaggatgcacagcggggagaagcgcttcatctgcagtgaatgtgggaaggccttcagcggccacagcgccctgctgcagcaccagaggaaccacagcgaggagaagctgaactag

SEQ ID NO: 217719 - DNA, 2109 bp, Artificial Sequence
  derived and/or modified sequence
atgctggagacctacggccacctgctgtctgtgggcaaccagatcgccaagccagaggtgatcagcctgctggagcagggcgaggagccctggagcgtggagcaggcctgcccccagaggacctgcccagagtgggtgaggaacctggagagcaaggccctgatcccagcccagagcatctttgaggaggagcagagccacggcatgaagctggagcgctacatctgggatgacccctggttcagccggctggaggtgctgggctgcaaggaccagctggagatgtaccacatgaaccagagcacagccatgaggcagatggtgttcatgcagaagcaggtgctgagccagaggagcagcgagttctgtggcctgggcgctgagttcagccagaacctgaactttgtgcccagccagagggtgtcccagatcgagcacttctacaagccagacacccacgcccagagctggaggtgtgacagcgccatcatgtatgctgacaaggtgacctgtgagaacaatgactatgacaagacagtgtaccagagcatccagcccatctacccagcccgcatccagacaggagacaacctcttcaagtgcacagatgctgtgaagagcttcaaccacatcatccactttggagaccacaagggcatccacactggagagaagctgtatgagtacaaggagtgccaccagatcttcaaccagagccccagcttcaatgagcacccccggctgcacgtgggggagaaccagtacaactacaaggagtatgagaacatcttctacttcagcagcttcatggagcaccagaagattggaacagtggagaaggcctacaagtacaatgagtgggagaaggtgtttggctatgacagcttcctgacccagcacaccagcacctacacagctgagaagccctatgactacaatgaatgtggcaccagcttcatctggagcagctacctgatccagcacaagaagacccacactggagagaagccctatgaatgtgacaagtgtgggaaggtgttcaggaacagaagtgccctgaccaagcatgagaggacccacacaggcatcaagccctatgagtgcaacaagtgtgggaaggccttctcctggaacagccacctgattgtgcacaagaggatccacactggagagaagccctacgtgtgcaatgaatgtgggaagagcttcaactggaacagccacctgattggccaccagaggacccacactggagagaagccctttgaatgtacagaatgtgggaagagcttctcctggagcagccacctgattgcccacatgaggatgcacactggagagaagcccttcaagtgtgatgaatgtgagaaggccttccgggactacagcgccctgagcaagcatgagaggacccacagcggggccaagccctacaagtgcacagaatgtgggaagagcttctcctggagcagccacctgattgcccaccagaggacccacactggagagaagccctacaactgccaggagtgtgggaaggccttccgggagaggtctgccctgaccaagcatgagatcatccacagcggcatcaagccctatgagtgcaacaagtgtgggaagagctgcagccagatggcccacctggtgcgccaccagaggacccacactggagagaagccctatgagtgcaacaagtgtgggaagagcttcagccagagctgccacctggtggcccaccggcgcatccacactggagagaagccctacaagtgcaaccagtgtgagaggagcttcaactgcagcagccacctgattgcccacaggaggacccacactggagagaagccctaccgctgcaatgaatgtgggaaggccttcaatgaaagcagcagcctcatcgtgcacctgaggaaccacactggagagaagccctacaagtgcaaccactgtgagaaggccttctgcaagaacagcagcctcatcatccaccagaggatgcacagcggggagaagcgcttcatctgcagtgaatgtgggaaggccttcagcggccacagcgccctgctgcagcaccagaggaaccacagcgaggagaagctgaactag

SEQ ID NO: 217720 - DNA, 1527 bp, Artificial Sequence
  derived and/or modified sequence
atggccgccatcaacccctgggcctcctggggcgccctgacagaccagagctggggcatgacagctgtggacccctgggcctcctgggccctgtgcccccagtacccagcctggcacgtggagggcagcctggaggagggccggcgggccaccggcctgcctgctgcccaggtgcaggagcctgtgaccttcaaggatgtggccgtggacttcacccaggaggagtggggccagctggacctggtgcagaggaccctgtacagagatgtgatgctggagacctacggccacctgctgtctgtgggcaaccagatcgccaagccagaggtgatcagcctgctggagcagggcgaggagccctggagcgtggagcaggcctgcccccagaggacctgcccagagtgggtgaggaacctggagagcaaggccctgatcccagcccagagcatctttgaggaggagcagagccacggcatgaagctggagcgctacatctgggatgacccctggttcagccggctggaggtgctgggctgcaaggaccagctggagatgtaccacatgaaccagagcacagccatgaggcagatggtgttcatgcagaagcaggtgctgagccagaggagcagcgagttctgtggcctgggcgctgagttcagccagaacctgaactttgtgcccagccagagggtgtcccagatcgagcacttctacaagccagacacccacgcccagagctggaggtgtgacagcgccatcatgtatgctgacaaggtgacctgtgagaacaatgactatgacaagacagtgtaccagagcatccagcccatctacccagcccgcatccagacaggagacaacctcttcaagtgcacagatgctgtgaagagcttcaaccacatcatccactttggagaccacaagggcatccacactggagagaagctgtatgagtacaaggagtgccaccagatcttcaaccagagccccagcttcaatgagcacccccggctgcacgtgggggagaaccagtacaactacaaggagtatgagaacatcttctacttcagcagcttcatggagcaccagaagattggaacagtggagaaggcctacaagtacaatgagtgggagaaggtgtttggctatgacagcttcctgacccagcacaccagcacctacacagctgagaagccctatgactacaatgaatgtggcaccagcttcatctggagcagctacctgatccagcacaagaagacccacactggagagaagccctatgaatgtgacaagtgtgggaaggtgttcaggaacagaagtgccctgaccaagcatgagaggacccacacaggcatcaagccctatgagtgcaacaagtgtgggaaggccttctcctggaacagccacctgattgtgcacaagaggatccacactggagagaagccctacgtgtgcaatgaatgtgggaagagcttcaactggaacagccacctgattggccaccagaggacccacactggatag

SEQ ID NO: 217721 - DNA, 2379 bp, Artificial Sequence
  derived and/or modified sequence
atggccgccatcaacccctgggccagctggggcgccctgaccgaccagtcttggggaatgaccgctgtcgatccttgggcaagttgggcgctgtgtccccagtaccctgcctggcacgttgaaggtagtctggaggagggcaggagggcaaccggcctcccagccgcccaggtgcaggagcccgtgactttcaaagatgtggccgttgatttcacccaggaagaatggggccagctggatctagtgcagcggaccctctatagagacgtaatgctcgaaacatatgggcacctgctcagcgtggggaatcaaattgcgaaaccagaggttataagcctgcttgagcagggtgaggagccttggagcgtggaacaagcttgtccgcaaaggacctgccccgagtgggtgagaaacctcgagtctaaagctcttatacccgcccagagcatttttgaagaagaacaatcacacgggatgaagctcgaacgatatatttgggatgacccatggttctctagactggaagttttgggttgcaaggaccaactcgagatgtatcacatgaaccagtcgactgccatgagacaaatggtgtttatgcagaaacaggtgctgtcacaaagatcttcagaattctgcggcttaggggctgaattttcccagaatctgaatttcgtcccctcccagagggtctcacagatagagcatttctacaaaccggatacacacgcgcagagttggcgctgcgacagtgcaattatgtacgctgataaggtaacttgtgagaacaacgattatgacaaaacagtgtaccagagtatccagcctatttaccccgcacgcattcaaactggggataacctgttcaagtgcaccgacgccgtcaaaagtttcaaccatattatccatttcggcgatcataaaggaatccatactggcgaaaagctgtacgaatataaggaatgtcaccagatctttaaccagtctcccagcttcaatgaacatcctaggctgcatgtgggagaaaaccagtacaactacaaggagtacgagaatattttctatttctcttctttcatggagcaccagaagatcgggaccgtggaaaaagcctataagtacaacgagtgggagaaggtattcggctatgactctttcttaacgcaacatacaagcacttatactgcagagaagccatacgactacaatgagtgtggcacttccttcatctggtcaagctatctgatacagcacaagaagacacacactggcgaaaagccctacgagtgcgacaagtgcgggaaggtttttcgcaacaggagcgcattgacaaagcacgagagaacacacacaggcattaagccctacgaatgtaataagtgtgggaaggccttttcctggaactcccacttgattgtgcacaagcggatccacactggggaaaagccttacgtctgcaacgaatgcggaaagagcttcaactggaattcgcatctaattggccaccagcgcacgcacacaggcgagaaacctttcgagtgtaccgaatgtggtaagagctttagctggtcttctcacctgatagcacatatgaggatgcataccggggagaagcccttcaaatgtgatgaatgcgagaaggcgtttcgtgattattctgcgctttctaaacacgaaaggactcacagtggcgccaaaccatacaaatgtacggagtgtgggaagtcattttcatggtccagtcacctgatcgcgcaccagcgaacacataccggcgaaaagccctacaactgtcaggaatgcgggaaagcttttcgcgagcggagcgcattaaccaagcatgagattatacattctggaatcaaaccttatgagtgtaacaagtgtgggaagagctgtagtcagatggcccatcttgtcaggcaccagagaactcatacaggcgaaaaaccttatgagtgcaataagtgcggtaagtccttcagccagtcttgccacctagtggcccaccgaagaattcataccggggagaagccatacaaatgtaatcaatgcgagcgcagcttcaactgcagctcacacctcatagcccatcggcgtacccacaccggagaaaaaccttatcgttgcaacgagtgcggtaaggctttcaacgaaagttccagcctgatcgtccacctgaggaaccacacaggggaaaaaccttataaatgcaatcactgcgaaaaagcgttctgcaaaaacagtagtctgattattcatcagcggatgcattcaggggagaagcgattcatctgtagcgagtgtggaaaagccttttccgggcattccgccctgctacagcatcagagaaatcatagcgaggagaaactgaactag

SEQ ID NO: 217722 - DNA, 2109 bp, Artificial Sequence
  derived and/or modified sequence
atgctggagacctacggccacctgctgagcgtgggcaaccagatcgcaaagccagaagtcatctctctgctggaacaaggcgaagaaccctggagtgtggagcaggcctgccctcaacggacatgcccagagtgggtaaggaacctggaatctaaagcacttattccggcgcaaagtatattcgaagaagagcaaagtcacggaatgaagcttgaaaggtacatttgggatgatccgtggttcagccgtctggaggtgctcggttgcaaggaccagctggaaatgtaccacatgaatcagtcaaccgcaatgcgacagatggtcttcatgcagaaacaggtgttgagccagcgtagcagtgagttctgtggtctgggtgcagagttctcacaaaaccttaacttcgtgccaagccagcgggtttctcaaatagagcatttttacaagcccgacacccatgcacagtcgtggcggtgtgactctgccatcatgtacgctgacaaagtgacttgcgagaacaatgactatgataaaactgtgtaccaatccattcagcccatctatccagcccgcattcaaacaggagacaacttgttcaagtgcaccgacgcagtcaaatcttttaatcatattatccactttggcgaccataagggcatccatacaggtgagaagttgtacgaatataaagagtgtcaccagatctttaaccagagtcccagttttaatgagcatccgagattgcatgtgggcgaaaaccagtacaactataaggaatatgagaatattttttacttcagttcatttatggagcaccagaaaatcgggaccgtggaaaaggcgtataaatacaacgaatgggaaaaagttttcggctatgacagcttcctgacacagcatacaagcacatatacggccgagaagccttacgactacaatgagtgcgggaccagttttatttggtccagctacttaatacagcacaaaaagacacacactggcgaaaaaccctacgagtgtgacaagtgtggcaaggtgtttcggaatcgatcagctctcaccaagcatgagcgcacgcatactgggattaagccctatgaatgtaataaatgtggaaaggcgttcagctggaatagtcaccttatcgtgcataaacgtatccacacaggtgaaaagccttacgtctgtaatgaatgcgggaagtcttttaattggaattctcacctgattggccatcagaggactcacaccggcgagaagcccttcgaatgcactgaatgtggaaagtccttcagctggagctctcatctgatcgcccacatgagaatgcacactggcgaaaagccttttaagtgcgatgaatgcgagaaagcattccgggactacagcgctctgtccaaacacgagagaactcatagcggcgccaagccctacaaatgcactgaatgcggaaagtcattctcatggtctagccacctgatagctcaccaacggactcataccggtgaaaagccttataattgccaggaatgtggaaaggcatttagagagaggagcgccttgacaaaacatgagatcatccatagtggaattaaaccctacgagtgcaataaatgcggcaaaagctgcagccaaatggcccacctggttcgtcaccagcgaactcacacgggcgagaagccttacgagtgcaataaatgcggaaagtctttcagtcaatcatgtcacctggttgcccacaggaggatccacactggtgaaaaaccatataagtgtaatcagtgtgagaggagtttcaactgcagctcacatctcatcgcgcaccgccggacccacacaggtgagaagccttaccggtgcaacgagtgcggcaaggcattcaatgagagttccagcctcattgtgcacctcaggaatcacactggtgagaagccttacaaatgtaaccattgcgagaaggccttttgtaaaaattcctccttgataattcaccagcggatgcatagcggagagaagaggtttatctgttccgaatgcggcaaagcctttagcgggcattccgccctgctgcagcaccagcgtaatcactcggaggagaagctaaactag

SEQ ID NO: 217723 - DNA, 1527 bp, Artificial Sequence
  derived and/or modified sequence
atggccgccatcaacccctgggccagctggggcgccctgaccgaccagtcctggggaatgactgcagtcgatccatgggcgagttgggcgctgtgccctcagtacccagcttggcatgtggaggggtcactggaagagggtcgcagagccaccgggctgcccgccgcacaggtgcaggagcctgtgacgttcaaggacgtcgcggtcgactttacgcaagaagaatggggtcagttagatctagtgcagcgcaccctctatagggatgtcatgcttgagacttatggccacctgctctccgtgggaaaccagatcgctaaacccgaagtgattagcctattggagcaaggtgaagagccttggagcgttgaacaggcatgtccgcagagaacatgccctgagtgggtgaggaaccttgagtcaaaggctctgattcccgcccagagtatcttcgaggaagaacagtcacatgggatgaaactggagagatacatatgggatgatccttggttttcccgcctggaggtgctgggatgtaaggaccagttggaaatgtaccatatgaatcagtccactgccatgcgacagatggtgttcatgcaaaagcaagtgctctctcaaaggtccagcgagttctgcggactcggagccgagttttcacaaaacctgaattttgtcccttcacagagggtaagccagatcgagcacttctacaaacctgatacccacgcccaatcatggagatgcgactctgcaatcatgtacgctgacaaagtgacatgtgagaataatgactacgacaaaacagtataccagagcatacagcctatctaccctgccaggatacaaactggggataacctctttaaatgtaccgacgcagtcaagtctttcaaccatattatccattttggagaccacaaaggaattcacactggggagaagctttatgagtacaaggaatgtcatcagatttttaaccaaagtccgtcattcaacgaacatccaagactacacgtcggcgaaaaccaatataactataaggagtacgagaacatcttctatttcagtagctttatggagcatcagaagataggcacagtcgagaaggcttataaatacaatgagtgggaaaaagtttttggctacgacagcttcctcacgcagcatactagcacttatacagctgaaaagccctatgattataatgaatgcgggacctccttcatctggagttcatacctgatccagcacaaaaagactcataccggtgagaaaccatacgagtgcgacaaatgtggaaaggttttccgaaatcggtctgctctgactaagcatgagaggacccacaccggtataaagccttacgagtgtaataagtgcggcaaagctttctcatggaactcccacctcatcgtccacaaacggatccatactggagaaaagccatacgtatgcaacgaatgcgggaagtcattcaattggaactcacacctgatagggcaccagcgaacacataccggatag

SEQ ID NO: 217724 - DNA, 2379 bp, Artificial Sequence
  derived and/or modified sequence
atggcagcgattaacccttgggccagctggggcgctctgaccgaccaatcatggggcatgacagcagtcgacccttgggcttcgtgggccctctgccctcaatatccagcatggcatgtggagggcagtctggaggagggccgtagggccactgggctccccgcagcccaggtgcaggaaccagtgacttttaaagatgtggcggtggactttactcaagaggagtggggccagttggatttggtccagcggacgctgtaccgcgacgtgatgctcgagacctacggccatttgctgtccgtcggcaaccaaatcgcgaaaccagaggtgatctctttgttggagcaaggcgaggagccatggtccgttgagcaggcctgcccccaaagaacctgccctgagtgggtaagaaacctggaatccaaggccttgataccagcccagtcaattttcgaagaggagcagtctcacggcatgaagttggagagatatatttgggacgatccgtggttcagcaggcttgaggttctggggtgcaaggaccagctagagatgtaccacatgaaccagtcaacagccatgaggcagatggtcttcatgcagaaacaggtcctgagccaacgttcctctgagttctgcgggcttggtgcagaatttagccagaatctgaatttcgttccatctcagcgtgttagtcagatcgagcatttctacaagcccgatactcacgcccagagctggcgatgcgacagcgctattatgtacgccgacaaagtgacctgcgagaacaacgactacgacaaaacagtataccagagcatccaacctatctaccccgctcggatccagaccggggacaatctgttcaagtgtaccgatgctgtcaagagttttaaccacattattcactttggcgatcataagggcatccacaccggcgagaagctctatgagtacaaagagtgtcaccaaatctttaatcaatcaccatcattcaacgaacatccacggctgcacgtcggagagaaccaatacaactataaggaatacgagaacatcttctattttagcagttttatggagcatcagaagattggtaccgtggaaaaggcctataagtacaatgagtgggagaaagttttcggctatgattccttcctaacgcagcacactagcacttacacagccgaaaagccttatgactataatgaatgcggaacttcatttatttggtctagctacctgatccaacataaaaagacccacaccggggagaagccttacgaatgcgataaatgtggcaaagtgtttaggaataggagcgccctcaccaaacacgaacgcacccatacagggattaaaccctacgagtgcaataaatgtggcaaggccttctcatggaactcccatctcatcgtacacaaaaggattcacacaggagaaaaaccttacgtctgcaacgagtgtgggaagtcctttaactggaactcccacttgatcgggcatcaaagaactcatactggagaaaagccttttgaatgcactgagtgcggcaagtctttcagctggtccagtcacctgatcgcccatatgcggatgcacactggggagaagccgtttaaatgtgatgagtgtgaaaaggccttcagggattactccgcattgagtaagcacgagaggacacacagtggggctaaaccctacaagtgcacagaatgtggaaagtctttctcatggtcatcccacctgatagctcaccagcgcacgcataccggagagaagccatacaactgtcaagaatgcggtaaagctttcagagagcgttccgccctcactaagcacgagatcatccactccgggatcaagccttatgaatgcaataagtgcggaaagtcatgctcccagatggcccatttggttagacaccagagaacccatactggagaaaagccctatgagtgtaataagtgtgggaaatctttttcccagtcctgtcacctggtggcccatcgccgaattcataccggagagaaaccatacaagtgtaaccagtgtgagagatcgtttaactgctcgtcacacctaattgcccataggcgcacacacaccggcgagaagccttacagatgtaatgaatgcgggaaggcatttaacgagtcttcgagcctcatcgtgcacctgaggaaccatacgggagaaaaaccctataagtgtaaccactgcgaaaaggccttttgcaagaatagtagccttattattcaccagcggatgcactctggtgaaaagagatttatatgctcggagtgtgggaaggctttttccggtcactcagctctattgcagcaccagagaaatcactcagaggaaaagcttaactag

SEQ ID NO: 217725 - DNA, 2109 bp, Artificial Sequence
  derived and/or modified sequence
atgctggagacatacggccatctcctatccgttggaaaccagatcgccaaacccgaagtgatctcactcctcgagcagggtgaggagccgtggagcgtggaacaggcatgtccacagcgaacttgtcccgagtgggttcgtaacctcgagagcaaagccctgatcccggctcagtcgatcttcgaggaggaacagtcccacgggatgaaactggaacgctacatttgggacgatccatggtttagtaggctggaggtcctgggctgtaaggaccagctggagatgtatcatatgaatcaatcaactgccatgaggcagatggttttcatgcagaagcaggtattatcccagcgttcttctgaattctgtggcttaggcgctgaattttcacagaatctcaacttcgtaccgtctcagagagtctctcagatagaacacttctataaaccggatacccacgcgcagtcctggcgctgcgattccgccatcatgtacgccgacaaagttacctgtgaaaacaacgactacgataagacggtgtaccagtcaatccagcccatctaccctgccagaatccagaccggtgataacttgtttaagtgcacagatgccgttaagagttttaaccacatcattcacttcggtgaccacaagggtatccacacaggagaaaagttatacgagtacaaagagtgtcatcagatatttaaccaatcaccaagcttcaatgaacatccaagactgcacgttggagaaaaccaatacaattacaaggaatacgagaacattttttacttcagtagtttcatggaacaccaaaaaatagggaccgtggaaaaggcgtataaatacaacgaatgggaaaaggtgttcgggtatgattcatttttgactcagcacacttctacctacaccgctgagaagccgtatgactacaatgagtgtggcacaagcttcatatggagttcataccttatccagcacaagaagacacacactggcgagaagccttacgagtgtgacaaatgcggcaaagtttttcgaaatcggagtgccctcactaaacatgagaggacccatactggaatcaaaccatatgagtgcaataaatgcggaaaggcctttagctggaattcccacctcatagttcacaaaagaattcacactggggagaaaccctacgtgtgcaacgaatgtgggaaaagttttaattggaatagtcaccttatcgggcaccagcgcacccataccggcgagaaaccttttgagtgtacggaatgtggtaaaagcttctcttggagctcccatcttattgcacatatgcggatgcatactggcgagaaaccgttcaaatgtgacgagtgcgaaaaggcgttccgagactacagtgctctgtccaagcacgagcgcacccatagtggcgctaagccctataaatgtactgagtgcggaaaaagtttcagttggtcgtctcacctcattgcccaccaaagaacacacaccggcgaaaaaccttacaattgtcaagagtgtggtaaagctttcagagaaaggtccgcgctgacaaagcatgaaataattcactcaggcattaagccctacgaatgtaataaatgcgggaagtcgtgctctcagatggctcacctggtgcggcatcaacgtacccatacgggtgagaaaccttatgaatgcaacaagtgcggtaagagctttagccagagctgccacctcgtagcccaccgcagaatccataccggcgaaaaaccatacaagtgtaaccagtgcgaaaggtcttttaattgtagctcacatctgatagctcataggagaacgcatacaggggagaagccttaccgttgcaatgaatgcggcaaagcttttaatgagagctcgagcctcatcgtgcaccttcgcaaccacaccggagagaagccttataaatgtaaccactgtgagaaggccttctgcaagaattcatctctgatcatccaccagcgcatgcattctggtgaaaagagatttatatgcagcgagtgcggtaaagccttctccggccattctgccctcctccagcatcagagaaatcattctgaggagaagctgaactag

SEQ ID NO: 217726 - DNA, 1527 bp, Artificial Sequence
  derived and/or modified sequence
atggccgctattaatccttgggcctcatggggcgctttgaccgaccaaagctggggcatgaccgcagtggatccgtgggcctcatgggcactgtgtccccagtaccctgcttggcacgtggaagggagccttgaggagggacgcagggccactggtcttcctgctgcacaggttcaggagcctgtgaccttcaaggatgtggcagtcgatttcacccaagaggagtggggccaattagatttggtgcaacgtaccctgtatcgcgacgtcatgctcgaaacgtacgggcacctgctgtctgtgggcaatcagattgcaaagcccgaagttatatccttgctggagcagggggaggagccgtggtctgttgaacaggcttgcccacagagaacatgtcctgagtgggtgcgcaatttagaatccaaggcattaattcccgctcagtctatcttcgaggaagaacagtcccatgggatgaagctggagcgctatatctgggatgacccttggttttctaggttggaggtcctgggctgtaaagaccagcttgaaatgtaccatatgaatcagtctactgccatgagacaaatggtgtttatgcagaagcaggttcttagtcagcgctcgtccgaattttgcgggctgggggcagagtttagtcagaatttaaacttcgtaccatctcagcgcgtctcccaaatcgagcatttctacaaacccgacacccacgcacagtcatggagatgtgacagcgccatcatgtatgcagacaaagttacctgcgagaataacgattatgacaagactgtttatcagtccattcaaccaatttaccctgcacgtatccaaactggggacaacctcttcaagtgtaccgacgccgtaaaatcatttaatcatatcatacattttggcgaccataagggaatccacacaggcgaaaagctatacgagtataaggagtgccatcaaatcttcaatcaaagtcccagtttcaacgagcatcctcgcctccatgtgggcgaaaaccagtacaattataaggaatacgaaaacatcttttacttcagctcttttatggaacatcagaagataggaaccgtggagaaagcctataagtacaacgagtgggagaaagtttttgggtacgactccttcctaacccagcacacctccacctacacagccgaaaagccttacgactacaatgaatgtgggacttcctttatctggtcatcttaccttattcagcacaaaaagactcataccggagagaagccctacgagtgtgacaaatgtggaaaagtcttccggaacagatccgcactcactaaacatgagagaacacacaccgggattaagccttatgagtgcaataagtgtggaaaagcctttagctggaacagtcatctgatcgtacataaacggatacacacaggtgaaaaaccctacgtatgtaacgagtgtggcaaatcatttaattggaactctcatttgatcggacaccaaagaacgcacactgggtag

SEQ ID NO: 217727 - DNA, 4248 bp, Artificial Sequence
  derived and/or modified sequence
gaggaaaactcacagggtgcgtcgctggtaacccatgctcccataaagcctggcctctggaaagagacttgggaacgagccctgacgttctcagccgtcgagcttcacagagaagggtagctcgaattaggttccttatcttaaagagaataacagcagtcactttctcacaatcttgcgaacgccaaatggaaggatccctcgagagcgctgagaactcgccgagctcctcccgggaaacccggtaccacgaggcgccattttgcggatgggcaaaccgaggcccgcggggccgcgacttacccaggcctttttgcagtgggaggcgacggtggaggagggtggtctgggaccgggacaacaaagtccatcctgccgccggcttcgacgcaggtgccagaaaggtcccaaccccgcccaggcagggcgaggcggcgcggcccaggaacctgtcatggcggcgccgctgcccgacgccggaagtgcccgcctggaactacagctcccagcagaccccgcggcgcgctccggtcgacgccggggaagcagccgccattgtccgcggctgaggttgggatttgctgtgttcctgggcaggtgcctggtcaatcagtcctcgggatggcagccatcaacccgtgggcctcctggggtgcccttacggaccaatcttgggggatgacagctgttgacccatgggcctcctgggctctgtgtcctcagtatcctgcctggcacgtggagggaagcctggaggaggggaggagggccactgggctcccagcagcccaggttcaggaaccagtgaccttcaaggacgtggccgtggacttcacccaagaagagtgggggcagctggaccttgttcagaggaccctgtaccgtgatgtgatgctggagacctatggtcacctgctctctgtgggaaatcagattgccaagcctgaggtcatctccctgttggagcaaggagaagagccgtggtcagtggagcaggcatgtcctcaacgcacttgtccagaatgggtgagaaatcttgaaagcaaagcattgatcccagcacagagcatttttgaggaagaacaatcccatggcatgaagttggaaagatatatatgggatgatccttggttctccaggttagaagttttgggatgtaaagaccaattagaaatgtaccacatgaaccagagtacagctatgaggcagatggtcttcatgcaaaagcaagtactatcccagagaagctctgaattctgtggacttggggcagagtttagccagaacttaaactttgttccatctcagagagtttctcagatagaacatttctataagcctgatacacatgctcaaagttggagatgtgactcagccataatgtatgcagataaggttacctgtgaaaataatgattatgacaaaactgtttatcagtccattcaacctatttaccctgcaagaatacaaactggagataatcttttcaaatgtactgatgctgttaaatctttcaatcatataatacattttggtgatcataaaggaattcacacaggagaaaaactctatgaatataaggaatgccatcaaatctttaaccagagcccatcatttaatgaacacccaaggcttcatgttggagaaaaccagtataattacaaagaatatgagaatatcttttatttctcatcctttatggaacatcaaaaaattggtactgtagagaaagcgtataaatacaatgaatgggagaaagtctttgggtatgactctttccttactcaacatacaagcacttacactgcagagaaaccctatgactacaatgaatgtgggacgtctttcatctggagctcttaccttattcaacataagaaaactcatactggagaaaaaccctatgaatgtgataaatgtggaaaagtttttaggaatcgctcagcccttacgaaacatgaacggactcacactggaataaaaccctatgaatgtaataaatgtggaaaagccttcagctggaattctcatcttattgtacataagagaattcatacaggagaaaaaccttatgtttgtaatgagtgtgggaaatctttcaactggaactctcatcttattggacatcagaggactcatacaggagagaaaccttttgaatgtactgaatgtgggaaatcattcagctggagctcccatcttattgcccatatgagaatgcatactggagagaaaccctttaaatgtgatgaatgtgaaaaagcttttagggactactcagcccttagtaaacatgaaagaactcattctggagcaaaaccatataaatgtactgaatgtggaaaatccttcagctggagctcccatcttattgcccatcagagaactcacacgggagagaaaccatataactgtcaggaatgtggcaaagcattcagagaacgctcagccctcactaaacatgagataattcattctggaattaagccctatgaatgtaataaatgtggaaaatcctgtagccagatggctcaccttgttagacatcaaaggactcatactggagaaaaaccctatgaatgcaataaatgtggaaaatccttcagtcagagctgtcaccttgttgctcatcggagaattcacactggtgagaaaccctataaatgtaatcagtgtgaaagatcctttaactgtagttctcacctcattgcacaccggagaactcatactggagagaaaccatacaggtgtaatgaatgtgggaaagcatttaatgagagttcatcccttattgtacacctaagaaaccatactggagaaaagccctacaaatgtaatcattgtgaaaaagcattttgtaagaattcttcccttattattcatcagagaatgcatagtggagagaaacgctttatatgcagtgaatgtggaaaagcctttagtggtcactcagccctacttcaacaccagagaaatcacagtgaagagaaactgaattgaatttatgcgagtttttcgtttcttgtacatttgacaacacattgaggaaaaccctataaacataatcaagaggggacatttttcattaagagttcagtaagacttctcccacattatttactagaaaatatcatcttagaagaaaccccatgaaggaaaagaatagggaaaagctttcagcagttatttagcccttactcaaaatcagataattaacaatgaaggaaactctaaactccccttatggtctaccagtaattcatacttgaggaccatgactgtggggaatgaggcatcttttagcaagagctctcaccaattgtagattggtgtgaattgctaagggaaaaaccttatgcagagaaaagtttttgactggaaatacactgttttgcatcaagctggagtactggatggaaaactctacaataacattttgtgcataattgtagaaatacagattttgttgttataaggggagggtctgggtgcccaggagtagaatatgaagtgctaaatctgaatgtaagaaaaataatagtattgaatggggtatttactgttgattaacctccttagagaaaattaatgaatgagatgactaacggtagaaaagttattgcctaggagtgtgagactgatgttgctggacagaaagtgatccttagcccagtgtgtcagcgtccattgttactcatcactgcattgttgggcaattagtttgtaatttgttttaggcaatcactataaattataattatggacactgcatcagtatacataacatgaaggaataaaaaggatacagaattgtatatacatacttactgtaacacatctaaaaaaatgtatatgggtaaggacctgaaagatccatggaaaagttaacccagttgagatttttaaaaagttttacaaatacatataacacttatgtgctgggctttcttttaaatgctttccaagtgttaacttgtttagtcccctttactctgagataggtactgttaccccagttttacaaatggctaagctgaagcagagatgttgaaggatcctacctaaggggcacaactagtaagggagtagagctgagattggctccagagttcttgttttcagccaccattttatgctgcctctccagtgattttttttcccattttcttcagtgtttctatagcagagatttgataataaaaagaaaatcctaaacaatgagaaataaagttacctggtttctctgtc

SEQ ID NO: 217728 - DNA, 2417 bp, Artificial Sequence
  derived and/or modified sequence
gtcgacgccggggaagcagccgccattgtccgcggctgaggttgggatttgctgtgttcctgggcaggtgcctggtcaatcagtcctcgggatggcagccatcaacccgtgggcctcctggggtgcccttacggaccaatcttgggggatgacagctgttgacccatgggcctcctggggaaccagtgaccttcaaggacgtggccgtggacttcacccaagaagagtgggggcagctggaccttgttcagaggaccctgtaccgtgatgtgatgctggagacctatggtcacctgctctctgtgggaaatcagattgccaagcctgaggtcatctccctgttggagcaaggagaagagccgtggtcagtggagcaggcatgtcctcaacgcacttgtccagaatgggtgagaaatcttgaaagcaaagcattgatcccagcacagagcatttttgaggaagaacaatcccatggcatgaagttggaaagatatatatgggatgatccttggttctccaggttagaagttttgggatgtaaagaccaattagaaatgtaccacatgaaccagagtacagctatgaggcagatggtcttcatgcaaaagcaagtactatcccagagaagctctgaattctgtggacttggggcagagtttagccagaacttaaactttgttccatctcagagagtttctcagatagaacatttctataagcctgatacacatgctcaaagttggagatgtgactcagccataatgtatgcagataaggttacctgtgaaaataatgattatgacaaaactgtttatcagtccattcaacctatttaccctgcaagaatacaaactggagataatcttttcaaatgtactgatgctgttaaatctttcaatcatataatacattttggtgatcataaaggaattcacacaggagaaaaactctatgaatataaggaatgccatcaaatctttaaccagagcccatcatttaatgaacacccaaggcttcatgttggagaaaaccagtataattacaaagaatatgagaatatcttttatttctcatcctttatggaacatcaaaaaattggtactgtagagaaagcgtataaatacaatgaatgggagaaagtctttgggtatgactctttccttactcaacatacaagcacttacactgcagagaaaccctatgactacaatgaatgtgggacgtctttcatctggagctcttaccttattcaacataagaaaactcatactggagaaaaaccctatgaatgtgataaatgtggaaaagtttttaggaatcgctcagcccttacgaaacatgaacggactcacactggaataaaaccctatgaatgtaataaatgtggaaaagccttcagctggaattctcatcttattgtacataagagaattcatacaggagaaaaaccttatgtttgtaatgagtgtgggaaatctttcaactggaactctcatcttattggacatcagaggactcatacaggagagaaaccttttgaatgtactgaatgtgggaaatcattcagctggagctcccatcttattgcccatatgagaatgcatactggagagaaaccctttaaatgtgatgaatgtgaaaaagcttttagggactactcagcccttagtaaacatgaaagaactcattctggagcaaaaccatataaatgtactgaatgtggaaaatccttcagctggagctcccatcttattgcccatcagagaactcacacgggagagaaaccatataactgtcaggaatgtggcaaagcattcagagaacgctcagccctcactaaacatgagataattcattctggaattaagccctatgaatgtaataaatgtggaaaatcctgtagccagatggctcaccttgttagacatcaaaggactcatactggagaaaaaccctatgaatgcaataaatgtggaaaatccttcagtcagagctgtcaccttgttgctcatcggagaattcacactggtgagaaaccctataaatgtaatcagtgtgaaagatcctttaactgtagttctcacctcattgcacaccggagaactcatactggagagaaaccatacaggtgtaatgaatgtgggaaagcatttaatgagagttcatcccttattgtacacctaagaaaccatactggagaaaagccctacaaatgtaatcattgtgaaaaagcattttgtaagaattcttcccttattattcatcagagaatgcatagtggagagaaacgctttatatgcagtgaatgtggaaaagcctttagtggtcactcagccctacttcaacaccagagaaatcacagtgaagagaaactgaattgaatttatgcgagtttttcgtttcttgtacatttgaca

SEQ ID NO: 217729 - DNA, 2009 bp, Artificial Sequence
  derived and/or modified sequence
gcgctccggtcgacgccggggaagcagccgccattgtccgcggctgaggtgaggcctttgctcaggctgtggggccgccgtagctgcggggcttggggggtcaggagagccggctgggagaggcggcgtcagggtgggtcctgcgcctgccctttccgcgccggctttgcgccgtcgttgccgtcggttctccagccagcagcctgcctccggcctcccgcctccgggcgttcttcgttttctggtcggacgggcctgggtgaactctgctgcacgtcggctccgcgggcctttgtccccgaggccgcgccgggagctcccaagcgcactcctgggccggacctcggcgcgggacaaaagccaaacgccccaggcgggcagaccccgatcctgctgcgccgccttcaagggggaccgccggccgcgagccaggttgggatttgctgtgttcctgggcaggtgcctggtcaatcagtcctcgggatggcagccatcaacccgtgggcctcctggggtgcccttacggaccaatcttgggggatgacagctgttgacccatgggcctcctgggctctgtgtcctcagtatcctgcctggcacgtggagggaagcctggaggaggggaggagggccactgggctcccagcagcccaggttcaggaaccagtgaccttcaaggacgtggccgtggacttcacccaagaagagtgggggcagctggaccttgttcagaggaccctgtaccgtgatgtgatgctggagacctatggtcacctgctctctgtgggaaatcagattgccaagcctgaggtcatctccctgttggagcaaggagaagagccgtggtcagtggagcaggcatgtcctcaacgcacttgtccagaatgggtgagaaatcttgaaagcaaagcattgatcccagcacagagcatttttgaggaagaacaatcccatggcatgaagttggaaagatatatatgggatgatccttggttctccaggttagaagttttgggatgtaaagaccaattagaaatgtaccacatgaaccagagtacagctatgaggcagatggtcttcatgcaaaagcaagtactatcccagagaagctctgaattctgtggacttggggcagagtttagccagaacttaaactttgttccatctcagagagtttctcagatagaacatttctataagcctgatacacatgctcaaagttggagatgtgactcagccataatgtatgcagataaggttacctgtgaaaataatgattatgacaaaactgtttatcagtccattcaacctatttaccctgcaagaatacaaactggagataatcttttcaaatgtactgatgctgttaaatctttcaatcatataatacattttggtgatcataaaggaattcacacaggagaaaaactctatgaatataaggaatgccatcaaatctttaaccagagcccatcatttaatgaacacccaaggcttcatgttggagaaaaccagtataattacaaagaatatgagaatatcttttatttctcatcctttatggaacatcaaaaaattggtactgtagagaaagcgtataaatacaatgaatgggagaaagtctttgggtatgactctttccttactcaacatacaagcacttacactgcagagaaaccctatgactacaatgaatgtgggacgtctttcatctggagctcttaccttattcaacataagaaaactcatactggagaaaaaccctatgaatgtgataaatgtggaaaagtttttaggaatcgctcagcccttacgaaacatgaacggactcacactggaataaaaccctatgaatgtaataaatgtggaaaagccttcagctggaattctcatcttattgtacataagagaattcatacaggagaaaaaccttatgtttgtaatgagtgtgggaaatctttcaactggaactctcatcttattggacatcagaggactcatacaggaga

SEQ ID NO: 217730 - protein, 122 aa, Artificial Sequence
  derived and/or modified sequence
MGFHFCIWIIFLLPPPCKKCLSPPTMNLRPPKSCGNVFYWVLVLNSGLLYKFCQTIKCRANWRPARAPRGWNEATERHQERRTQMETEMGGISTTYWHRLCTCTDRRAEKLVMDGNNCWFHK

SEQ ID NO: 217731 - DNA, 369 bp, Artificial Sequence
  derived and/or modified sequence
atgggattccacttctgcatctggattatctttctgcttccacccccatgtaaaaagtgtctgtccccccctactatgaaccttcgacctccaaaatcgtgtgggaacgtcttttactgggtcctggtcctgaattcgggcctgttgtataagttctgtcagacaattaagtgccgcgctaactggcgtccagccagggcccctagagggtggaatgaggctaccgagagacaccaggagcgccgaacccaaatggagaccgaaatgggtggtatatcaactacctactggcaccgactgtgcacttgcaccgaccggcgagccgagaagttggtaatggacggcaacaattgctggtttcataagtag

SEQ ID NO: 217732 - DNA, 369 bp, Artificial Sequence
  derived and/or modified sequence
atgggatttcacttttgtatctggattatttttctgcttcctccaccttgcaagaaatgcctcagtcccccaaccatgaatctccgccctccaaaatcttgcggaaatgtgttctattgggtgcttgtcttgaactcaggccttctgtacaaattctgtcaaaccataaaatgccgagcaaactggcgcccagcccgggccccacgaggttggaacgaggcaacagaacgccatcaggagcgtaggactcagatggagaccgaaatgggtggcatctcgaccacgtactggcataggctatgcacttgtacagatcgaagggccgaaaaactggtaatggacgggaataactgctggtttcacaaatag

SEQ ID NO: 217733 - DNA, 369 bp, Artificial Sequence
  derived and/or modified sequence
atgggctttcatttctgtatttggataatcttccttctgcccccaccttgtaagaaatgcctctcccctcctactatgaatcttcgaccccctaagagctgtggaaatgtgttttactgggtgctggtactaaatagtggtctcctgtataagttttgtcagacaattaagtgccgagctaattggcggccagctcgcgctccaagaggatggaatgaagctacagagcgacaccaggaacgacggacacagatggaaacagagatggggggcatcagcaccacatattggcaccggctatgcacttgtacagatcgaagggccgaaaaactggtaatggacgggaataactgctggtttcacaaatag

SEQ ID NO: 217734 - DNA, 647 bp, Artificial Sequence
  derived and/or modified sequence
attcttgtgatagtgaagaagtctcacaagatctgatcatttataatgggtttccacttttgcatctggatcatttttctcttgccaccaccatgtaagaagtgcctttcacctcccaccatgaacctgaggcctcccaagtcatgtggaaatgtcttttattgggtgctggttcttaactctggacttctctacaagttttgtcaaactatcaaatgcagagcaaattggaggcctgccagagcacccagagggtggaatgaagcaacagagaggcatcaggaaaggagaacacagatggagacagagatgggaggcataagcaccacctactggcacaggctgtgcacttgcacggataggagagctgaaaagttggtcatggatggaaataactgctggtttcacaaatgaggaggcagaaaattccacttaatttcactattacaatgctcagcagaaaaaaaaaaacaaaacaacttggattactgagctacagaacacccagactcatagcactgggacttccaggtcttaccttacgagtgggtcacaacactgacaaaggggacaatatccattagccattatcttgctgcgtatgaataaccctctctcacaaaaataaagataaatatgttctgaaa

SEQ ID NO: 217735 - DNA, 369 bp, Artificial Sequence
  derived and/or modified sequence
atgggcttccacttctgcatctggatcatcttcctgctgccccccccctgcaagaagtgcctgagcccccccaccatgaacctgagaccccccaagagctgcggcaacgtgttctactgggtgctggtgctgaacagcggcctgctgtacaagttctgccagaccatcaagtgcagagccaactggagacccgccagagcccccagaggctggaacgaggccaccgagagacaccaggagagaagaacccagatggagaccgagatgggcggcatcagcaccacctactggcacagactgtgcacctgcaccgacagaagagccgagaagctggtgatggacggcaacaactgctggttccacaagtag

SEQ ID NO: 217736 - DNA, 369 bp, Artificial Sequence
  derived and/or modified sequence
atgggatttcacttttgtatctggattatattcctgctcccacccccgtgcaagaaatgcctgtctcccccaactatgaatctcaggccacccaaatcttgcggaaacgtgttctattgggtgctcgtgctgaatagcggactgctgtacaagttctgccagacaatcaagtgcagggcaaattggaggccggctcgagcgccacgagggtggaacgaggcaacagagcgccaccaggagcgaagaacacagatggaaaccgaaatgggggggatttctaccacttactggcaccgcctgtgtacatgtactgatcgacgggcggaaaaattagtgatggatgggaacaactgttggtttcataaatag

SEQ ID NO: 217737 - DNA, 369 bp, Artificial Sequence
  derived and/or modified sequence
atgggcttccacttctgcatctggatcatcttcctgctgcccccaccctgcaagaagtgcctgagcccccccaccatgaacctgcggccccccaagagctgtggaaatgtgttctactgggtgctggtgctgaacagcggcctgctgtacaagttctgccagaccatcaagtgccgggccaactggaggcctgcccgggccccccggggctggaatgaggccacagagcggcaccaggagaggaggacccagatggagacagagatgggcggcatcagcaccacctactggcaccggctgtgcacctgcacagaccggcgggcagagaagctggtgatggatggcaacaactgctggttccacaagtag

SEQ ID NO: 217738 - DNA, 369 bp, Artificial Sequence
  derived and/or modified sequence
atgggcttccacttctgcatctggatcatcttcctgctgccccccccttgcaaaaagtgcctgtcaccccccactatgaatcttagaccccctaagagttgtgggaacgtgttttattgggtcctggtcctgaattcaggtctgctgtataagttttgccagaccatcaaatgtagggcgaattggcgcccagcccgagcgcccaggggctggaatgaggccaccgagagacatcaggagagacgcacacagatggagaccgagatgggcggcatcagtaccacctattggcacaggctttgcacctgcaccgaccggagagctgaaaagcttgttatggatggaaacaactgttggttccataagtag

SEQ ID NO: 217739 - RNA, 369 nt, Artificial Sequence
  derived and/or modified sequence
augggauuucacuuuuguaucuggauuauuuuucugcuuccuccaccuugcaagaaaugccucagucccccaaccaugaaucuccgcccuccaaaaucuugcggaaauguguucuauugggugcuugucuugaacucaggccuucuguacaaauucugucaaaccauaaaaugccgagcaaacuggcgcccagcccgggccccacgagguuggaacgaggcaacagaacgccaucaggagcguaggacucagauggagaccgaaauggguggcaucucgaccacguacuggcauaggcuaugcacuuguacagaucgaagggccgaaaaacugguaauggacgggaauaacugcugguuucacaaauag

SEQ ID NO: 217740 - RNA, 369 nt, Artificial Sequence
  derived and/or modified sequence
augggcuuucauuucuguauuuggauaaucuuccuucugcccccaccuuguaagaaaugccucuccccuccuacuaugaaucuucgacccccuaagagcuguggaaauguguuuuacugggugcugguacuaaauaguggucuccuguauaaguuuugucagacaauuaagugccgagcuaauuggcggccagcucgcgcuccaagaggauggaaugaagcuacagagcgacaccaggaacgacggacacagauggaaacagagauggggggcaucagcaccacauauuggcaccggcuaugcacuuguacagaucgaagggccgaaaaacugguaauggacgggaauaacugcugguuucacaaauag

SEQ ID NO: 217741 - protein, 192 aa, Artificial Sequence
  derived and/or modified sequence
MGSLGSKNPQTKQAQVLLLGLDSAGKSTLLYKLKLAKDITTIPTIGFNVEMIELERNLSLTVWDVGGQEKMRTVWGCYCENTDGLVYVVDSTDKQRLEESQRQFEHILKNEHIKNVPVVLLANKQDMPGALTAEDITRMFKVKKLCSDRNWYVQPCCALTGEGLAQGFRKLTGFVKSHMKSRGDTLAFFKQN

SEQ ID NO: 217742 - DNA, 579 bp, Artificial Sequence
  derived and/or modified sequence
atgggcagcctgggttccaagaacccacagacaaagcaagcccaggtcctgctgctgggactggacagcgccggcaaaagcacgctgctgtataagttaaaactggcaaaagacatcacaaccattccaacaataggttttaacgtggagatgatagaattggaacgaaatctctcactgactgtttgggatgtcggcggtcaggagaagatgaggactgtgtggggatgctactgtgaaaatactgacgggctggtgtatgtggttgattccaccgataaacagaggctggaagaatcccagaggcaatttgaacatattcttaaaaatgagcatattaaaaatgtgccagtggtgctactcgccaataagcaggatatgccgggcgccctgacggcagaagacatcaccaggatgttcaaggtcaagaagttatgcagcgataggaactggtacgttcagccatgttgcgcccttaccggtgaaggactcgcacaaggatttcggaaactaaccggtttcgtcaagagccatatgaagagtaggggtgatactctcgccttctttaagcagaactag

SEQ ID NO: 217743 - DNA, 1286 bp, Artificial Sequence
  derived and/or modified sequence
gataagctacaacataaacacatctaggttcttgttcttagaatacagcatgaagaatttgctttcttctttcttcctaacattttcatgtgagatccagaaaggacacattgtctctggccattcgaagaaagaaagaaagaaaaaaaaaaaaggtatttagagacagagagagaaaaaggctgaaatgggttcgctgggttctaaaaatccgcaaaccaaacaagcccaagttcttcttttgggacttgactcagctgggaagtctactctcctttataaattaaagcttgctaaggatattaccaccatccctacaataggtttcaatgtggaaatgatcgagttggaaaggaatctttcactcacagtctgggatgttggaggacaggaaaaaatgagaactgtttggggctgttactgtgagaacaccgatgggctggtgtatgttgtggacagtacagacaaacagcgactggaagagtctcagagacagtttgagcacattttgaagaatgaacacattaaaaatgtgcctgttgttctattagccaacaaacaagacatgcctggagctctgactgctgaggacatcaccagaatgttcaaagtgaagaagctttgcagtgaccggaactggtatgtgcaaccctgctgtgccctcacaggggaggggctggcccaggggttcaggaaattaactggatttgtgaagagccacatgaaatcaagaggagacactttggcgttcttcaagcagaactgaggctgcgaaaaatccaagtctctacagagacactgatgaagttgaaagggtaattgtttttccatgccaaatgaggaaatcaaattaatgagttgacaaacttttcctgagatgttatttcatctacatttagttaaacaacttagaatgatatctagaaaatatttattttcagccaggaactttagcaaactgtggcaatgatcactgggaatgaaaacgtataatgttctacaatttttgttatcacattggatgactttgaatatagtagtgacacttgggaccaaataaattattttatatgactactagaacaaagttttagtaagctgtctgctaatagagtcagaattcttccagattgtttccagctgtaacaggtattgaatttccaccgtgctcctatgtaacagctgggtggtgtaaaaaatgaacttcaaattatggagtggaaaaagcgtaatgttaatatcttgtaaattcgtattccctattaaataaagctttcttattccct

SEQ ID NO: 217744 - DNA, 579 bp, Artificial Sequence
  derived and/or modified sequence
atgggcagcctgggcagcaagaacccccagaccaagcaggcccaggtgctgctgctgggcctggacagcgctgggaagagcaccctgctgtacaagctgaagctggccaaggacatcaccaccatccccaccatcggcttcaacgtggagatgattgagctggagaggaacctgagcctgactgtgtgggatgtgggcggccaggagaagatgaggacagtgtggggctgctactgtgagaacacagatggcctggtgtatgtggtggacagcacagacaagcagaggctggaggagagccagaggcagtttgagcacatcctgaagaatgagcacatcaagaatgtgcctgtggtgctgctggccaacaagcaggacatgcctggggccctgacagctgaggacatcaccaggatgttcaaggtgaagaagctgtgcagcgacaggaactggtacgtgcagccctgctgtgccctgaccggggagggcctggcccagggcttcaggaagctgaccggctttgtgaagagccacatgaagagcagaggagacaccctggccttcttcaagcagaactag

SEQ ID NO: 217745 - DNA, 579 bp, Artificial Sequence
  derived and/or modified sequence
atgggcagcctgggcagcaagaacccccagaccaagcaggcccaggtcttgttgcttggcctcgactccgctggaaagtctacactgctgtataagctcaaactggcaaaagatatcactaccatccctacaatcgggttcaacgtagagatgatagagctggaaaggaatctgagtctaaccgtgtgggatgtgggaggacaggagaaaatgaggaccgtgtggggatgctactgcgagaacaccgacggtctggtgtacgttgtcgatagcaccgataagcagaggctggaagaatcgcagcgccagtttgaacatatactaaaaaacgaacacatcaaaaacgtaccagtagtcctcttagcgaacaaacaggacatgcccggggccctgacagcagaagatatcactcgtatgttcaaggttaagaaattatgctccgacagaaactggtacgtccagccatgctgcgccctgacaggcgaaggtctggcacaggggttccgcaagctgactggatttgtgaagtcacacatgaaatctagaggagacactttagctttttttaagcaaaattag

SEQ ID NO: 217746 - DNA, 579 bp, Artificial Sequence
  derived and/or modified sequence
atgggctctttaggctccaaaaatccgcaaactaagcaagctcaggtcctgctgctgggcctggactccgccggtaaaagcaccctcttgtacaagctgaaactggctaaggatatcaccactattcccaccatcgggttcaatgtggagatgattgaattagaaaggaacctgagtcttactgtgtgggatgtgggtggccaggagaagatgcgcaccgtatgggggtgttattgtgaaaacaccgatggcctggtttatgtggttgacagtactgacaagcagaggctggaggagtctcagcgccagtttgagcatattcttaagaacgagcacataaagaacgtgccagtggtgctgttggccaacaaacaggatatgcccggtgctctcaccgctgaggacatcacccgaatgtttaaagtgaagaaattatgcagcgacagaaattggtacgtgcaaccttgctgcgctcttactggagagggacttgcccagggctttcggaaactgacaggctttgtcaaaagccacatgaagagcagaggggatacactggcattttttaagcagaattag

SEQ ID NO: 217747 - DNA, 579 bp, Artificial Sequence
  derived and/or modified sequence
atgggcagcctgggcagcaagaacccccagaccaagcaggcccaggtgctgctgctgggcctggacagcgccggcaagagcaccctgctgtacaagctgaagctggccaaggacatcaccaccatccccaccatcggcttcaacgtggagatgatcgagctggagagaaacctgagcctgaccgtgtgggacgtgggcggccaggagaagatgagaaccgtgtggggctgctactgcgagaacaccgacggcctggtgtacgtggtggacagcaccgacaagcagagactggaggagagccagagacagttcgagcacatcctgaagaacgagcacatcaagaacgtgcccgtggtgctgctggccaacaagcaggacatgcccggcgccctgaccgccgaggacatcaccagaatgttcaaggtgaagaagctgtgcagcgacagaaactggtacgtgcagccctgctgcgccctgaccggcgagggcctggcccagggcttcagaaagctgaccggcttcgtgaagagccacatgaagagcagaggcgacaccctggccttcttcaagcagaactag

SEQ ID NO: 217748 - protein, 529 aa, Artificial Sequence
  derived and/or modified sequence
MPSKGKDKKKGKSKGKDTKKLIKTDESVVDRAKANASLWEARLEVTELSRIKYRDTSRILAKSNEDLKKKQCKMEKDIMSVLSYLKKQDQEKDNMIEKLKQQLNETKEKAQEEKDKLEQKYTRQINELEGQFHQKAKEIGMIHTELKAVRQFQKRKIQVERELDDLKENLRNTERIHQETLRRLESRFFEEKHRLEQEAEKKIIMLAERAHHEAIVQLNDAGRNVFKENDYLQKALAYHLKETDALQKNSQKLQESHTLLLHQKEINDLLVKEKIMQLVQQRSQIQTLQKKVVNLETALSYMTKEFESEVLKLQQHAMIENQAGQVEIDKLQHLLQMKDREMNRVKKLAKNILDERTEVERFFLDALHQVKQQILISRKHYKQIAQAAFNLKMRAACTGRTEYPKIRTFDGREHSTNSVNQDLLEAEKWTHIEGNVDIGDLTWEQKEKVLRLLFAKMNGCPSRKYNQSSRPPVPDYVVSDSGETKEFGDESKLQDKIFITQQIAISDSSGEVVLPTIPKEPQESDTGTF

SEQ ID NO: 217749 - DNA, 3106 bp, Artificial Sequence
  derived and/or modified sequence
gcgcgccgtcagcggcgcgggtggggcattgccagctcggcgtcccggttcccttggagacagagctggccagggcggccgcggctgggcaactacgacagcggagcccctggggaagccaagatgccgtcgaagggaaaggacaaaaagaaaggcaagagcaaaggcaaagacacgaagaagttaataaaaacagatgaatctgtggtggacagagccaaggccaatgcctccctttgggaggccaggttggaagtcacagaactctctaggattaagtatcgtgatacttcacggatactggcaaaaagtaatgaggacttaaagaaaaagcaatgtaaaatggagaaagacataatgtcagtattaagttacctgaagaagcaggatcaggagaaagataatatgattgaaaaactgaaacagcaattaaatgaaacaaaggaaaaagcccaagaggagaaggataaattggaacaaaagtataccaggcaaattaatgaactagagggacagttccatcaaaaagccaaagaaattggcatgattcacacagagctgaaagcagtaagacaattccagaagagaaaaatccaagtggagagagagttagatgatctgaaagagaatttaagaaacacagagcggatacatcaggagactcttagaagactggaaagcagattttttgaagaaaagcaccgactagaacaagaggctgaaaagaagataataatgctagcagagagagcccaccatgaggctattgtgcaattgaacgatgctggaagaaatgtttttaaagagaatgattatcttcagaaagctctggcatatcacctgaaggaaactgacgctctacaaaaaaactcccagaagttgcaagagagtcatactttacttttacatcaaaaggagatcaatgatctgttggttaaggaaaagattatgcaacttgtccagcagagatcacaaatccaaacccttcagaagaaggtagtaaacttggagactgctctgagttacatgaccaaagagtttgagagtgaagttttaaaactgcagcaacacgcaatgatagagaaccaagcaggtcaggtagaaattgacaagctgcagcaccttcttcagatgaaggacagggaaatgaatcgtgtgaagaagctggccaagaacatactggatgagagaacagaagtggaaagattctttttagatgctctgcaccaagtgaagcaacagatcctaattagcaggaagcattataagcagatagcacaagctgctttcaatttaaaaatgagagcagcatgtacaggaagaacagaatatcccaaaatcagaacatttgatggcagagagcacagcaccaatagtgtgaatcaggatcttctggaggccgaaaaatggacacatattgaaggaaatgtggatattggagatttgacctgggagcagaaggaaaaagtattgcgattgctctttgcaaaaatgaatggctgtccttctaggaaatacaaccagagttctaggcctccagttccagactatgttgtttctgacagtggggaaacaaaggaatttggggatgaaagtaagcttcaagataaaatcttcatcacccagcaaattgcaatatcagactcttctggtgaagtggtgctacccactattccaaaagaacctcaggagtctgacacaggaaccttctgagaagcactgattatgacctcacagatgctgctggcagtcccttccttgcagaatccttgctcctgaatatctttaagaaaatttcttaaaggaaaagacaaaaaatttaactcaaaagttacctgtttgccatagaaattggtgtctcccctgaaggaggatcgagagccggtgaatgagaacattggcaaaggcactggaatggggacattcactcccacctaaaacagaacaaatccgtgtcatatcctaaggacaaaggaactctccatttagaaacacaaaggcatcagagaccagttttaaatacccaccttctaccctatcctctaccccatgaactttcattcctgaggaagaaatggggcaatgtgggaggtcatgggggcaatcttaaaccaatgactcaccattatttactgtttcctcttaggaaatagtaaatggatataagaatctcttaaaaattctgttcacgaacctgtccaacatccaccaagtgggcatatttccgagcagtggctccattggtggtgaagatggcagttccatttccatatgggttgttatttacaatctggatggcttcatccaatgtttctgtctccagaaccacaagaactggaccaaaaatctcctctttgtaacaggtcatatttggctgccaggagtgatgcatccagaaaagaagtcagctttttggattctgagtattttatgcttatttggtactttcacttactacacatcatttacgtggacaactttcatattactaatctcttttcatttcaaatcacctatttaaaaaaaaagtcctctctcaagtgtattccgtcttccaagttaccaatcatataaacaacttggaattcctatcaacaataaccacacttcctttaagggactgtatctttagttcatgacccatcatcagctgcctttttaatacctgaacgactagtttcatccaattgttatcaaaaagttacatgaaaatttattttttataaatccaatctatagtaaatataccaggataatttttctctttacagaaaccccatgctgttttctgtaacataaataatccattcttattcactcctttgcctcccaaatatgtctgtatgtttatattttgatatcaggtcgcagacactcaaaacatccttcaccatgcaattaatgtttgttgctgataaacggatttttctgtatggttctgtggcaagagatttcataatttctactgcacttacattcaacacttgatgattcactattatagtaaggatatatgaatttcaaaaaatgcctcataacctcaatttttaagtcatgttagctgagagactttcaaagttttgataaataaaaattgacaagtcaa

SEQ ID NO: 217750 - DNA, 1590 bp, Artificial Sequence
  derived and/or modified sequence
atgcccagcaagggcaaggacaagaagaagggcaagagcaagggcaaggacaccaagaagctgatcaagaccgacgagagcgtggtggacagagccaaggccaacgccagcctgtgggaggccagactggaggtgaccgagctgagcagaatcaagtacagagacaccagcagaatcctggccaagagcaacgaggacctgaagaagaagcagtgcaagatggagaaggacatcatgagcgtgctgagctacctgaagaagcaggaccaggagaaggacaacatgatcgagaagctgaagcagcagctgaacgagaccaaggagaaggcccaggaggagaaggacaagctggagcagaagtacaccagacagatcaacgagctggagggccagttccaccagaaggccaaggagatcggcatgatccacaccgagctgaaggccgtgagacagttccagaagagaaagatccaggtggagagagagctggacgacctgaaggagaacctgagaaacaccgagagaatccaccaggagaccctgagaagactggagagcagattcttcgaggagaagcacagactggagcaggaggccgagaagaagatcatcatgctggccgagagagcccaccacgaggccatcgtgcagctgaacgacgccggcagaaacgtgttcaaggagaacgactacctgcagaaggccctggcctaccacctgaaggagaccgacgccctgcagaagaacagccagaagctgcaggagagccacaccctgctgctgcaccagaaggagatcaacgacctgctggtgaaggagaagatcatgcagctggtgcagcagagaagccagatccagaccctgcagaagaaggtggtgaacctggagaccgccctgagctacatgaccaaggagttcgagagcgaggtgctgaagctgcagcagcacgccatgatcgagaaccaggccggccaggtggagatcgacaagctgcagcacctgctgcagatgaaggacagagagatgaacagagtgaagaagctggccaagaacatcctggacgagagaaccgaggtggagagattcttcctggacgccctgcaccaggtgaagcagcagatcctgatcagcagaaagcactacaagcagatcgcccaggccgccttcaacctgaagatgagagccgcctgcaccggcagaaccgagtaccccaagatcagaaccttcgacggcagagagcacagcaccaacagcgtgaaccaggacctgctggaggccgagaagtggacccacatcgagggcaacgtggacatcggcgacctgacctgggagcagaaggagaaggtgctgagactgctgttcgccaagatgaacggctgccccagcagaaagtacaaccagagcagcagaccccccgtgcccgactacgtggtgagcgacagcggcgagaccaaggagttcggcgacgagagcaagctgcaggacaagatcttcatcacccagcagatcgccatcagcgacagcagcggcgaggtggtgctgcccaccatccccaaggagccccaggagagcgacaccggcaccttctag

SEQ ID NO: 217751 - DNA, 1590 bp, Artificial Sequence
  derived and/or modified sequence
atgccatctaaaggtaaggataagaaaaaaggaaaatctaagggtaaggataccaagaagttaatcaagaccgatgagagcgtggtggatagggccaaggctaatgcgtcactgtgggaagctcggttggaggtgactgagctgagtaggattaaatatcgggatacctcacgcatcctcgccaaatcaaatgaggacctgaagaagaaacagtgcaaaatggaaaaagatatcatgtctgttttgtcctacctgaagaagcaggaccaagagaaggacaatatgatcgaaaagttgaaacagcaactcaacgagactaaggaaaaagctcaggaagagaaggacaagcttgaacagaagtatacaaggcagatcaacgagttggaaggacagttccaccaaaaggccaaggagattggaatgatccacaccgaactgaaggccgtgcgacagtttcagaagagaaagatacaagttgaacgggagctggacgacctgaaggaaaacctgagaaatacagagcggatccaccaagaaaccttgaggagactagagagtagatttttcgaagagaaacacagattggaacaagaggctgaaaagaagattattatgctagcagagagggctcaccacgaggccatagtccaactgaatgacgcagggagaaatgtcttcaaagaaaacgactacctgcagaaagccctggcctaccatcttaaagagaccgacgcactgcagaagaactcccagaaactgcaggaatcacacacccttctgcttcatcagaaggaaattaatgaccttctggttaaggaaaagatcatgcagctcgtgcaacaacgatcccagatccagaccctccagaaaaaggtggtcaatttagaaactgcactgagctatatgacaaaggaattcgagagcgaggtactgaagctacagcagcacgccatgatcgaaaaccaggccggacaggtcgagattgacaagctccagcatctgctgcagatgaaagaccgagagatgaacagggtcaaaaagctcgccaaaaatatcctggacgaaagaaccgaggtagagcggttcttcttggacgccttgcatcaggtgaagcaacaaatcctcatatcccggaagcattataaacagattgcgcaggcggcctttaacctgaagatgcgtgcggcttgtaccggaaggaccgagtaccccaaaatacgcacctttgatggaagagaacactccaccaacagcgtgaaccaggacctcttagaggcagagaaatggacgcatatcgaaggcaacgtcgatatcggcgatctaacatgggagcagaaagaaaaagtgctgagacttcttttcgctaagatgaacggctgtccttcaagaaagtataaccagagcagccgaccaccagtaccagattatgtggtcagcgattcaggagaaactaaggagttcggggatgaatccaagctgcaagataaaatattcatcactcagcagatcgcaattagcgactcaagcggagaggtggtgctccccacaatacccaaggagcctcaggagtcagacacaggaacattttag

SEQ ID NO: 217752 - DNA, 1590 bp, Artificial Sequence
  derived and/or modified sequence
atgcccagcaagggcaaggacaagaagaagggcaagagcaagggcaaggacaccaagaagctgatcaagacagatgaatctgtggtggaccgggccaaggccaatgccagcctgtgggaggcccggctggaggtgacagagctgagccgcatcaagtacagagacaccagccgcatcctggccaagagcaatgaagacctgaagaagaagcagtgcaagatggagaaggacatcatgtctgtgctgagctacctgaagaagcaggaccaggagaaggacaacatgattgagaagctgaagcagcagctgaatgagaccaaggagaaggcccaggaggagaaggacaagctggagcagaagtacacccggcagatcaatgagctggagggccagttccaccagaaggccaaggagatcggcatgatccacacagagctgaaggctgtgcggcagttccagaagaggaagatccaggtggagcgggagctggatgacctgaaggagaacctgaggaacacagagcgcatccaccaggagaccctgcggcggctggagagccgcttctttgaggagaagcaccggctggagcaggaggccgagaagaagatcatcatgctggccgagcgggcccaccacgaggccatcgtgcagctgaatgatgctggaagaaatgtgttcaaggaaaatgactacctgcagaaggccctggcctaccacctgaaggagacagatgccctgcagaagaacagccagaagctgcaggagagccacaccctgctgctgcaccagaaggagatcaatgacctgctggtgaaggagaagatcatgcagctggtgcagcagaggagccagatccagaccctgcagaagaaggtggtgaacctggagacagccctgagctacatgaccaaggagtttgagagcgaggtgctgaagctgcagcagcacgccatgattgagaaccaggccggccaggtggagattgacaagctgcagcacctgctgcagatgaaggaccgggagatgaacagagtgaagaagctggccaagaacatcctggatgagaggacagaggtggagcgcttcttcctggatgccctgcaccaggtgaagcagcagatcctgatcagcaggaagcactacaagcagatcgcccaggccgccttcaacctgaagatgagagctgcctgcaccggccgcacagagtaccccaagatccgcacctttgatggccgggagcacagcaccaacagcgtgaaccaggacctgctggaggccgagaagtggacccacatcgagggcaatgtggacatcggggacctgacctgggagcagaaggagaaggtgctgcggctgctgtttgccaagatgaatggctgccccagcaggaagtacaaccagagcagcaggcctcctgtgcctgactatgtggtgtctgattctggagagaccaaggagtttggagatgagagcaagctgcaggacaagatcttcatcacccagcagatcgccatcagtgacagcagtggagaggtggtgctgcccaccatccccaaggagccccaggagagtgacaccggcaccttctag

SEQ ID NO: 217753 - DNA, 1590 bp, Artificial Sequence
  derived and/or modified sequence
atgcccagcaagggcaaggacaagaagaagggcaagagcaagggcaaggataccaaaaagctgataaagacggatgagagtgtggtagacagagccaaggccaatgcctctttgtgggaggcaaggctggaggtgaccgaattgtctaggatcaagtatcgcgacaccagccggatactcgcaaaaagcaatgaggatctgaagaaaaaacagtgtaaaatggagaaggatattatgtccgtgctgtcctatctgaaaaagcaagaccaggaaaaggacaacatgattgagaagctgaaacagcagctgaatgaaaccaaagagaaggcacaggaagagaaggataagctggaacagaagtatacccgccagattaatgagctggagggccagttccatcagaaggcgaaggaaatcggtatgatccacaccgaactgaaagcagtaaggcagttccagaaacggaaaattcaagtggagagggagctagatgacttgaaggaaaatttgcggaacactgagagaatccatcaggagaccctgcggaggctggagtccaggttcttcgaggaaaagcataggctcgagcaggaggccgagaaaaagatcatcatgttggccgagcgcgcccatcatgaggcaatcgtgcagctaaacgacgcaggacgcaacgtttttaaggaaaatgactatctccaaaaagccttagcctatcacttaaaagagaccgatgctctccaaaagaacagccagaaactccaggagtcacacactctgctgctgcatcagaaggagatcaatgatctgctcgtgaaggaaaagataatgcagctcgtccaacagagatctcagattcaaaccctccagaagaaagtggttaatctggagactgccttgtcctacatgacaaaggaattcgagtctgaagtccttaagctgcagcagcacgcgatgattgaaaaccaggcgggtcaggtggaaatcgacaaactccagcacttactccaaatgaaggatcgagagatgaacagagtcaaaaaactggccaaaaacatcctggacgagaggactgaagtggagcggttcttcctggatgcattacatcaggtgaaacaacagattctcatttctagaaagcattataaacagattgctcaggcagcctttaatctcaaaatgcgggcagcctgcactggccgtaccgaataccctaagattcgaacctttgatggccgcgagcactccactaactcagtgaatcaagaccttttggaggcagaaaaatggacccatatcgaggggaatgtggatatcggggatctgacttgggaacagaaggagaaggttctacgactgctgttcgcaaagatgaatggatgtcccagtagaaaatataatcagagctctcggccacccgtgccggattatgtagtgtcagatagtggagagactaaggagtttggcgacgaaagtaaactccaagataagatatttattacacagcagatcgctatctctgattcctccggagaagtagtcctcccaacaatcccaaaagagccccaggaaagcgatactggtaccttttag

SEQ ID NO: 217754 - DNA, 1590 bp, Artificial Sequence
  derived and/or modified sequence
atgccctcgaagggaaaagataaaaaaaaaggcaaaagcaaggggaaagacaccaaaaaactgataaaaactgacgagagcgtggtcgatagagctaaagctaatgcctccctgtgggaggccagactggaagtcactgaactgtctcgaataaagtaccgggatacctcaagaatccttgccaaatcaaacgaggaccttaagaaaaagcagtgcaaaatggagaaggatatcatgtcagtcctgtcttatctcaaaaaacaggaccaagagaaggataacatgatcgaaaaactgaaacagcaacttaatgagacaaaagaaaaggcccaggaggaaaaggataaactggaacagaaatatacacggcaaatcaacgagctcgagggacagttccaccagaaagccaaggaaattggcatgatccatactgaactcaaggccgtccgacaatttcagaagcgcaagattcaagtggaaagagaattggacgatttaaaggaaaatttacggaacacagagcgcatacaccaagaaaccctgaggcgactggaatcacgtttttttgaggagaagcacaggctggagcaggaagcagaaaaaaaaattattatgctcgctgagagagctcaccacgaagccatcgttcagctgaacgatgcagggcgtaacgttttcaaggaaaatgactacctacaaaaagccttggcttatcacctaaaggaaaccgacgctctccaaaaaaactctcagaagctgcaggagagtcatacgttacttctacatcagaaagaaatcaacgacctgttggtgaaggaaaaaattatgcagttggtgcaacaaaggtcccaaatacagactctccagaagaaagtggtgaacctggagacggccctgtcatacatgactaaagagtttgaatccgaggtattgaaactccaacagcacgctatgatcgagaaccaagccggtcaggtcgagatcgacaaacttcagcacctgctgcagatgaaagacagggagatgaaccgggtgaaaaaactggcgaaaaacatccttgacgagagaaccgaagtggaacggttcttcctcgacgctctccaccaggtgaagcagcagatacttatttccagaaagcattacaaacagattgctcaggcagcctttaaccttaagatgcgggctgcatgtacggggcgaaccgagtatccaaagattcggacattcgacggcagagagcacagcaccaattcagtaaaccaggacctcctggaagcggagaagtggacccatattgagggaaacgtcgatatcggtgatctgacttgggagcagaaagagaaggtgctgagacttctctttgctaaaatgaatggctgcccaagtagaaagtacaatcagtcttccagaccaccggttccagactacgtcgtttcggactctggggaaaccaaggagttcggagacgagagtaagttgcaggataaaatctttatcactcagcagatcgcgatttcagacagctccggcgaggtcgtgctgccgactatcccaaaggaaccacaggaatctgatacgggaaccttctag

SEQ ID NO: 217755 - protein, 715 aa, Artificial Sequence
  derived and/or modified sequence
MSLDCTSHIALGAASPAPEETYDHLSEVPVTREQLNHYRNVAQNARSELAATLVKFECAQSELQDLRSKMLSKEVSCQELKAEMESYKENNARKSSLLTSLRDRVQELEEESAALSTSKIRTEITAHAAIKENQELKKKVVELNEKLQKCSKENEENKKQVSKNCRKHEEFLTQLRDCLDPDERNDKASDEDLILKLRDLRKENEFVKGQIVILEETINVHEMEAKASRETIMRLASEVNREQKKAASCTEEKEKLNQDLLSAVEAKEALEREVKIFQERLLAGQQVWDASKQEVSLLKKSSSELEKSLKASQDAVTTSQSQYFSFREKIAALLRGRLSMTGSTEDTILEKIREMDSREESRDRMVSQLEAQISELVEQLGKESGFHQKALQRAQKAENMLETLQGQLTHLEAELVSGGVLRDNLNFEKQKYLKFLDQLSQKMKLDQMAAELGFDMRLDVVLARTEQLVRLESNAVIENKTIAHNLQRKLKTQKERLESKELHMSLLRQKIAQLEEEKQARTALVVERDNAHLTIRNLQKKVERLQKELNTCRDLHTELKAKLADTNELKIKTLEQTKAIEDLNKSRDQLEKMKEKAEKKLMSVKSELDTTEHEAKENKERARNMIEVVTSEMKTLKKSLEEAEKREKQLADFREVVSQMLGLNVTSLALPDYEIIKCLERLVHSHQHHFVTCACLKDVTTGQERHPQGHLQLLH

SEQ ID NO: 217756 - protein, 722 aa, Artificial Sequence
  derived and/or modified sequence
MSLDCTSHIALGAASPAPEETYDHLSEVPVTREQLNHYRNVAQNARSELAATLVKFECAQSELQDLRSKMLSKEVSCQELKAEMESYKENNARKSSLLTSLRDRVQELEEESAALSTSKIRTEITAHAAIKENQELKKKVVELNEKLQKCSKENEENKKQVSKNCRKHEEFLTQLRDCLDPDERNDKASDEDLILKLRDLRKENEFVKGQIVILEETINVHEMEAKASRETIMRLASEVNREQKKAASCTEEKEKLNQDLLSAVEAKEALEREVKIFQERLLAGQQVWDASKQEVSLLKKSSSELEKSLKASQDAVTTSQSQYFSFREKIAALLRGRLSMTGSTEDTILEKIREMDSREESRDRMVSQLEAQISELVEQLGKESGFHQKALQRAQKAENMLETLQGQLTHLEAELVSGGVLRDNLNFEKQKYLKFLDQLSQKMKLDQMAAELGFDMRLDVVLARTEQLVRLESNAVIENKTIAHNLQRKLKTQKERLESKELHMSLLRQKIAQLEEEKQARTALVVERDNAHLTIRNLQKKVERLQKELNTCRDLHTELKAKLADTNELKASAWLHFIKTLEQTKAIEDLNKSRDQLEKMKEKAEKKLMSVKSELDTTEHEAKENKERARNMIEVVTSEMKTLKKSLEEAEKREKQLADFREVVSQMLGLNVTSLALPDYEIIKCLERLVHSHQHHFVTCACLKDVTTGQERHPQGHLQLLH

SEQ ID NO: 217757 - DNA, 2148 bp, Artificial Sequence
  derived and/or modified sequence
atgagcctggactgcaccagccacatcgccctgggcgccgccagccccgcccccgaggagacctacgaccacctgagcgaggtgcccgtgaccagagagcagctgaaccactacagaaacgtggcccagaacgccagaagcgagctggccgccaccctggtgaagttcgagtgcgcccagagcgagctgcaggacctgagaagcaagatgctgagcaaggaggtgagctgccaggagctgaaggccgagatggagagctacaaggagaacaacgccagaaagagcagcctgctgaccagcctgagagacagagtgcaggagctggaggaggagagcgccgccctgagcaccagcaagatcagaaccgagatcaccgcccacgccgccatcaaggagaaccaggagctgaagaagaaggtggtggagctgaacgagaagctgcagaagtgcagcaaggagaacgaggagaacaagaagcaggtgagcaagaactgcagaaagcacgaggagttcctgacccagctgagagactgcctggaccccgacgagagaaacgacaaggccagcgacgaggacctgatcctgaagctgagagacctgagaaaggagaacgagttcgtgaagggccagatcgtgatcctggaggagaccatcaacgtgcacgagatggaggccaaggccagcagagagaccatcatgagactggccagcgaggtgaacagagagcagaagaaggccgccagctgcaccgaggagaaggagaagctgaaccaggacctgctgagcgccgtggaggccaaggaggccctggagagagaggtgaagatcttccaggagagactgctggccggccagcaggtgtgggacgccagcaagcaggaggtgagcctgctgaagaagagcagcagcgagctggagaagagcctgaaggccagccaggacgccgtgaccaccagccagagccagtacttcagcttcagagagaagatcgccgccctgctgagaggcagactgagcatgaccggcagcaccgaggacaccatcctggagaagatcagagagatggacagcagagaggagagcagagacagaatggtgagccagctggaggcccagatcagcgagctggtggagcagctgggcaaggagagcggcttccaccagaaggccctgcagagagcccagaaggccgagaacatgctggagaccctgcagggccagctgacccacctggaggccgagctggtgagcggcggcgtgctgagagacaacctgaacttcgagaagcagaagtacctgaagttcctggaccagctgagccagaagatgaagctggaccagatggccgccgagctgggcttcgacatgagactggacgtggtgctggccagaaccgagcagctggtgagactggagagcaacgccgtgatcgagaacaagaccatcgcccacaacctgcagagaaagctgaagacccagaaggagagactggagagcaaggagctgcacatgagcctgctgagacagaagatcgcccagctggaggaggagaagcaggccagaaccgccctggtggtggagagagacaacgcccacctgaccatcagaaacctgcagaagaaggtggagagactgcagaaggagctgaacacctgcagagacctgcacaccgagctgaaggccaagctggccgacaccaacgagctgaagatcaagaccctggagcagaccaaggccatcgaggacctgaacaagagcagagaccagctggagaagatgaaggagaaggccgagaagaagctgatgagcgtgaagagcgagctggacaccaccgagcacgaggccaaggagaacaaggagagagccagaaacatgatcgaggtggtgaccagcgagatgaagaccctgaagaagagcctggaggaggccgagaagagagagaagcagctggccgacttcagagaggtggtgagccagatgctgggcctgaacgtgaccagcctggccctgcccgactacgagatcatcaagtgcctggagagactggtgcacagccaccagcaccacttcgtgacctgcgcctgcctgaaggacgtgaccaccggccaggagagacacccccagggccacctgcagctgctgcactag

SEQ ID NO: 217758 - DNA, 2169 bp, Artificial Sequence
  derived and/or modified sequence
atgagcctggactgcaccagccacatcgccctgggcgccgccagccccgcccccgaggagacctacgaccacctgagcgaggtgcccgtgaccagagagcagctgaaccactacagaaacgtggcccagaacgccagaagcgagctggccgccaccctggtgaagttcgagtgcgcccagagcgagctgcaggacctgagaagcaagatgctgagcaaggaggtgagctgccaggagctgaaggccgagatggagagctacaaggagaacaacgccagaaagagcagcctgctgaccagcctgagagacagagtgcaggagctggaggaggagagcgccgccctgagcaccagcaagatcagaaccgagatcaccgcccacgccgccatcaaggagaaccaggagctgaagaagaaggtggtggagctgaacgagaagctgcagaagtgcagcaaggagaacgaggagaacaagaagcaggtgagcaagaactgcagaaagcacgaggagttcctgacccagctgagagactgcctggaccccgacgagagaaacgacaaggccagcgacgaggacctgatcctgaagctgagagacctgagaaaggagaacgagttcgtgaagggccagatcgtgatcctggaggagaccatcaacgtgcacgagatggaggccaaggccagcagagagaccatcatgagactggccagcgaggtgaacagagagcagaagaaggccgccagctgcaccgaggagaaggagaagctgaaccaggacctgctgagcgccgtggaggccaaggaggccctggagagagaggtgaagatcttccaggagagactgctggccggccagcaggtgtgggacgccagcaagcaggaggtgagcctgctgaagaagagcagcagcgagctggagaagagcctgaaggccagccaggacgccgtgaccaccagccagagccagtacttcagcttcagagagaagatcgccgccctgctgagaggcagactgagcatgaccggcagcaccgaggacaccatcctggagaagatcagagagatggacagcagagaggagagcagagacagaatggtgagccagctggaggcccagatcagcgagctggtggagcagctgggcaaggagagcggcttccaccagaaggccctgcagagagcccagaaggccgagaacatgctggagaccctgcagggccagctgacccacctggaggccgagctggtgagcggcggcgtgctgagagacaacctgaacttcgagaagcagaagtacctgaagttcctggaccagctgagccagaagatgaagctggaccagatggccgccgagctgggcttcgacatgagactggacgtggtgctggccagaaccgagcagctggtgagactggagagcaacgccgtgatcgagaacaagaccatcgcccacaacctgcagagaaagctgaagacccagaaggagagactggagagcaaggagctgcacatgagcctgctgagacagaagatcgcccagctggaggaggagaagcaggccagaaccgccctggtggtggagagagacaacgcccacctgaccatcagaaacctgcagaagaaggtggagagactgcagaaggagctgaacacctgcagagacctgcacaccgagctgaaggccaagctggccgacaccaacgagctgaaggccagcgcctggctgcacttcatcaagaccctggagcagaccaaggccatcgaggacctgaacaagagcagagaccagctggagaagatgaaggagaaggccgagaagaagctgatgagcgtgaagagcgagctggacaccaccgagcacgaggccaaggagaacaaggagagagccagaaacatgatcgaggtggtgaccagcgagatgaagaccctgaagaagagcctggaggaggccgagaagagagagaagcagctggccgacttcagagaggtggtgagccagatgctgggcctgaacgtgaccagcctggccctgcccgactacgagatcatcaagtgcctggagagactggtgcacagccaccagcaccacttcgtgacctgcgcctgcctgaaggacgtgaccaccggccaggagagacacccccagggccacctgcagctgctgcactag

SEQ ID NO: 217759 - DNA, 5293 bp, Artificial Sequence
  derived and/or modified sequence
gttgcccgaggagacacccgcgccacccgccggctcccggcgccgccgcttcctcagggccggttccgggtccgagcgcgcccccgggctcgggtcgtcatgagcctggactgcaccagccatatcgcgctgggtgccgcttcgccagcgcccgaggaaacttacgatcatctttcggaagtcccggtcacgcgggagcagttaaaccactatcggaatgtggctcaaaatgctcgaagtgaacttgcagcaactttggtcaaatttgaatgtgctcagtctgagcttcaagacctccgatccaagatgctttctaaagaagtctcctgtcaagaactgaaagctgaaatggagagctacaaggaaaacaatgccagaaaatcatctctccttacctctttgagagacagagttcaggaactagaagaagaatcagcagcactttccacttctaaaatcagaacagaaatcacagctcacgctgcaatcaaggagaaccaggaattaaagaagaaagttgtagagttaaatgaaaaattacaaaagtgttcaaaagaaaatgaggagaataagaaacaagtttcaaagaattgcaggaaacatgaggaatttctgactcaactgcgtgactgcttggatccagatgagaggaatgacaaggcatcagatgaagatttaattttaaagcttagagacctgcgcaaagaaaatgaattcgtgaaaggacaaattgttattcttgaagagactataaatgtccatgagatggaagcaaaagctagcagagaaacgatcatgaggctggcttcagaagtcaacagagagcagaaaaaagctgcctcctgtactgaagagaaagagaagctgaaccaggacctgctcagtgctgtagaagcaaaagaagctcttgaaagggaagttaagatcttccaagaaaggctgcttgctggccagcaggtctgggatgcctcaaagcaggaagtgagcctcctgaagaaaagctcttctgagttggagaagagtttgaaggccagtcaggatgcagtcacaacctcacaaagccagtacttctcatttagggagaaaatcgcagccctccttaggggcagattgagcatgactgggtccactgaggacaccattttggagaagattcgagaaatggacagccgggaagaaagcagggaccggatggtctcccagcttgaagcccaaatatctgagcttgttgaacagttgggaaaggagtctgggtttcaccagaaagctctccagagggcccagaaagcagagaatatgttggagactcttcagggtcagctgacacacctggaggcagagctggtttctggaggtgttttgcgagacaacttgaattttgagaaacaaaaatatcttaaatttctggatcagctttctcagaaaatgaagttggaccagatggctgccgaacttggctttgacatgcggctggacgtggttttagctcgaacagagcagctggttcgtcttgagagcaatgcagtcattgagaacaagaccattgcccacaatttgcagagaaagctaaagacacagaaagagagactggagagcaaagaattacacatgagcctcctccggcagaaaatagcccagctggaggaggagaagcaggcacgcacggccttggtggttgagagggacaacgcgcatcttaccatcaggaacttgcagaagaaggtggagaggctgcagaaagagctgaacacgtgtcgagacttgcacaccgagctcaaagccaaactggccgacaccaatgaactgaagattaaaactttggaacagactaaagccattgaagatctaaacaaatccagagaccaactggagaagatgaaggagaaagctgagaaaaagctcatgtctgtcaagtcagaactggataccacagaacatgaggctaaggagaataaagaaagggccagaaacatgatagaagtggtaaccagtgaaatgaagacactaaaaaaatctctggaagaagcagaaaagagagaaaagcagctggcagacttcagggaggtggtgtcgcagatgctaggcttgaacgtgaccagccttgctcttcctgattatgaaatcatcaagtgtcttgaaagattggtccattcacatcagcatcactttgttacctgtgcctgcctcaaagatgtgactactgggcaagagaggcacccacaaggccatttacagcttcttcattgaacactgtatctcttgagagaggtggccataagacatggcacacaattcccaatttcacaaattcctcatgtctttgagatttgatcagtttgtgaatattttatgctttgatgatatagtgagaatgcatcacttgcaaaaacgatctcaaaagtgtcagccttagataaacgttcagcattaaaaacgcctattatttcatttactagcattttaggatccagaagaattccaccagattgcatgagttagattgggaaatgggagtgggagataatattgggaggtatctattttaagtcaggggctttactagccgatttagttctcacaataaccatgtggagaagctgtgacatttttaatttacaacctttctggggctcagacataaagttacctatccaaggttgcagttgggtagtggtgggaccaggatggacaactcattggccctgcctcaaaagccatacctcttctcctgctatgcagaatctgtttctcctgaatctctgtgatgctggtgggaattgtttgcatagaggaaggacaataaccctgccatcgtgagttaatgtccgggctggtcacagtggttcatgcctgtaatcccagcactttgggagtccaaggcaggcatatcatttgaggtcaggagtttaagaccagcctggctaacatagtgagaccctgtttctactaaaaatacaaaaataagccaggtgtggtggtgcatgactgtaatcccaactactcagcaggagaagcacttgaacccaggagacggaggcggcagtgagccaagattgtgccactgcactccagcctgggcgacagagtgaaactacatctcagaaaaaaaaaaaaaaaaaaaaaaaaaaagttaatgtccaaaaatgacagatttacaagtgtaagctatatgatttcttcaaaaagcaaaagcaatatacctaattcatttggatcaaacttacataggtctcaggtcctgtaagaaacttgcctgttctaactgttgctaccagattatatctggtggtaattgttaatgtttcagcagggctggtctcagtcctttaaaatggaaagctttatttggagcccaaccctataagatgaagaaatcctatatagtcttattcaccaatatatccaatacacccacagcaatggtacctttttaagatcaggattttattatgaattcctgtcactttctgttttccatttaaatttctattttacaaatttttcagggaatcatattcttaacttcactgagaaaaatgtgttactcttttggacaatttatcttatttctatcatataagatgtatttttttattgtccttaaaagaagctctagcatgaaattaaaggaaagggaaagaaatagatctggtgcacccgaacattaggagaaaatgaaaaatatacaaccaaccgttcgtgagtcatcaaaaagtcaaagtcagcctggccaacatggcaaaactccgtctctgcaaaaaatacaaaaatgagcccggtatgttggcatatgcctgtaatcccagctactcgagaggctgagacacgaaaattgcttgaacctgggaggcggaggttgcaatgagccgagatcgcgctactgcactccagcctgggcaacagagagagaccttgtctcaaaaaacaacaacaacaaaaagtcaaagtcataataagcaaattattggcttctttcttctagactaaaagaaattaaagagatgaaacaatcaattgcaagggtcaaaactagattggatcttggtttgaatgaaaaaaagcataaaatattcttgcaataattgtaaaaatttgaatgtggactaagtcctagattatattaaaatatttttaattttttaagcttgacaaatgcactgattgttatactttaaataactaaaaatctgagaatccacagtgctacagacaataagtgataaaatgggaaaaaatagtgaagatcttcttttaggaaaactaccaataaatgtagaatggatgattccaaaaaaaaaaaaaaaaagaagaaagagagaaagaaagaaacagaaaaacctaaaagaaagcgaatgaatttgacacctgttggttggatgacagaccacacagagggagagtgaccaggctttgcttgtggagcgggcatccctgcctagctatctccttcatgtgcaaggacagtataagtagtattttgcatgtgagtaaacacacctgcgcagccctggctgaggtcactaggctggccagaggcaggacaggcagtcttgaatttcctctaggggaggcctgcagttttccccaccaaccccttttcacatgctccaaagatgtagtagtgtctgctgttttggatcgaaaatcaccttgagtggaggaagtgacttcactgggtctctggaggctctcggagcttgagtggctctgccccaccctgaatcatgcacccataaatgcagttatgggtggatgtgggtgtatgagagtggagattgtttttgtacattctctttgttttcattttccaaatataatctttaataaacttgatttagtttcttgggaaatttattttctacgctattcaaagatattttaaataatattttaaaaacatgaaatttttttttcatttttgatttgatatcattaattttatatcaggattcatgtaagagactaaaaatgatccatagtggttagtactgtaatttctgtttattacatgaaattacattccatttatccaaatatatgtttatataatatttccactgtgtgactctagtgatctttaacatacacagaatgatctacagtgatctttaacatactcagaaatatgaaaaatgtttgaatatgatctttagggacttctaatgaaaagggtatatgaaatgggaacaataaattctgtacatgtatacagtccatatacacattaagtgtttgtcatttggacaaattgaaaacttttaataaagccattttcttctttgttaaaatgcca

SEQ ID NO: 217760 - DNA, 5304 bp, Artificial Sequence
  derived and/or modified sequence
gagacacccgcgccacccgccggctcccggcgccgccgcttcctcagggccggttccgggtccgagcgcgcccccgggctcgggtcgtcatgagcctggactgcaccagccatatcgcgctgggtgccgcttcgccagcgcccgaggaaacttacgatcatctttcggaagtcccggtcacgcgggagcagttaaaccactatcggaatgtggctcaaaatgctcgaagtgaacttgcagcaactttggtcaaatttgaatgtgctcagtctgagcttcaagacctccgatccaagatgctttctaaagaagtctcctgtcaagaactgaaagctgaaatggagagctacaaggaaaacaatgccagaaaatcatctctccttacctctttgagagacagagttcaggaactagaagaagaatcagcagcactttccacttctaaaatcagaacagaaatcacagctcacgctgcaatcaaggagaaccaggaattaaagaagaaagttgtagagttaaatgaaaaattacaaaagtgttcaaaagaaaatgaggagaataagaaacaagtttcaaagaattgcaggaaacatgaggaatttctgactcaactgcgtgactgcttggatccagatgagaggaatgacaaggcatcagatgaagatttaattttaaagcttagagacctgcgcaaagaaaatgaattcgtgaaaggacaaattgttattcttgaagagactataaatgtccatgagatggaagcaaaagctagcagagaaacgatcatgaggctggcttcagaagtcaacagagagcagaaaaaagctgcctcctgtactgaagagaaagagaagctgaaccaggacctgctcagtgctgtagaagcaaaagaagctcttgaaagggaagttaagatcttccaagaaaggctgcttgctggccagcaggtctgggatgcctcaaagcaggaagtgagcctcctgaagaaaagctcttctgagttggagaagagtttgaaggccagtcaggatgcagtcacaacctcacaaagccagtacttctcatttagggagaaaatcgcagccctccttaggggcagattgagcatgactgggtccactgaggacaccattttggagaagattcgagaaatggacagccgggaagaaagcagggaccggatggtctcccagcttgaagcccaaatatctgagcttgttgaacagttgggaaaggagtctgggtttcaccagaaagctctccagagggcccagaaagcagagaatatgttggagactcttcagggtcagctgacacacctggaggcagagctggtttctggaggtgttttgcgagacaacttgaattttgagaaacaaaaatatcttaaatttctggatcagctttctcagaaaatgaagttggaccagatggctgccgaacttggctttgacatgcggctggacgtggttttagctcgaacagagcagctggttcgtcttgagagcaatgcagtcattgagaacaagaccattgcccacaatttgcagagaaagctaaagacacagaaagagagactggagagcaaagaattacacatgagcctcctccggcagaaaatagcccagctggaggaggagaagcaggcacgcacggccttggtggttgagagggacaacgcgcatcttaccatcaggaacttgcagaagaaggtggagaggctgcagaaagagctgaacacgtgtcgagacttgcacaccgagctcaaagccaaactggccgacaccaatgaactgaaggcaagtgcttggcttcattttattaaaactttggaacagactaaagccattgaagatctaaacaaatccagagaccaactggagaagatgaaggagaaagctgagaaaaagctcatgtctgtcaagtcagaactggataccacagaacatgaggctaaggagaataaagaaagggccagaaacatgatagaagtggtaaccagtgaaatgaagacactaaaaaaatctctggaagaagcagaaaagagagaaaagcagctggcagacttcagggaggtggtgtcgcagatgctaggcttgaacgtgaccagccttgctcttcctgattatgaaatcatcaagtgtcttgaaagattggtccattcacatcagcatcactttgttacctgtgcctgcctcaaagatgtgactactgggcaagagaggcacccacaaggccatttacagcttcttcattgaacactgtatctcttgagagaggtggccataagacatggcacacaattcccaatttcacaaattcctcatgtctttgagatttgatcagtttgtgaatattttatgctttgatgatatagtgagaatgcatcacttgcaaaaacgatctcaaaagtgtcagccttagataaacgttcagcattaaaaacgcctattatttcatttactagcattttaggatccagaagaattccaccagattgcatgagttagattgggaaatgggagtgggagataatattgggaggtatctattttaagtcaggggctttactagccgatttagttctcacaataaccatgtggagaagctgtgacatttttaatttacaacctttctggggctcagacataaagttacctatccaaggttgcagttgggtagtggtgggaccaggatggacaactcattggccctgcctcaaaagccatacctcttctcctgctatgcagaatctgtttctcctgaatctctgtgatgctggtgggaattgtttgcatagaggaaggacaataaccctgccatcgtgagttaatgtccgggctggtcacagtggttcatgcctgtaatcccagcactttgggagtccaaggcaggcatatcatttgaggtcaggagtttaagaccagcctggctaacatagtgagaccctgtttctactaaaaatacaaaaataagccaggtgtggtggtgcatgactgtaatcccaactactcagcaggagaagcacttgaacccaggagacggaggcggcagtgagccaagattgtgccactgcactccagcctgggcgacagagtgaaactacatctcagaaaaaaaaaaaaaaaaaaaaaaaaaaagttaatgtccaaaaatgacagatttacaagtgtaagctatatgatttcttcaaaaagcaaaagcaatatacctaattcatttggatcaaacttacataggtctcaggtcctgtaagaaacttgcctgttctaactgttgctaccagattatatctggtggtaattgttaatgtttcagcagggctggtctcagtcctttaaaatggaaagctttatttggagcccaaccctataagatgaagaaatcctatatagtcttattcaccaatatatccaatacacccacagcaatggtacctttttaagatcaggattttattatgaattcctgtcactttctgttttccatttaaatttctattttacaaatttttcagggaatcatattcttaacttcactgagaaaaatgtgttactcttttggacaatttatcttatttctatcatataagatgtatttttttattgtccttaaaagaagctctagcatgaaattaaaggaaagggaaagaaatagatctggtgcacccgaacattaggagaaaatgaaaaatatacaaccaaccgttcgtgagtcatcaaaaagtcaaagtcagcctggccaacatggcaaaactccgtctctgcaaaaaatacaaaaatgagcccggtatgttggcatatgcctgtaatcccagctactcgagaggctgagacacgaaaattgcttgaacctgggaggcggaggttgcaatgagccgagatcgcgctactgcactccagcctgggcaacagagagagaccttgtctcaaaaaacaacaacaacaaaaagtcaaagtcataataagcaaattattggcttctttcttctagactaaaagaaattaaagagatgaaacaatcaattgcaagggtcaaaactagattggatcttggtttgaatgaaaaaaagcataaaatattcttgcaataattgtaaaaatttgaatgtggactaagtcctagattatattaaaatatttttaattttttaagcttgacaaatgcactgattgttatactttaaataactaaaaatctgagaatccacagtgctacagacaataagtgataaaatgggaaaaaatagtgaagatcttcttttaggaaaactaccaataaatgtagaatggatgattccaaaaaaaaaaaaaaaaagaagaaagagagaaagaaagaaacagaaaaacctaaaagaaagcgaatgaatttgacacctgttggttggatgacagaccacacagagggagagtgaccaggctttgcttgtggagcgggcatccctgcctagctatctccttcatgtgcaaggacagtataagtagtattttgcatgtgagtaaacacacctgcgcagccctggctgaggtcactaggctggccagaggcaggacaggcagtcttgaatttcctctaggggaggcctgcagttttccccaccaaccccttttcacatgctccaaagatgtagtagtgtctgctgttttggatcgaaaatcaccttgagtggaggaagtgacttcactgggtctctggaggctctcggagcttgagtggctctgccccaccctgaatcatgcacccataaatgcagttatgggtggatgtgggtgtatgagagtggagattgtttttgtacattctctttgttttcattttccaaatataatctttaataaacttgatttagtttcttgggaaatttattttctacgctattcaaagatattttaaataatattttaaaaacatgaaatttttttttcatttttgatttgatatcattaattttatatcaggattcatgtaagagactaaaaatgatccatagtggttagtactgtaatttctgtttattacatgaaattacattccatttatccaaatatatgtttatataatatttccactgtgtgactctagtgatctttaacatacacagaatgatctacagtgatctttaacatactcagaaatatgaaaaatgtttgaatatgatctttagggacttctaatgaaaagggtatatgaaatgggaacaataaattctgtacatgtatacagtccatatacacattaagtgtttgtcatttggacaaattgaaaacttttaataaagccattttcttctttgttaaaatgcca

SEQ ID NO: 217761 - DNA, 2148 bp, Artificial Sequence
  derived and/or modified sequence
atgtccttggactgtacttcacacattgcactaggggccgctagtcctgcccctgaggaaacgtatgaccatctatccgaagtgccagttacccgggagcagttaaatcactacaggaacgtggctcagaatgcccgctccgaactagccgctactctggtgaagttcgagtgtgctcagtcagagctccaggatcttcggtcaaaaatgctgtcaaaagaggtctcctgccaggaattgaaggcagaaatggagagttacaaagaaaacaatgcgcgcaaatcgtcactgctgacctctttgcgcgaccgagtgcaggagctggaggaggagtccgccgcgttgagcacttcaaaaattcgcaccgagatcacggcacatgcagcgataaaagaaaaccaggaactgaagaaaaaggtcgttgaactgaatgaaaagttgcagaaatgtagcaaggagaacgaagaaaataaaaaacaggtttcaaagaactgccgtaagcacgaggaattcctgacgcagctaagagactgtctcgatccagacgaaagaaacgataaagctagtgatgaggatctcatcctcaagctgcgggatctccgcaaagaaaacgagtttgtaaaaggtcagatagttatcctcgaggagacaatcaatgtccacgagatggaggccaaggcatcacgcgaaacgataatgaggctcgcttctgaggtgaatcgggaacagaagaaggcagcctcttgtacggaggagaaagagaagctcaatcaggatctattaagcgctgtcgaagcaaaagaggctctggaacgcgaagtgaaaatatttcaagagagactactggccggtcagcaggtctgggatgcgagtaagcaggaggtgtctctgctaaagaaaagctccagcgagctagaaaagtctctcaaagcgtcccaagacgctgtgaccacctctcaaagtcagtacttttcatttcgtgaaaaaatagccgccttgcttcgcgggcggttatctatgacagggagcacagaagatactatactggagaaaatccgcgagatggactctagggaggagtctcgggaccgcatggtttctcaactggaagcacaaatctccgagctggtggagcagctgggtaaagaaagtggctttcaccagaaggcccttcagcgggctcagaaggcagagaatatgcttgagacgttacagggtcagcttacgcatctggaggccgaattagtgagcggaggtgtactgcgcgacaacctcaatttcgagaagcaaaagtacctgaaatttttggatcaactgtctcagaagatgaaacttgaccagatggccgccgagctgggctttgatatgcggttggacgtcgtgctggccagaacggagcagctggttcgacttgaatctaatgctgttatcgaaaacaaaactatcgcgcacaatctgcagcgcaagctaaagacgcaaaaggaaagactagagagtaaagagctgcacatgagcctgttacggcagaaaatcgcgcagttagaagaggagaagcaggctcgcaccgcccttgttgtggaaagggataacgcccacctcactatacggaatctacaaaaaaaagtggagcggctccaaaaggaactgaatacatgtcgagacctgcacaccgaattgaaagccaagttggcagacacaaatgagctgaaaattaaaactctggagcaaacaaaagctattgaggatctaaataagagcagggatcaactcgaaaagatgaaggaaaaggctgagaaaaaactgatgtccgtgaagtcagaactcgatactacagaacacgaggccaaagaaaataaggagcgagctcgtaatatgattgaggtcgtgacttccgagatgaagacgctgaagaagtctctcgaagaggcggagaagagagagaaacagttagctgacttccgtgaagtggtgagccagatgctaggtctgaatgttacatctctggctcttcctgattatgaaatcatcaaatgtctggaaagactggtccacagccaccagcatcactttgtgacttgtgcatgtctgaaggatgttaccacaggccaggaacggcatcctcagggacatctgcagcttctccattag

SEQ ID NO: 217762 - DNA, 2169 bp, Artificial Sequence
  derived and/or modified sequence
atgtccctcgattgcacttctcacatcgcactcggagcagcctcacctgctccagaagagacatacgatcacttgagcgaggttcccgtgaccagagagcaactgaaccattacaggaatgttgctcagaatgctcggtcagaactcgccgctactttggtaaagtttgagtgtgcccagtccgagctgcaggatctgcgctcaaagatgctgagtaaagaggtttcttgtcaggagttgaaggctgaaatggagtcttacaaagagaataacgcccgcaagagcagtttactgacttcactgcgcgaccgggtccaagagttggaggaagaaagtgccgccctgtccacctcaaagatccgtactgaaatcaccgcccatgctgcaatcaaagagaaccaagagttaaagaaaaaggtggtggagctgaacgagaagcttcagaagtgtagtaaggagaatgaagagaacaaaaaacaggtctccaaaaactgtcgtaaacatgaggaatttctaacgcagcttcgcgattgcctagatcccgatgagcggaacgacaaagcaagtgatgaggatttgatactaaaactgcgcgatctgcggaaagagaatgagtttgtgaagggccagatcgtgatcttggaggagaccatcaatgtccacgagatggaagctaaggccagccgagagaccatcatgagactggcctcggaagtaaatcgcgaacagaagaaggccgcctcttgcacggaggaaaaggaaaaacttaatcaggatcttctcagcgcggttgaggctaaagaggcactggaaagggaggtgaagattttccaggagagactgcttgccggacaacaggtgtgggacgcttccaaacaagaagtctcattactgaagaaatccagctccgagttggagaagagcttaaaggccagtcaagacgccgtcaccactagtcagtctcaatacttttcttttcgagagaaaatcgctgcgttgttgaggggccgtctgtctatgactgggtccaccgaggataccatcctagaaaagattcgcgaaatggacagtcgagaggaaagccgagaccgcatggtgtcccagctcgaggctcagattagtgagttagtggagcagctgggcaaggaatctgggtttcaccagaaggcccttcagcgtgcacagaaggccgaaaacatgttagagaccctgcaaggtcagctgacacatctcgaggctgagctggtcagtgggggcgtgctgagagataacctgaactttgagaaacaaaagtatcttaaatttctggaccaactctcccagaagatgaagctggaccagatggcagctgaactagggttcgacatgcgtctggatgtggtcctcgctaggaccgagcagctggttcggttagagagcaacgccgtgatagaaaataagactatcgctcacaacctgcagaggaaattaaagacacaaaaggaacgtctcgaatcaaaagaactccatatgtctctgttgagacagaagattgctcagctggaggaagagaagcaggctaggaccgcactggtcgtcgagagggataacgcacacctgacaatcagaaatcttcagaagaaagtggaaagactgcaaaaggaacttaacacatgccgcgacctacacactgagctcaaggcgaaattggccgataccaacgaactcaaggcatccgcgtggctccatttcatcaagaccctcgaacagactaaagctatcgaggatttaaataaaagccgcgatcaactggaaaagatgaaggaaaaggccgagaaaaagctcatgagtgtgaagagtgagctggacacaacagagcatgaagccaaggaaaacaaggagcgcgcaagaaatatgattgaggtggtaacatcggagatgaaaaccctaaagaaatcattagaggaggcggagaagagggagaaacagttagcagacttcagggaggtagtgtcccaaatgctcgggctcaatgtgacgagcctggctctcccagattatgagattatcaaatgtctggaaagacttgtccatagccatcaacatcatttcgttacatgcgcctgtctgaaggacgtgaccacagggcaggagcgacacccgcagggccatttgcagctgcttcattag

SEQ ID NO: 217763 - DNA, 2148 bp, Artificial Sequence
  derived and/or modified sequence
atgagcctggactgcaccagccacatcgccctgggcgccgccagccctgcccctgaggagacctatgaccacctgtctgaggtgcctgtgacccgggagcagctgaaccactacagaaatgtggcccagaatgcccggtctgagctggccgccaccctggtgaagtttgaatgtgcccagagcgagctgcaggacctgcggagcaagatgctgagcaaggaggtgtcctgccaggagctgaaggccgagatggagagctacaaggaaaataatgccaggaagagcagcctgctgaccagcctgcgggacagagtgcaggagctggaggaggagagcgctgccctgagcaccagcaagatcagaacagagatcacagcccacgccgccatcaaggagaaccaggagctgaagaagaaggtggtggagctgaatgagaagctgcagaagtgcagcaaagaaaatgaggagaacaagaagcaggtgtccaagaactgcaggaagcatgaggagttcctgacccagctgcgggactgcctggaccctgatgaaagaaatgacaaggccagtgatgaagatctcatcctgaagctgcgggacctgaggaaagaaaatgaatttgtgaagggccagatcgtcatcctggaggagaccatcaacgtgcatgagatggaggccaaggccagccgggagaccatcatgaggctggccagcgaggtgaaccgggagcagaagaaggccgccagctgcacagaggagaaggagaagctgaaccaggacctgctgtctgctgtggaggccaaggaggccctggagcgggaggtgaagatcttccaggagcggctgctggccggccagcaggtgtgggatgccagcaagcaggaggtgtccctgctgaagaagagcagcagcgagctggagaagagcctgaaggccagccaggatgctgtgaccaccagccagagccagtacttctccttccgggagaagattgctgccctgctgcggggccgcctgtccatgacaggcagcacagaggacaccatcctggagaagatccgggagatggacagccgggaggagagccgggacaggatggtgtcccagctggaggcccagatcagcgagctggtggagcagctgggcaaggagagcggcttccaccagaaggccctgcagagggcccagaaggccgagaacatgctggagaccctgcagggccagctgacccacctggaggccgagctggtgtctggaggagtgctgcgggacaacctgaactttgagaagcagaagtacctgaagttcctggaccagctgagccagaagatgaagctggaccagatggctgctgagctgggctttgacatgaggctggatgtggtgctggccaggacagagcagctggtgcggctggagagcaatgctgtgattgagaacaagaccatcgcccacaacctgcagaggaagctgaagacccagaaggagcggctggagagcaaggagctgcacatgagcctgctgcggcagaagatcgcccagctggaggaggagaagcaggccaggacagccctggtggtggagcgggacaatgcccacctgaccatccggaacctgcagaagaaggtggagcggctgcagaaggagctgaacacctgccgggacctgcacacagagctgaaggccaagctggccgacaccaatgagctgaagatcaagaccctggagcagaccaaggccatcgaggacctgaacaagagccgggaccagctggagaagatgaaggagaaggccgagaagaagctgatgtctgtgaagtctgagctggacaccacagaacatgaggccaaggagaacaaggagcgggccaggaacatgattgaggtggtgaccagcgagatgaagaccctgaagaagagcctggaggaggccgagaagcgggagaagcagctggccgacttccgggaggtggtgtcccagatgctgggcctgaatgtgaccagcctggccctgcctgactatgagatcatcaagtgcctggagcggctggtgcacagccaccagcaccactttgtgacctgtgcctgcctgaaggatgtgaccaccggccaggagcggcacccccagggccacctgcagctgctgcactag

SEQ ID NO: 217764 - DNA, 2169 bp, Artificial Sequence
  derived and/or modified sequence
atgagcctggactgcaccagccacatcgccctgggcgccgccagccctgcccctgaggagacctatgaccacctgtctgaggtgcctgtgacccgggagcagctgaaccactacagaaatgtggcccagaatgcccggtctgagctggccgccaccctggtgaagtttgaatgtgcccagagcgagctgcaggacctgcggagcaagatgctgagcaaggaggtgtcctgccaggagctgaaggccgagatggagagctacaaggaaaataatgccaggaagagcagcctgctgaccagcctgcgggacagagtgcaggagctggaggaggagagcgctgccctgagcaccagcaagatcagaacagagatcacagcccacgccgccatcaaggagaaccaggagctgaagaagaaggtggtggagctgaatgagaagctgcagaagtgcagcaaagaaaatgaggagaacaagaagcaggtgtccaagaactgcaggaagcatgaggagttcctgacccagctgcgggactgcctggaccctgatgaaagaaatgacaaggccagtgatgaagatctcatcctgaagctgcgggacctgaggaaagaaaatgaatttgtgaagggccagatcgtcatcctggaggagaccatcaacgtgcatgagatggaggccaaggccagccgggagaccatcatgaggctggccagcgaggtgaaccgggagcagaagaaggccgccagctgcacagaggagaaggagaagctgaaccaggacctgctgtctgctgtggaggccaaggaggccctggagcgggaggtgaagatcttccaggagcggctgctggccggccagcaggtgtgggatgccagcaagcaggaggtgtccctgctgaagaagagcagcagcgagctggagaagagcctgaaggccagccaggatgctgtgaccaccagccagagccagtacttctccttccgggagaagattgctgccctgctgcggggccgcctgtccatgacaggcagcacagaggacaccatcctggagaagatccgggagatggacagccgggaggagagccgggacaggatggtgtcccagctggaggcccagatcagcgagctggtggagcagctgggcaaggagagcggcttccaccagaaggccctgcagagggcccagaaggccgagaacatgctggagaccctgcagggccagctgacccacctggaggccgagctggtgtctggaggagtgctgcgggacaacctgaactttgagaagcagaagtacctgaagttcctggaccagctgagccagaagatgaagctggaccagatggctgctgagctgggctttgacatgaggctggatgtggtgctggccaggacagagcagctggtgcggctggagagcaatgctgtgattgagaacaagaccatcgcccacaacctgcagaggaagctgaagacccagaaggagcggctggagagcaaggagctgcacatgagcctgctgcggcagaagatcgcccagctggaggaggagaagcaggccaggacagccctggtggtggagcgggacaatgcccacctgaccatccggaacctgcagaagaaggtggagcggctgcagaaggagctgaacacctgccgggacctgcacacagagctgaaggccaagctggccgacaccaatgagctgaaggccagcgcctggctgcacttcatcaagaccctggagcagaccaaggccatcgaggacctgaacaagagccgggaccagctggagaagatgaaggagaaggccgagaagaagctgatgtctgtgaagtctgagctggacaccacagagcacgaggccaaggagaacaaggagcgggccaggaacatgattgaggtggtgaccagcgagatgaagaccctgaagaagagcctggaggaggccgagaagcgggagaagcagctggccgacttccgggaggtggtgtcccagatgctgggcctgaatgtgaccagcctggccctgcctgactatgagatcatcaagtgcctggagcggctggtgcacagccaccagcaccactttgtgacctgtgcctgcctgaaggatgtgaccaccggccaggagcggcacccccagggccacctgcagctgctgcactag

SEQ ID NO: 217765 - DNA, 2148 bp, Artificial Sequence
  derived and/or modified sequence
atgagcctggactgcaccagccacatcgccctgggcgccgccagccccgcccccgaagagacatacgatcatctttctgaagtacctgtgacacgtgagcagctgaaccactatagaaatgtcgcccagaatgcccgctctgaacttgccgccaccctagttaaatttgaatgcgcacagtccgagcttcaggatttgcggagcaagatgttgtccaaggaggtgtcgtgccaagagcttaaggccgagatggagagctacaaagaaaataacgcccggaagagctcactcttgacatctttgcgggaccgggtgcaggagttagaggaagagtctgccgcattaagcactagcaagatccgaaccgagattaccgcccatgccgccattaaagaaaaccaagagctcaaaaaaaaggtagtggaactgaatgaaaaactgcagaaatgctctaaggagaacgaggaaaataagaagcaggtaagtaaaaattgcagaaagcatgaggagttcctgacgcaactccgcgactgtttggacccagacgagaggaacgacaaagctagcgacgaagacttgatcctaaagttgcgggatctgcggaaggagaacgagttcgtgaagggtcagattgtgatccttgaggagaccataaatgtacatgagatggaagctaaggctagtagggagacaatcatgagacttgctagcgaggttaatcgcgagcagaagaaagctgcctcctgtactgaggaaaaggagaaactgaaccaagatctgctgtccgccgtggaggccaaagaggcgttggagcgcgaggttaagatcttccaggaaagacttctagcaggtcagcaggtgtgggatgcgagcaagcaggaagtcagtttgctgaaaaaaagctcctcggagctggagaagagcctcaaggccagtcaggacgctgtcactacatctcaatcccagtatttctctttccgcgaaaaaatcgccgcgctgctgcgcgggagactgagcatgactgggtctacagaggatactatccttgagaagatccgggagatggacagtcgcgaagagagtagggatcgaatggtgagccagctggaagctcagattagtgagttggtagaacagcttggcaaggagtcagggtttcaccagaaggccttacagagagctcagaaggccgaaaatatgcttgagactcttcaggggcagctcacccatctggaagccgaactggtttctggaggcgtactgagggataatctgaattttgagaaacagaaatatctaaagtttctcgatcaactttcgcagaagatgaaactagaccaaatggcagctgaattggggttcgatatgcgattggatgtggttctggcacggacagaacagctcgtacgcttagaatccaatgccgtgatcgaaaacaaaactatagcccacaatcttcaaagaaagttgaagacccagaaagaacgcctggagtcaaaagaactgcacatgagcctgctcagacaaaaaattgcacagttggaagaggaaaagcaggcgcgtactgctttagtggttgagagagataatgctcacttgactatccggaatttacagaaaaaggtagaaaggctgcagaaggagctgaatacctgccgtgatctgcatactgagttgaaagctaaattggcagacacgaacgagcttaaaatcaagacgctggagcaaacaaaagcaattgaagacctgaacaaatcacgggaccagttggagaagatgaaagagaaggccgaaaaaaaactcatgtctgtaaagtctgagcttgacacaactgagcacgaggcgaaggagaacaaggagagggcgaggaatatgattgaggtcgtgacaagcgagatgaaaactcttaagaaatcactcgaggaggccgagaaaagggaaaagcagctggccgattttcgggaggtggtcagccagatgctgggactgaacgtgaccagcctggccttacccgattacgaaataataaagtgtctggaaagactggttcactcccaccagcatcatttcgtcacttgcgcctgcctcaaggacgtaaccaccggccaggagaggcacccacagggacatttacaactgctccactag

SEQ ID NO: 217766 - DNA, 2169 bp, Artificial Sequence
  derived and/or modified sequence
atgagcctggactgcaccagccacatcgccctgggcgccgccagccctgcccctgaagagacatacgaccacctgtccgaggtgcctgtgacgcgggaacagctcaaccattaccgcaatgtggcccaaaatgctcgctctgagctcgccgcaaccctggtaaaattcgaatgcgcgcaaagcgaactgcaggacctgaggagtaaaatgctgtccaaggaggtgagctgtcaagagttaaaagccgagatggaatcctataaggagaacaacgctagaaagagcagcctgttgaccagtctgcgtgaccgcgtgcaggaactcgaggaggaaagtgcagcactcagcacgagcaagattcggaccgaaataactgcccacgctgccataaaagagaatcaagagttaaagaagaaggtggtggaacttaatgagaagctgcagaaatgttcaaaagagaacgaggagaacaaaaagcaagtttccaaaaattgtcgcaagcacgaggagtttttgacacaactacgtgattgtctggacccggacgagcgaaatgataaggcaagcgatgaggatctcattctgaagctgagggatctacggaaagaaaacgaattcgtgaagggccaaatcgtgattcttgaggaaacgatcaacgttcacgaaatggaggccaaggcctcacgggagacaataatgcgtttagccagtgaggtcaacagagagcaaaaaaaagccgcatcctgcaccgaagagaaggagaagcttaatcaggatctcttgtctgccgttgaggctaaggaggccttggagcgtgaggtgaaaatcttccaggagaggctcctagccgggcaacaggtttgggacgcatccaagcaggaggtaagtctacttaaaaaaagcagttctgaattggagaagagtctcaaggcctcccaagatgcagtcaccacgagtcagtcccagtatttctccttcagagaaaaaatagccgcgctccttcgtgggcggctgtccatgaccggctcaacagaggacacaatactggagaaaatcagggagatggattcacgggaggaaagtagggataggatggtcagccaactggaagcccagatatcagagctcgtggagcagctgggaaaggagtccggattccaccagaaggcattacaaagagctcagaaggctgagaatatgctggagacattgcaaggccagctgacccatttggaggccgagctcgtctctggtggagtgttgcgtgataaccttaactttgaaaagcagaagtatctgaagttcctagaccagctcagccagaagatgaagctggaccaaatggccgccgagttgggattcgatatgcggcttgacgtagtgctcgcccgcacggagcaactcgttcgcctcgaatccaatgccgtgattgaaaataagacaatagcgcacaatttacagcgtaagttgaagacccagaaagaacggctggaatcgaaagaactacatatgagcctcttgaggcaaaagatagctcaactggaggaagagaaacaggccagaaccgccttagtggtggagcgggataacgcccacctgaccatacgcaacctgcagaagaaagtagaacgcttgcagaaagaactaaacacctgtcgcgatttgcacactgagttaaaagcgaagttggctgacactaacgaattgaaagcgtcagcttggctgcattttattaagaccctggaacagaccaaggctatcgaagatctgaacaaatcccgggaccagcttgaaaaaatgaaagaaaaagccgagaaaaaactgatgtccgtgaagtctgagcttgatactacagaacacgaagctaaagagaacaaggaaagggctcgtaatatgatagaggttgtcacctctgagatgaagacgctcaagaaatctctggaagaagctgaaaagcgtgagaagcagctggccgattttcgggaagttgtctctcagatgctggggctcaatgttacatccctcgccctacccgactatgagataataaagtgcctggaaagactggtgcacagtcaccaacaccacttcgtgacatgcgcttgtctgaaggacgtgactacaggccaggagcgccacccgcaggggcaccttcagttgctccactag

SEQ ID NO: 217767 - DNA, 2148 bp, Artificial Sequence
  derived and/or modified sequence
atgagcctcgattgcacgtcgcatatagcattgggagcggcatcgcccgcacctgaggaaacctatgatcacctgtcagaagtccccgttacccgggagcagctgaatcattaccggaacgtagcgcagaacgcacggtccgaactggccgctactcttgttaagttcgaatgcgcccagtcagaactccaggacctgaggagtaaaatgttgtcaaaggaggtgtcttgtcaggagctcaaggccgagatggagtcatataaagaaaataacgcccgaaaatctagtctgctcacttccctccgagatagggtccaggaactagaggaggaaagcgcggcactatccacaagtaaaattcgtactgaaatcaccgcacatgcagccatcaaggaaaaccaggagctcaagaagaaagttgtggaactgaatgagaagctacaaaaatgcagtaaggaaaatgaggagaacaaaaagcaggtgagcaaaaactgtcgcaagcacgaagagttccttacccagcttcgggattgcctggaccctgacgaaagaaacgataaagcctctgacgaggatcttatcttaaaactgcgtgacctccgcaaggagaatgaattcgtaaagggtcagatcgtcattctggaagaaacgatcaatgtacacgagatggaagccaaagcatcccgggaaaccatcatgcggttggcatctgaggttaaccgcgagcagaagaaggctgcttcttgtaccgaggaaaaagaaaagctcaaccaggacctcttaagtgcagtggaagctaaagaggcactagagagggaagtgaagattttccaagagaggctattggccggacagcaagtctgggacgcttccaaacaagaagtgtctctccttaagaagtcctcgtccgagttggagaagtccctgaaagcctctcaggacgccgtcacgacctcacagtctcaatatttcagctttagggaaaagattgcagccctgctgcgaggacgcctgagcatgacaggctctacagaggacaccattctagagaaaatccgggagatggacagccgcgaagaaagcagggacaggatggtgagccagctggaggctcaaataagcgaactggtggagcagctgggaaaggagtcaggctttcatcaaaaggcgcttcagagagctcagaaggcagaaaacatgctggaaacactgcaaggtcagctgactcatctagaggccgaactggtttcaggaggcgtcttgcgagataacctgaactttgagaaacagaagtacctgaagttcctggaccagttgtcccagaaaatgaagctggatcaaatggcagctgaacttggttttgacatgcgcctggatgtcgtacttgctagaacagagcagctcgttaggctagagtccaacgctgttatcgagaacaagaccattgctcacaatctgcaacggaaactgaagacgcaaaaagagcgactggaatcgaaggagctgcacatgagcctgctccgccagaaaatcgcacagctggaggaagagaaacaggcccgtactgcccttgtggtcgaacgcgacaatgcacatcttacaatccgcaacttacagaagaaagtagagaggctacagaaagagcttaacacctgcagagatttgcatacggagctcaaagccaagttagcagataccaacgaacttaaaatcaagaccctcgagcagaccaaggccattgaggatttgaacaagtcccgagatcagctagagaaaatgaaggaaaaggctgaaaagaaactcatgtctgtgaaatccgaactagataccacagaacatgaggctaaagagaacaaggaaagagccagaaacatgatcgaagtggtaacctcagaaatgaagaccctgaagaagtcccttgaagaggctgagaaaagggagaaacagctggccgattttcgggaagtggtcagccagatgttaggtctcaacgtgacaagcctcgcgttgcctgactatgaaattatcaagtgccttgagcggctggtgcacagccatcaacaccacttcgtaacctgcgcgtgcttgaaggatgtaaccaccggtcaggagcgtcacccgcaaggtcaccttcagctcctccattag

SEQ ID NO: 217768 - DNA, 2169 bp, Artificial Sequence
  derived and/or modified sequence
atgagcctagattgcacctcccacatcgccttgggcgctgcatccccagcccctgaggaaacctatgaccatctatcagaagtgcctgtaactcgagaacagctgaatcactatagaaacgtagctcagaatgctcggagcgagctggccgctactctcgtcaagttcgaatgcgcccagagcgagttacaggacctgcgctcgaaaatgttgagcaaagaagtttcatgccaggagctgaaagccgaaatggagtcgtataaagaaaataacgcgcgtaagtccagcctgttaactagcttgagggatcgggtgcaggagctggaggaggaatcagcagcgctctctacctccaaaatcaggaccgagattacagcccacgccgcaattaaagaaaaccaggaattaaaaaaaaaagtggttgagttgaatgaaaaacttcagaagtgctcaaaggagaacgaagaaaacaaaaaacaggtcagtaaaaattgcaggaagcatgaggaatttctcacacaattacgagactgcctggatcctgatgagcgcaatgataaagccagtgacgaggacctgattctcaagttgcgcgacctccgtaaggaaaacgaattcgtgaaaggacaaattgtaatactagaggaaactatcaacgttcacgagatggaggctaaggcatcacgggaaaccatcatgcgcctcgccagcgaagttaatagagagcagaagaaggcagcctcttgtaccgaggagaaggaaaagctgaatcaagacctgctgagcgccgtcgaggctaaggaggctctcgaaagggaagtgaaaatctttcaggagaggttgttagccggtcagcaagtttgggatgcctctaaacaggaagtgtcactactgaaaaaatcttcttccgagctggagaagtccttgaaggcaagccaggacgcagtcacgacatctcagtctcagtacttcagcttcagggaaaagattgctgctcttcttcgagggcgactatctatgaccggcagcaccgaggacaccattttagaaaaaataagggagatggattctagagaggagtcacgcgatagaatggtaagccaactggaggcacaaatctcagagctggttgagcagctaggaaaggagtcagggtttcatcagaaggctctgcagcgcgcacaaaaggccgagaacatgctcgaaacactacaggggcagctgacgcacttggaggctgagctcgtgtctggaggcgttttgcgggacaacttaaactttgagaagcaaaagtatcttaaattcctggaccagctcagccagaagatgaagctagaccaaatggccgctgagctgggatttgacatgcgtcttgacgtagttttggcccgtaccgagcagctggtgcggctggaatcaaacgcagtcattgaaaataaaaccatcgcccacaatctgcagcgcaaattaaagacacagaaggagagacttgagtcaaaggaactgcacatgtccttgctccgacagaaaatcgcccagctggaagaggagaaacaggctcgcacagctcttgtggtcgaacgggacaatgcacatctcactattcgaaacctgcagaaaaaagtggaacgcctacagaaagagctgaatacatgcagggaccttcatacggagctcaaggcaaagctcgccgatacgaatgaattgaaggcgtcggcctggctgcattttatcaagacacttgaacagacaaaggcaatagaggatctcaacaaatccagggaccaactagaaaagatgaaggaaaaggctgaaaaaaagctgatgtcagtgaaaagcgagttggacacaactgagcatgaagcaaaggaaaataaggagcgggcacggaacatgattgaagtcgtcacaagcgaaatgaaaacgcttaaaaagtccctggaggaggcagagaaacgtgagaaacagttggctgattttcgcgaggtggtaagccagatgctgggcctgaatgtgacctctttggccctccccgattatgaaatcatcaaatgcttggagcggctcgtccatagtcaccagcatcatttcgtgacatgcgcatgtcttaaggacgtgactaccggccaagaaagacacccacagggtcaccttcagctactccattag

SEQ ID NO: 217769 - protein, 590 aa, Artificial Sequence
  derived and/or modified sequence
MSDSPAGSNPRTPESSGSGSGGGGKRPAVPAAVSLLPPADPLRQANRLPIRVLKMLSAHTGHLLHPEYLQPLSSTPVSPIELDAKKSPLALLAQTCSQIGKPDPPPSSKLNSVAAAANGLGAEKDPGRSAPGAASAAAALKQLGDSPAEDKSSFKPYSKGSGGGDSRKDSGSSSVSSTSSSSSSSPGDKAGFRVPSAACPPFPPHGAPVSASSSSSSPGGSRGGSPHHSDCKNGGGVGGGELDKKDQEPKPSPEPAAVSRGGGGEPGAHGGAESGASGRKSEPPSALVGAGHVAPVSPYKPGHSVFPLPPSSIGYHGSIVGAYAGYPSQFVPGLDPSKSGLVGGQLSGGLGLPPGKPPSSSPLTGASPPSFLQGLCRDPYCLGGYHGASHLGGSSCSTCSAHDPAGPSLKAGGYPLVYPGHPLQPAALSSSAAQAALPGHPLYTYGFMLQNEPLPHSCNWVAASGPCDKRFATSEELLSHLRTHTALPGAEKLLAAYPGASGLGSAAAAAAAAASCHLHLPPPAAPGSPGSLSLRNPHTLGLSRYHPYGKSHLSTAGGLAVPSLPTAGPYYSPYALYGQRLASASALGYQ

SEQ ID NO: 217770 - protein, 163 aa, Artificial Sequence
  derived and/or modified sequence
MSDSPAGSNPRTPESSGSGSGGGGKRPAVPAAVSLLPPADPLRQANRLPIRVLKMLSAHTGHLLHPEYLQPLSSTPVSPIELDAKKSPLALLAQTCSQIGSPGSLSLRNPHTLGLSRYHPYGKSHLSTAGGLAVPSLPTAGPYYSPYALYGQRLASASALGYQ

SEQ ID NO: 217771 - DNA, 459 bp, Artificial Sequence
  derived and/or modified sequence
atgcagcaccggggcttcctgctgctgaccctgctggccctgctggccttaacatctgccgtggctaagaaaaaggaggagggcgccctgcagtgttcagtgccaggggaccaccctaggcatcaagccttgcacccgcaggatcagtctaaaggccagtcgcaggaaagagagggtaaagggttagacgcaaagcctggatgccagggggcacctggggtgacgtggggcctggcccatgccctccccttaccgggcccaagatgcgaccctcctgtgccttccgtgtgctctctcgcattaattaatcatgctctcccgtgtcccagccactctcctgcacctcccctctcagctcagtcaggtgaaggccaaggaatcctcggctcactttccctgccgcaatctaacgtgagtcctcgtgcccgattctgtagtagccctcagtttcattattag

SEQ ID NO: 217772 - DNA, 1773 bp, Artificial Sequence
  derived and/or modified sequence
atgagcgacagccccgccggcagcaaccccagaacccccgagagcagcggcagcggcagcggcggcggcggcaagagacccgccgtgcccgccgccgtgagcctgctgccccccgccgaccccctgagacaggccaacagactgcccatcagagtgctgaagatgctgagcgcccacaccggccacctgctgcaccccgagtacctgcagcccctgagcagcacccccgtgagccccatcgagctggacgccaagaagagccccctggccctgctggcccagacctgcagccagatcggcaagcccgaccccccccccagcagcaagctgaacagcgtggccgccgccgccaacggcctgggcgccgagaaggaccccggcagaagcgcccccggcgccgccagcgccgccgccgccctgaagcagctgggcgacagccccgccgaggacaagagcagcttcaagccctacagcaagggcagcggcggcggcgacagcagaaaggacagcggcagcagcagcgtgagcagcaccagcagcagcagcagcagcagccccggcgacaaggccggcttcagagtgcccagcgccgcctgcccccccttccccccccacggcgcccccgtgagcgccagcagcagcagcagcagccccggcggcagcagaggcggcagcccccaccacagcgactgcaagaacggcggcggcgtgggcggcggcgagctggacaagaaggaccaggagcccaagcccagccccgagcccgccgccgtgagcagaggcggcggcggcgagcccggcgcccacggcggcgccgagagcggcgccagcggcagaaagagcgagccccccagcgccctggtgggcgccggccacgtggcccccgtgagcccctacaagcccggccacagcgtgttccccctgccccccagcagcatcggctaccacggcagcatcgtgggcgcctacgccggctaccccagccagttcgtgcccggcctggaccccagcaagagcggcctggtgggcggccagctgagcggcggcctgggcctgccccccggcaagccccccagcagcagccccctgaccggcgccagcccccccagcttcctgcagggcctgtgcagagacccctactgcctgggcggctaccacggcgccagccacctgggcggcagcagctgcagcacctgcagcgcccacgaccccgccggccccagcctgaaggccggcggctaccccctggtgtaccccggccaccccctgcagcccgccgccctgagcagcagcgccgcccaggccgccctgcccggccaccccctgtacacctacggcttcatgctgcagaacgagcccctgccccacagctgcaactgggtggccgccagcggcccctgcgacaagagattcgccaccagcgaggagctgctgagccacctgagaacccacaccgccctgcccggcgccgagaagctgctggccgcctaccccggcgccagcggcctgggcagcgccgccgccgccgccgccgccgccgccagctgccacctgcacctgcccccccccgccgcccccggcagccccggcagcctgagcctgagaaacccccacaccctgggcctgagcagataccacccctacggcaagagccacctgagcaccgccggcggcctggccgtgcccagcctgcccaccgccggcccctactacagcccctacgccctgtacggccagagactggccagcgccagcgccctgggctaccagtag

SEQ ID NO: 217773 - DNA, 3347 bp, Artificial Sequence
  derived and/or modified sequence
gctatttgacgtgcggctcgaggaaggcgaaggtttttgtgttgctagccggggccagcggcggtggcggcggcggcggaggcgtcggtggaggaggggaggcggcgaggaggcgcagctcccgctgcaccgcgatcgacgctgcggagcgagcccacccgccccgggagctcgcctccccggtgctcccccgccctccccgcccccccagcggcgctgcctcctccaaatgagcgattcgcccgctggatctaacccaaggacacccgaaagcagcggcagcggcagcggcggcggcgggaagaggccggcggtgccggcagcggtgtccctcttgccaccggcggaccccctgcgccaggcgaaccggctcccgatcagggtcctgaagatgctgagcgctcacaccggtcacctcctgcacccggagtacctgcagccgctgtcctccactcccgtcagccccattgagctggacgccaagaagagccccttggcgctgctggctcagacctgctcgcagatcggcaagccggacccgccgccctcctccaaactcaactcggtggcggcggcggccaacgggctgggagcggagaaggaccccggccgctcagccccgggcgccgcctccgcagccgcggccctgaagcagctgggggactcaccggccgaggacaagtccagcttcaagccctactccaagggctccggcggcggcgactcccgcaaagacagcggctcctcctcggtgtcttccacctcctcctcgtcctcctcgtccccgggagacaaggcgggcttcagggtccccagcgccgcctgcccgccctttcccccgcatggagcgccggtctccgcatcctcgtcctcgtcgtcgcccggcggctcccgcggcggctccccgcaccactctgactgcaagaacggcggcggggttggcggcggggagctggacaagaaagaccaggagcccaagcccagcccggagccggcagccgtgagccgcggcggcggtggggagcccggggcgcacggtggcgccgagtccggggcctccgggcgcaagtccgagccgccctcggcgctggtgggggccggccacgtggcgccggtgtctccctacaagccgggccactcggtgttcccgctgccgccctccagcattggctaccacggctccatcgtgggcgcctacgccggctacccgtctcagttcgtgcctggcctggatcctagcaagtccggcctcgtgggaggccagctgtctgggggcctgggcctgccgccgggcaagccccccagctccagcccgctcaccggggcctccccgccctccttcctgcagggattatgccgcgacccctattgcttgggaggttaccacggcgcctcgcacctcggcggctccagctgctccacctgcagcgcgcacgaccctgccgggcccagcctgaaggcggggggctacccgctggtgtaccccgggcacccgctgcagcccgccgcgctctcgtccagcgccgcccaggccgcgctccccggccacccgctctacacctacggcttcatgctgcagaacgaaccgctgccgcacagctgcaactgggtggcagccagtgggccgtgcgacaagcgcttcgccacctcggaggagctgctcagccacctacggacccacacggccctgccgggagccgagaaacttctggccgcctaccccggggcctcgggcctgggcagcgccgccgccgccgccgccgccgccgcctcctgccatctgcacctccccccgcccgccgcccccggcagccccgggtcgctgtccttgcggaatccacacactttgggcctaagccggtaccacccctatggcaagagccacttatccacagcggggggcctggccgtgccgtccctccccacagccggaccctactattcgccatacgcgctgtatggacagagactagcttcagcctcggcgctgggataccagtaactacagctcttcctccaccccagccccctcaccctcctccctctccctcctcctccctccccacctgccgtcgccgctgcaacctccactactgcttgaccctgccgggattccccacccagcccttccccaccggactgtgtatttatttactataatgttagcttacaagctgggaatataagtgcattaacggcccacatgagtcaatggtatgcaaaaagtctgtgttctcccaaataataatattaatcccacaaataacgacatgatccccgcccctgttcctttctgttattttttcttagatataagttttacattttttattccttttcctctttttttggttttgattggtttggtttgagggagagttggggtctttgggttcttctagacgttttgttttcccttcctggggagtttcttgcatgagtcttaacttaaaactacgtttccgccttctctttttccctcttcccccttcattccctcttgtttccttccatttgcggttctgtttttgttttttgttttgttttgttttgttttttcctttgttgtacaagtaacagagaggaggttttttttgtaactcattttgggggtggagggggccacctgggtggcaggggccctggagctctattgacctggtacactgctccgggactcctcccccgccaccctccgcgcatagggtccttggtctggaccctgccccccaaaagtagggccttgctcctctaccttgctctgagcacggagagccctgaccccaccagtaggctcgcccccagaagggcccaagtggccgtctaccgtcaccttccagactcccgcccctaacacccagtggctacagtgcgcctgtcggggcacctggagcgctcacctggttgaattcaaagtcccagaaggccccgctggcgtgaagccggccccttacattttgcgaagtgcattatagtccttgtttttctctccctcgtgggggcaacgacccctcccctggcagtaggggtggggtaggtgactctcgctagatccctccaaagcagaccggtggcgatgtcagcggatgtcacgagctcgttagctgcgttcggggaaggttggggcgtcagggagctctcggatcacagcagcccccgccctctcctaggcctggcccggcagagcccccagagtggaccccccagcgactggggtcttctccccactcctccctccttctggtctgatgcggcagcgcgggggctgcggggcctgtttgggacgaacagagctctcccttggtaagacttattttgttaataaatggaatacttggctatattca

SEQ ID NO: 217774 - DNA, 492 bp, Artificial Sequence
  derived and/or modified sequence
atgagcgacagccccgccggcagcaaccccagaacccccgagagcagcggcagcggcagcggcggcggcggcaagagacccgccgtgcccgccgccgtgagcctgctgccccccgccgaccccctgagacaggccaacagactgcccatcagagtgctgaagatgctgagcgcccacaccggccacctgctgcaccccgagtacctgcagcccctgagcagcacccccgtgagccccatcgagctggacgccaagaagagccccctggccctgctggcccagacctgcagccagatcggcagccccggcagcctgagcctgagaaacccccacaccctgggcctgagcagataccacccctacggcaagagccacctgagcaccgccggcggcctggccgtgcccagcctgcccaccgccggcccctactacagcccctacgccctgtacggccagagactggccagcgccagcgccctgggctaccagtag

SEQ ID NO: 217775 - DNA, 1773 bp, Artificial Sequence
  derived and/or modified sequence
atgagtgattcccctgcaggaagtaacccaaggacacctgagagctcaggcagtggcagcggaggaggaggtaagcgccccgccgtgccagcggctgtgtccctgttaccacccgcagaccctctgagacaagcaaaccggttaccgatccgtgtcttgaaaatgctgtctgctcacaccgggcatttattgcacccagaatatcttcagcccttatcgtctactcccgttagccctattgagctggatgccaaaaaatctcccctggctcttctggcccagacttgttctcagatcgggaagcctgacccaccaccatcgagcaagctgaactccgtggccgcagctgcgaacggcctgggcgcagagaaagatcctggtcgctcagctccaggcgccgctagcgctgccgccgctttgaaacaacttggagatagccctgccgaggataagtcctcttttaaaccttacagcaagggctccgggggcggcgactcgcgaaaggactctgggtcatccagtgtgagttctaccagctcctcttcctcgagtagccccggggacaaggcaggtttccgggtaccgagtgccgcctgcccccccttcccgccccacggagcccccgtgagcgccagctctagttcatcctctcccggagggtcacgaggcggctcgccacatcactccgactgcaagaatggcgggggcgtggggggcggcgagctggataagaaggatcaagaacctaaaccatcaccagagccggcggcagtaagcagaggcggcggcggagagccaggggctcatggaggggccgaaagcggcgcaagcgggcggaagtctgaaccgccctccgctctcgtcggcgctggccatgttgccccagttagtccttataagcctggtcactccgtgttccctctcccccctagctcaattgggtatcatggatccatcgttggggcctatgccggctatccatctcaatttgttccaggtctggatccatcgaagtctggacttgtgggtggccagctttcgggcggactcgggctcccacctgggaaaccgccatctagcagtccgctcactggcgcttctccaccatcatttctccaggggctgtgtagagacccctactgcctgggcggatatcacggagcgagccacctgggcggctccagctgtagcacctgcagtgcgcacgaccccgctgggccatccctaaaagctggaggttacccccttgtctatcccggacatccccttcaacccgccgccttgtcaagcagcgctgcacaggcagctctgccaggacaccctctctacacgtatggcttcatgctgcagaatgaacccctgcctcatagctgtaactgggtggctgccagcgggccatgtgataaacggttcgctaccagtgaggagctgctctcccatttgaggacccacaccgctctgcctggagcagagaaactccttgctgcatatcctggagcaagcggtctgggatccgcagcagcggcagctgctgctgcggccagttgccacctacaccttccgccccccgcagctccaggtagcccaggttccctgtctctaaggaaccctcacactctgggcttatctaggtaccatccgtacgggaagtcccatctaagtaccgccggtggattagccgtccccagcttgccgaccgccggaccctattactctccttatgcactgtacggtcagcgcttggcatctgcgtccgccctaggatatcaatag

SEQ ID NO: 217776 - DNA, 492 bp, Artificial Sequence
  derived and/or modified sequence
atgtccgacagcccagccggttccaatccacgaacccctgagagtagcggtagtggatccggaggaggcggtaaacggccagcggtaccggccgcagtttctctgctgcccccagcggatcctctgcgacaggcaaatagactccctatccgggttctcaagatgttaagcgctcacaccggccacttgctgcatccagagtatcttcagcctctcagctcaacccccgtctctcccatcgagttggatgctaagaaatctccgctggccctcctggcccaaacatgctcccaaatcggttcacccgggagcctcagcctcaggaatcctcatacactgggcctgtcccggtatcacccctacgggaaatcacacctttccactgcaggtggcctggcagtaccttcactgcccaccgcgggtccttattacagcccttatgccctgtacggacagcggctcgctagcgcctcagccttagggtaccaatag

SEQ ID NO: 217777 - DNA, 1773 bp, Artificial Sequence
  derived and/or modified sequence
atgtctgacagccctgctggcagcaaccccaggaccccagagagcagcggcagcggcagcggcggcggcggcaagaggcctgctgtgcctgctgctgtgtccctgctgcccccagctgaccccctgcggcaggccaaccggctgcccatccgggtgctgaagatgctgagcgcccacacaggccacctgctgcaccctgagtacctgcagcccctgagcagcacccctgtgagccccatcgagctggatgccaagaagagccccctggccctgctggcccagacctgcagccagatcggcaagccagaccccccacccagcagcaagctgaacagcgtggccgccgccgccaacggcctgggcgctgagaaggaccccggccgcagcgcccctggagctgccagcgctgctgctgccctgaagcagctgggggacagccctgctgaggacaagagcagcttcaagccctacagcaaaggaagtggcggcggggacagcaggaaggacagcggcagcagctctgtgagcagcaccagcagcagcagcagcagcagccctggggacaaggccggcttccgggtgcccagcgctgcctgcccccccttcccccctcatggagcccctgtgtctgccagcagcagcagcagcagccctgggggcagcagaggaggcagcccccaccacagcgactgcaagaatggaggcggcgtgggcggcggggagctggacaagaaggaccaggagcccaagcccagccctgagcctgctgctgtgtccagaggaggcggcggggagcccggggcccatggaggagctgagagcggggccagcggcaggaagtctgagcccccatctgccctggtgggcgccggccacgtggcccctgtgagcccctacaagccaggccacagcgtcttccccctgccccccagcagcatcggctaccacggcagcatcgtgggcgcctatgccggctaccccagccagtttgtgcccggcctggaccccagcaagagcggcctggtgggcggccagctgagcggcggcctgggcctgcccccaggcaagccacccagcagcagccccctgaccggggccagcccccccagcttcctgcagggcctgtgccgggacccctactgcctgggcggctaccacggggccagccacctgggcggcagcagctgcagcacctgcagcgcccatgaccctgctggccccagcctgaaggccggcggctaccccctggtgtacccaggccaccccctgcagcctgctgccctgagcagcagcgctgcccaggccgccctgcccggccaccccctgtacacctacggcttcatgctgcagaatgagcccctgccccacagctgcaactgggtggccgccagcggcccctgtgacaagagatttgccaccagcgaggagctgctgagccacctgcggacccacacagccctgcccggggctgagaagctgctggccgcctacccaggggccagcggcctgggcagcgctgctgctgctgctgctgctgctgccagctgccacctgcacctgcccccacctgctgcccctggcagccctggcagcctgagcctgaggaacccccacaccctgggcctgagccgctaccacccctacggcaagagccacctgagcacagctgggggcctggccgtgcccagcctgcccacagctggcccctactacagcccctatgccctgtatggccagaggctggccagcgccagcgccctgggctaccagtag

SEQ ID NO: 217778 - DNA, 492 bp, Artificial Sequence
  derived and/or modified sequence
atgtctgacagccctgctggcagcaaccccaggaccccagagagcagcggcagcggcagcggcggcggcggcaagaggcctgctgtgcctgctgctgtgtccctgctgcccccagctgaccccctgcggcaggccaaccggctgcccatccgggtgctgaagatgctgagcgcccacacaggccacctgctgcaccctgagtacctgcagcccctgagcagcacccctgtgagccccatcgagctggatgccaagaagagccccctggccctgctggcccagacctgcagccagatcggcagccctggcagcctgagcctgaggaacccccacaccctgggcctgagccgctaccacccctacggcaagagccacctgagcacagctgggggcctggccgtgcccagcctgcccacagctggcccctactacagcccctatgccctgtatggccagaggctggccagcgccagcgccctgggctaccagtag

SEQ ID NO: 217779 - DNA, 1773 bp, Artificial Sequence
  derived and/or modified sequence
atgagcgacagccccgccggcagcaacccccggacccccgagagctccgggtctgggagtgggggcggcggaaaaagaccagctgtcccggcagccgtaagtctattgcctcctgccgatcccctgcggcaggctaacaggctgccaattagggttctgaagatgttgagcgcccataccggccatctgttgcaccccgaatatttgcagcccctgtcatctacacccgtttcccctattgagttagatgctaagaaatcccctctcgccctgctggcccagacgtgcagtcagattggaaaaccagatccaccgccgtcttcaaaactcaattcagtcgcagctgcagccaatggtctcggggcagaaaaggacccagggcgctctgcacccggggctgcatccgcggcagcagctcttaaacagctgggtgattctccggctgaggacaaatccagtttcaaaccatactccaaggggagtggaggaggggattcacgtaaggacagcggttcctcaagtgtgtctagtacttctagctcctcttcgtcgtcccccggtgacaaagccgggttcagagtccctagtgccgcgtgcccccccttccctccgcacggggccccggtgtcggcgtctagcagttcctcctctcctggtggctcccgggggggcagcccgcaccacagtgactgtaaaaacggtggcggggtgggaggcggggagcttgacaagaaggaccaggagcccaagccctcgccagaacccgcggccgtgtccagaggtggtggcggagagccaggggcccacggaggcgcggagtcaggagcctccgggcgtaagtcagagcccccaagcgctcttgtgggcgcagggcacgtggctcctgtctccccctataaaccaggtcactcagtcttccccctgccgcctagttctatcggatatcatggttccatcgttggagcttacgctggatacccctcccagttcgtccctgggttggatccctccaagtcaggtctggtgggaggccagttgagtggtggattgggtttgccgcccggcaagcctccaagcagtagccccttaaccggggcctcccctccatcatttctccagggcctatgtcgggacccctactgtctggggggctaccacggggcttcccatttgggaggcagctcctgtagtacctgttctgcacacgaccctgcaggaccctccctgaaagctggaggatatccattagtgtacccaggccacccactccagcctgcagcactgtcgtccagcgctgcccaggcggcattaccgggccaccccttgtatacgtacggcttcatgttacagaatgaacctctgccacactcctgtaactgggtggccgcgtccggcccctgcgacaaaaggtttgccaccagtgaggagctcctgtcacacctcagaacgcatacagcacttccaggggccgaaaagctactggctgcctacccaggggcttccggactgggctccgcagctgctgctgccgccgctgccgcatcctgccacctgcacctccccccgcccgccgcccccggttctcccggaagcctgagtctaaggaatccccatacactggggctgagcaggtaccacccctatgggaaaagtcacttgtcaactgccggcggacttgctgtcccgagcttgccgacagccggtccctactattccccctatgctctctacggacaaaggttagccagtgctagcgctcttggctaccagtag

SEQ ID NO: 217780 - DNA, 681 bp, Artificial Sequence
  derived and/or modified sequence
gttgctagccggggccagcggcggtggcggcggcggcggaggcgtcggtggaggaggggaggcggcgaggaggcgcagctcccgctgcaccgcgatcgacgctgcggagcgagcccacccgccccgggagctcgcctccccggtgctcccccgccctccccgcccccccagcggcgctgcctcctccaaatgagcgattcgcccgctggatctaacccaaggacacccgaaagcagcggcagcggcagcggcggcggcgggaagaggccggcggtgccggcagcggtgtccctcttgccaccggcggaccccctgcgccaggcgaaccggctcccgatcagggtcctgaagatgctgagcgctcacaccggtcacctcctgcacccggagtacctgcagccgctgtcctccactcccgtcagccccattgagctggacgccaagaagagccccttggcgctgctggctcagacctgctcgcagatcggcagccccgggtcgctgtccttgcggaatccacacactttgggcctaagccggtaccacccctatggcaagagccacttatccacagcggggggcctggccgtgccgtccctccccacagccggaccctactattcgccatacgcgctgtatggacagagactagcttcagcctcggcgctgggataccagtaa

SEQ ID NO: 217781 - DNA, 492 bp, Artificial Sequence
  derived and/or modified sequence
atgagcgacagccccgccggcagcaacccccggacccccgagagctccggcagcggcagtggcgggggaggcaaaagaccagccgtccccgcagccgtgagtctgctgcctccggctgacccactccgacaggctaatcgccttcctatacgcgtgcttaaaatgctgtctgctcacactggccatttgctgcatccagagtacttacagcctttgtccagtacgccagttagcccaatcgaactcgatgccaaaaagagccccctggcgctcctggcccagacatgtagtcagatcggctcccctgggagccttagcctacgaaacccccatacattaggcttgagccgttatcacccatacgggaaaagtcatctgtctaccgcggggggcctcgccgtgccatccttgccaactgccgggccttattacagtccctatgccctgtatgggcagagactagccagcgcttcagcattggggtatcaatag

SEQ ID NO: 217782 - DNA, 1773 bp, Artificial Sequence
  derived and/or modified sequence
atgtccgatagtcccgcagggagcaatccacggactcccgagagcagcgggtccggttctggcggaggaggtaagcggcctgccgttcccgctgccgtttccttgctgcctccagcggaccccctccgccaagccaataggctgcccatacgcgttctcaaaatgctgtccgctcacacaggccatcttctgcatccagagtacctacagccactgagttcaactccggtgtcccccatcgagctcgacgccaagaaaagccctctagctctcctggcccagacttgctcccagattggcaagcctgaccctcccccttctagtaaactgaattccgtagccgcagcggcaaatggcctgggggctgagaaggaccccggtcggagtgcaccaggcgctgccagtgcagccgctgctcttaaacaattgggggatagccccgctgaggacaaatcatcttttaaaccatattcaaaggggagtggcggaggggactctcggaaagactcaggctcaagttccgtgtcctcaacgtcgtcttccagctcttcatctccgggagataaagccggattccgagtgccaagcgcagcatgccctcctttcccacctcacggggctccggtgagtgcaagcagcagctcttcaagccctggcggtagcaggggcggtagtcctcaccactccgattgcaagaacggcggtggcgtgggcggtggcgagctggataagaaagatcaagagcccaaaccaagtccagagccagctgcggtctcccgcggaggaggcggtgagccaggcgctcatgggggtgccgagagtggcgcaagcgggagaaagtccgaaccgcctagcgctctagtaggcgctggtcatgtggcccctgtctcaccctataagcccggacacagcgtcttcccacttccaccgagctctatcggatatcatggctctatcgtgggagcatacgccggatatcccagccagttcgtgccgggactcgatcccagtaaatcagggctcgtgggaggtcagctctccggtggattggggttgccacctgggaagccccctagcagttcgcccctgaccggcgcttcgcctccatctttcctgcaagggttatgtcgcgacccctactgtctgggcggatatcatggtgccagtcatctgggtggatcaagctgttcaacgtgtagcgcacacgatcctgccggtcccagtctgaaggcgggtggctatcctctggtgtacccaggacacccactccagccagctgccctgagttcttccgccgctcaggcagctctgccgggacatcctttgtatacgtacgggtttatgctccagaacgagcctctgccccactcttgcaactgggtggcagccagtggcccatgcgataaacgcttcgccaccagcgaggaactcctgagtcacctgaggacccacacagccttgccgggtgccgagaaactgctggccgcatatcctggtgcatcaggactgggcagcgctgccgctgctgctgcagccgctgcttcctgtcacctgcacctgcccccacctgcagcacctggcagtccaggtagtctcagtctgagaaaccctcacacgctgggactctcgagataccatccctatggaaaaagccatctgagtacggccggaggtctggcagtgcctagcctgcccacagccggtccttactattcaccctacgccttgtatggacagagactcgcaagtgcgtctgccctcggctaccaatag

SEQ ID NO: 217783 - DNA, 492 bp, Artificial Sequence
  derived and/or modified sequence
atgtcggacagtcctgccggatccaaccccaggacgcctgagtcatctggatcaggcagtggaggcggagggaagaggcctgccgtgcccgctgccgtttcattgctccccccagccgatcccctgaggcaggccaatcgactcccaatcagggtcctgaagatgttgtccgcccataccggccacctgctgcaccccgagtatctgcaaccattaagcagcacgcctgtgtccccgattgagctggatgcaaaaaaatctccacttgccctcttggctcagacatgctcccagattggctccccagggagcctttccctccgaaatccgcacacactcggcctgagcaggtaccacccttatgggaagagtcacttatcaactgcagggggattggctgtaccatccttacccacagcagggccttattactcaccctacgcactgtacggtcaaaggctcgcatccgcatcggcgctaggctaccagtag

SEQ ID NO: 217784 - protein, 186 aa, Artificial Sequence
  derived and/or modified sequence
MKAVNEQGKEVTEFGNKYWLMLNEKEAQQVYGGKEARTEEMKWRQWADDWLVHLISPNVYRTPTEALASFDYIVREGKFGAVEGAVAKYMGAAAMYLISKRLKSRHRLQDNVREDLYEAADKWVAAVGKDRPFMGGQKPNLADLAVYGVLRVMEGLDAFDDLMQHTHIQPWYLRVERAITEASPAH

SEQ ID NO: 217785 - protein, 377 aa, Artificial Sequence
  derived and/or modified sequence
MDPAARVVRALWPGGCALAWRLGGRPQPLLPTQSRAGFAGAAGGPSPVAAARKGSPRLLGAAALALGGALGLYHTARWHLRAQDLHAERSAAQLSLSSRLQLTLYQYKTCPFCSKVRAFLDFHALPYQVVEVNPVRRAEIKFSSYRKVPILVAQEGESSQQLNDSSVIISALKTYLVSGQPLEEIITYYPAMKAVNEQGKEVTEFGNKYWLMLNEKEAQQVYGGKEARTEEMKWRQWADDWLVHLISPNVYRTPTEALASFDYIVREGKFGAVEGAVAKYMGAAAMYLISKRLKSRHRLQDNVREDLYEAADKWVAAVGKDRPFMGGQKPNLADLAVYGVLRVMEGLDAFDDLMQHTHIQPWYLRVERAITEASPAH

SEQ ID NO: 217786 - DNA, 99 bp, Artificial Sequence
  derived and/or modified sequence
aatcaaatggaatgaaatcgaatggaattgaatcgaatggaatgcaatagaatgtcttcaaatggaatcgaatggaaattggtgaagtggacgggagtg

SEQ ID NO: 217787 - DNA, 1134 bp, Artificial Sequence
  derived and/or modified sequence
atggatcctgccgcacgcgttgtcagagcattgtggcctggcggctgtgctctggcctggcggctaggcgggaggccgcagccactactcccaactcagagccgcgccggctttgccggggccgccggaggcccctctcctgttgccgccgcgcggaaaggatctccccgtctgctgggtgctgcagccctcgccttgggcggcgccctggggctctaccacactgctcggtggcacctccgggcccaggacctacacgccgaaaggagcgctgcccagctgagcctcagcagcagactgcaattgaccctgtatcagtacaaaacgtgccctttttgctccaaggtgagggcattcctggattttcacgccttgccctatcaggtcgtcgaggtgaacccagtgcgaagggcagaaattaaatttagctcctaccgaaaagtgcctatattagtggcacaggagggcgaatcaagccagcaactgaatgatagcagtgtaattatatcagccctgaagacctaccttgtcagtggtcagcctcttgaagaaattatcacctactatcccgccatgaaggctgtgaatgaacaagggaaggaggttaccgagtttggtaataagtactggctcatgcttaatgagaaggaggcacagcaggtctatggggggaaagaggcccgtaccgaagaaatgaaatggcgccaatgggcagatgactggctggttcacttgatcagccccaacgtttacagaacccccaccgaggccctggcatcgttcgactatattgtgagagaaggcaaattcggcgcggtggagggagccgttgccaaatatatgggtgcggctgcaatgtacctgatttcaaagaggctgaaaagccggcatagactgcaagacaacgtgagggaggacttatacgaagcagccgacaaatgggtggcagccgtggggaaagacaggccctttatgggtgggcagaagcccaatctggctgatctagcagtctacggcgtcctcagggttatggagggacttgatgcattcgacgacttaatgcagcatactcacatccagccctggtacctccgggtcgagcgggccataaccgaggcgtctccagcgcactag

SEQ ID NO: 217788 - DNA, 1134 bp, Artificial Sequence
  derived and/or modified sequence
atggaccctgctgcccgggtggtgcgggccctgtggccaggcggctgtgccctggcctggaggctgggcggccggccccagcccctgctgcccacccagagccgggccggctttgctggagctgctgggggccccagccctgtggccgccgccaggaagggcagcccccggctgctgggcgccgccgccctggccctgggcggggccctgggcctgtaccacacagcccgctggcacctgcgggcccaggacctgcatgctgagaggtctgctgcccagctgagcctgagcagccggctgcagctgaccctgtaccagtacaagacctgccccttctgcagcaaggtgcgggccttcctggacttccacgccctgccctaccaggtggtggaggtgaaccctgtgcggcgggcagagatcaagttcagcagctacaggaaggtgcccatcctggtggcccaggagggggagagcagccagcagctgaatgacagcagcgtcatcatcagcgccctgaagacctacctggtgtctggccagcccctggaggagatcatcacctactacccagccatgaaggctgtgaatgagcagggcaaggaggtgacagaatttggaaacaagtactggctgatgctgaatgagaaggaggcccagcaggtgtatggaggcaaggaggccaggacagaggagatgaagtggaggcagtgggcagatgactggctggtgcacctgatcagccccaacgtgtaccgcacccccacagaggccctggccagctttgactacatcgtgcgggagggcaagtttggagctgtggagggcgctgtggccaagtacatgggcgccgccgccatgtacctgatcagcaagaggctgaagagccgccaccggctgcaggacaacgtgcgggaggacctgtatgaggccgctgacaagtgggtggccgctgtgggcaaggaccggcccttcatgggcggccagaagcccaacctggccgacctggccgtgtatggagtgctgcgggtgatggagggcctggatgcctttgatgacctgatgcagcacacccacatccagccctggtacctgcgggtggagcgggccatcacagaggccagccctgcccactag

SEQ ID NO: 217789 - DNA, 1134 bp, Artificial Sequence
  derived and/or modified sequence
atggaccccgccgcccgggtggtgcgggccctgtggcccggcggctgcgcacttgcatggcgcctcggggggcgtcctcagcccctgctgcccacacaatcccgagctggatttgccggcgcggccggtggtcccagcccagtcgcagctgcccgaaagggcagcccaagattgctcggagctgctgccctcgctctggggggagccctgggactgtatcatactgctcgatggcatttacgcgcccaggatctgcacgctgagagatcggctgcccaacttagtctatcttcacggctacagctcactctttatcagtacaagacgtgtccattttgctctaaagtgcgtgcatttctcgacttccacgcactcccttaccaggtggtagaagtcaacccagtgcgaagagcagaaatcaagttcagcagctatcgcaaggtgcctatactggtcgcccaggagggcgagtcgtctcagcaattgaatgacagttctgtgatcattagcgccttaaagacctatttggtgtcagggcagcccctggaagagataattacatattacccagcgatgaaggctgtcaatgagcaaggaaaagaagttacagaattcgggaataagtattggttaatgctgaatgagaaagaagcgcagcaggtgtacggcggcaaggaggcacgcacggaggaaatgaagtggcggcagtgggccgacgattggctggtacatctgatatctcccaatgtttataggactcccacagaagctctggcgtcatttgactacatcgtgcgcgaaggaaagttcggtgccgtcgagggtgccgtggctaagtacatgggcgcagctgcaatgtacctgatcagtaaacgcctgaaaagcaggcaccggcttcaggataacgtgcgcgaagatctgtatgaggcggcggataaatgggtggcagcagtcggaaaagaccgtccttttatgggaggacaaaaaccaaatctcgctgacttggctgtctacggtgtcttgagggttatggagggactagatgcgttcgatgacctgatgcagcatactcacatccaaccatggtatcttagagttgagagagccattacagaggcatcccctgcccactag

SEQ ID NO: 217790 - DNA, 1134 bp, Artificial Sequence
  derived and/or modified sequence
atggatcctgcagctcgggtagtgcgagccctgtggcccggtggatgcgcccttgcctggcgtctcgggggtaggcctcagccgctgctccccacccagtctagggctggcttcgcaggtgctgctggaggtcctagtccagttgcagccgcaagaaaagggagcccaaggctgctgggcgctgcagccctagcgcttggaggggcacttggcctgtatcataccgctcggtggcaccttagagcgcaggacctccatgcagagcgctccgcagcacagttgagcctgtcctcgcggctccaactgactctttaccagtataagacatgcccattttgctcaaaagtgagggcgtttctcgacttccacgccctcccctatcaggtagttgaggtgaaccccgtgcggagagccgagattaagttttctagttacagaaaggtgcccatcttggtcgcgcaggaaggtgagagcagccagcagctgaatgatagcagcgtcatcatctccgctttaaagacgtatctggtatcaggtcagcccttagaagagatcatcacttactaccccgcaatgaaggcagtgaatgagcaaggaaaggaagtgactgagttcggtaacaagtattggttaatgctgaacgagaaagaggctcaacaggtgtatggcggaaaagaggctcggaccgaagaaatgaaatggagacaatgggcggacgattggttggtgcatctgatctctcccaacgtctaccgaacacctacagaggccttggcgtccttcgactatattgtcagagaagggaagttcggagccgtggaaggtgccgtggctaaatacatgggggcagctgcgatgtatctgatctcgaagcgcctgaagtctaggcataggcttcaggacaacgtccgcgaggacctgtacgaggcggcagataagtgggttgcagccgtaggcaaggatcggccttttatgggcggtcagaaacctaacctcgccgacctggcggtgtatggggttctccgggttatggaagggcttgacgcctttgatgatctcatgcagcacacccacattcaaccttggtatctccgcgtagagagggctatcacggaggctagccccgcacactag

SEQ ID NO: 217791 - DNA, 1415 bp, Artificial Sequence
  derived and/or modified sequence
gcttcagctagggcgggggagcccagcagaaggaccgagcagcctggcaccccactttgccatcctctccctggaaatctcggggtcggcgggccggccgcttcgcgtgggcgaaatcagagacacgtggtttccaaggccccttcggctctccctgtccagccgcctgcagctgaccctgtaccagtacaagacgtgtcccttctgcagcaaggtccgagccttcctcgacttccatgccctgccctaccaggtggtggaggtgaaccctgtgcgcagggctgagatcaagttctcctcctacagaaaggtgcccatcctggtggcccaggaaggagaaagctcgggacggcagatatgaaatgcctggcacagtgcttggggtctagtatgtagcttccagaacccaccctgcccctctacctgggaggccaaatggcaacaactaaatgactcctctgtcatcatcagcgccctcaagacctacctggtgtcggggcagcccctggaagagatcatcacctactacccagccatgaaggctgtgaacgagcagggcaaggaggtgaccgagttcggcaataagtactggctcatgctcaacgagaaggaggcccagcaagtgtatggtgggaaggaggccaggacggaggagatgaagtggcggcagtgggcggacgactggctggtgcacctgatctcccccaatgtgtaccgcacgcccaccgaggctctggcgtcctttgactacattgtccgcgagggcaagttcggagccgtggagggtgccgtggccaagtacatgggtgcagcggccatgtacctcatcagcaagcgactcaagagcaggcaccgcctccaggacaacgtgcgcgaggacctctatgaggctgctgacaagtgggtggctgctgtgggcaaggaccggcccttcatggggggccagaagccgaatctcgctgatttggcggtgtatggcgtgctgcgtgtgatggaggggctggatgcgttcgatgacctgatgcagcacacgcacatccagccctggtacctgcgggtggagagggccatcaccgaggcctccccagcgcactgaatgtccccgcgcagagcagagggaaggcagcggaagacgccagctgccagggcctggggccactgggccagcgcctggcgatactggttgggggcaggatcattctgccccttgtccacgcacccccaccagccctctcgcttctaacacagggcacctgctggggctcagggatgttagggacgagttccagccctgccactgccctggggcgacccctccctgtccctgcctccctgctctgccgcccctcttcctggaccctcagtggctgtcccatggctacatcctgtgggtgggggccctcgacaggacagca

SEQ ID NO: 217792 - DNA, 2331 bp, Artificial Sequence
  derived and/or modified sequence
ctctcgggcgccgggcggggccatcccggggctgtccgcggagacgcctatgcggtggaggctccgggcttcagctagggcgggggagcccagcagaaggaccgagcagcctggcaccccactttgccatcctctccctggaaatctcggggtcggcgggccggccgcttcgcgtgggcgaaatcagagacacgtggtttccaaggccccttcgggttcgggaaaattttatggttcgggtcacagtaggaagcggacaatgaggcgggagggcagagagaaccgcaacacctggtgccgggtcgggtcgtttccggggctttcagtggccggaagtcgcggcgcctgtactgactctaggaagggctggagttgttttgaatgggcgcccgtaagagaggtgggcaagtacgtgttacagacggccacgccgccctttaggcggtcaaggtggggcgaggagacgttcgcccccctgcagtcggccgggtcactacccaagagcctttggaggcggaagcatggaacggtctgcaaacgttcccgagcgggcctctgcggctctggcgggcgtttcgaacttgggcgccgggcacacgcccagtcccgagagcgctgagggttcccttagcgtcgccctcaccccggccaacccgcggggcgccagagtcctggccctttaaacgccgcgcgtgcctcggcgtcttcgtttcgcgcgcccgcccgcggcgccggcggagcgaacatggacccggctgcgcgggtggtgcgggcgctgtggcctggtgggtgcgccttggcctggaggctgggaggccgcccccagccgctgctacccacgcagagccgggctggcttcgcgggggcggcgggcggcccgagccccgtggctgcagctcgtaaggggagcccgcggctgctgggagctgcggcgctggccctggggggagccctggggctgtaccacacggcgcggtggcacctgcgcgcccaggacctccacgcagagcgctcagccgcgcagctctccctgtccagccgcctgcagctgaccctgtaccagtacaagacgtgtcccttctgcagcaaggtccgagccttcctcgacttccatgccctgccctaccaggtggtggaggtgaaccctgtgcgcagggctgagatcaagttctcctcctacagaaaggtgcccatcctggtggcccaggaaggagaaagctcgcaacaactaaatgactcctctgtcatcatcagcgccctcaagacctacctggtgtcggggcagcccctggaagagatcatcacctactacccagccatgaaggctgtgaacgagcagggcaaggaggtgaccgagttcggcaataagtactggctcatgctcaacgagaaggaggcccagcaagtgtatggtgggaaggaggccaggacggaggagatgaagtggcggcagtgggcggacgactggctggtgcacctgatctcccccaatgtgtaccgcacgcccaccgaggctctggcgtcctttgactacattgtccgcgagggcaagttcggagccgtggagggtgccgtggccaagtacatgggtgcagcggccatgtacctcatcagcaagcgactcaagagcaggcaccgcctccaggacaacgtgcgcgaggacctctatgaggctgctgacaagtgggtggctgctgtgggcaaggaccggcccttcatggggggccagaagccgaatctcgctgatttggcggtgtatggcgtgctgcgtgtgatggaggggctggatgcgttcgatgacctgatgcagcacacgcacatccagccctggtacctgcgggtggagagggccatcaccgaggcctccccagcgcactgaatgtccccgcgcagagcagagggaaggcagcggaagacgccagctgccagggcctggggccactgggccagcgcctggcgatactggttgggggcaggatcattctgccccttgtccacgcacccccaccagccctctcgcttctaacacagggcacctgctggggctcagggatgttagggacgagttccagccctgccactgccctggggcgacccctccctgtccctgcctccctgctctgccgcccctcttcctggaccctcagtggctgtcccatggctacatcctgtgggtgggggccctcgacaggacagcaggacggtttgttttcagtggaatcccatccctgggttcccctggttcccactcttcccaagcctcccgggactgggacatgtttgcaataaaggaaaggtttgtggcgcctgtcatggcaggcatctcatgga

SEQ ID NO: 217793 - DNA, 1134 bp, Artificial Sequence
  derived and/or modified sequence
atggaccccgccgccagagtggtgagagccctgtggcccggcggctgcgccctggcctggagactgggcggcagaccccagcccctgctgcccacccagagcagagccggcttcgccggcgccgccggcggccccagccccgtggccgccgccagaaagggcagccccagactgctgggcgccgccgccctggccctgggcggcgccctgggcctgtaccacaccgccagatggcacctgagagcccaggacctgcacgccgagagaagcgccgcccagctgagcctgagcagcagactgcagctgaccctgtaccagtacaagacctgccccttctgcagcaaggtgagagccttcctggacttccacgccctgccctaccaggtggtggaggtgaaccccgtgagaagagccgagatcaagttcagcagctacagaaaggtgcccatcctggtggcccaggagggcgagagcagccagcagctgaacgacagcagcgtgatcatcagcgccctgaagacctacctggtgagcggccagcccctggaggagatcatcacctactaccccgccatgaaggccgtgaacgagcagggcaaggaggtgaccgagttcggcaacaagtactggctgatgctgaacgagaaggaggcccagcaggtgtacggcggcaaggaggccagaaccgaggagatgaagtggagacagtgggccgacgactggctggtgcacctgatcagccccaacgtgtacagaacccccaccgaggccctggccagcttcgactacatcgtgagagagggcaagttcggcgccgtggagggcgccgtggccaagtacatgggcgccgccgccatgtacctgatcagcaagagactgaagagcagacacagactgcaggacaacgtgagagaggacctgtacgaggccgccgacaagtgggtggccgccgtgggcaaggacagacccttcatgggcggccagaagcccaacctggccgacctggccgtgtacggcgtgctgagagtgatggagggcctggacgccttcgacgacctgatgcagcacacccacatccagccctggtacctgagagtggagagagccatcaccgaggccagccccgcccactag

SEQ ID NO: 217794 - protein, 4012 aa, Artificial Sequence
  derived and/or modified sequence
MGVLKVWLGLALALAEFAVLPHHSEGACVYQDSLLADATIWKPDSCQSCRCHGDIVICKPAVCRNPQCAFEKGEVLQIAANQCCPECVLRTPGSCHHEKKIHEHGTEWASSPCSVCSCNHGEVRCTPQPCPPLSCGHQELAFIPEGSCCPVCVGLGKPCSYEGHVFQDGEDWRLSRCAKCLCRNGVAQCFTAQCQPLFCNQDETVVRVPGKCCPQCSARSCSAAGQVYEHGEQWSENACTTCICDRGEVRCHKQACLPLRCGKGQSRARRHGQCCEECVSPAGSCSYDGVVRYQDEMWKGSACEFCMCDHGQVTCQTGECAKVECARDEELIHLDGKCCPECISRNGYCVYEETGEFMSSNASEVKRIPEGEKWEDGPCKVCECRGAQVTCYEPSCPPCPVGTLALEVKGQCCPDCTSVHCHPDCLTCSQSPDHCDLCQDPTKLLQNGWCVHSCGLGFYQAGSLCLACQPQCSTCTSGLECSSCQPPLLMRHGQCVPTCGDGFYQDRHSCAVCHESCAGCWGPTEKHCLACRDPLHVLRDGGCESSCGKGFYNRQGTCSACDQSCDSCGPSSPRCLTCTEKTVLHDGKCMSECPGGYYADATGRCKVCHNSCASCSGPTPSHCTACSPPKALRQGHCLPRCGEGFYSDHGVCKACHSSCLACMGPAPSHCTGCKKPEEGLQVEQLSDVGIPSGECLAQCRAHFYLESTGICEACHQSCFRCAGKSPHNCTDCGPSHVLLDGQCLSQCPDGYFHQEGSCTECHPTCRQCHGPLESDCISCYPHISLTNGNCRTSCREEQFLNLVGYCADCHHLCQHCAADLHNTGSICLRCQNAHYLLLGDHCVPDCPSGYYAERGACKKCHSSCRTCQGRGPFSCSSCDTNLVLSHTGTCSTTCFPGHYLDDNHVCQPCNTHCGSCDSQASCTSCRDPNKVLLFGECQYESCAPQYYLDFSTNTCKECDWSCSACSGPLKTDCLQCMDGYVLQDGACVEQCLSSFYQDSGLCKNCDSYCLQCQGPHECTRCKGPFLLLEAQCVQECGKGYFADHAKHKCTACPQGCLQCSHRDRCHLCDHGFFLKSGLCVYNCVPGFSVHTSNETCSGKIHTPSLHVNGSLILPIGSIKPLDFSLLNVQDQEGRVEDLLFHVVSTPTNGQLVLSRNGKEVQLDKAGRFSWKDVNEKKVRFVHSKEKLRKGYLFLKISDQQFFSEPQLINIQAFSTQAPYVLRNEVLHISRGERATITTQMLDIRDDDNPQDVVIEIIDPPLHGQLLQTLQSPATPIYQFQLDELSRGLLHYAHDGSDSTSDVAVLQANDGHSFHNILFQVKTVPQNDRGLQLVANSMVWVPEGGMLQITNRILQAEAPGASAEEIIYKITQDYPQFGEVVLLVNMPADSPADEGQHLPDGRTATPTSTFTQQDINEGIVWYRHSGAPAQSDSFRFEVSSASNAQTRLESHMFNIAILPQTPEAPKVSLEASLHMTAREDGLTVIQPHSLSFINSEKPSGKIVYNITLPLHPNQGIIEHRDHPHSPIRYFTQEDINQGKVMYRPPPAAPHLQELMAFSFAGLPESVKFHFTVSDGEHTSPEMVLTIHLLPSDQQLPVFQVTAPRLAVSPGGSTSVGLQVVVRDAETAPKELFFELRRPPQHGVLLKHTAEFRRPMATGDTFTYEDVEKNALQYIHDGSSTREDSMEISVTDGLTVTMLEVRVEVSLSEDRGPRLAAGSSLSITVASKSTAIITRSHLAYVDDSSPDPEIWIQLNYLPSYGTLLRISGSEVEELSEVSNFTMEDINNKKIRYSAVFETDGHLVTDSFYFSVSDMDHNHLDNQIFTIMITPAENPPPVIAFADLITVDEGGRAPLSFHHFFATDDDDNLQRDAIIKLSALPKYGCIENTGTGDRFGPETASDLEASFPIQDVLENYIYYFQSVHESIEPTHDIFSFYVSDGTSRSEIHSINITIERKNDEPPRMTLQPLRVQLSSGVVISNSSLSLQDLDTPDNELIFVLTKKPDHGHVLWRQTASEPLENGRVLVQGSTFTYQDILAGLVGYVPSVPGMVVDEFQFSLTDGLHVDTGRMKIYTELPASDTPHLAINQGLQLSAGSVARITEQHLKVTDIDSDDHQVMYIMKEDPGAGRLQMMKHGNLEQISIKGPIRSFTQADISQGHVEYSHGTGEPGGSFAFKFDVVDGEGNRLIDKSFSISILEDKSPPVITTNKGLVLDENSVKKITTLQLSATDQDSGPTELIYRITRQPQLGHLEHAASPGIQISSFTQADLTSRNVQYVHSSEAEKHSDAFSFTLSDGVSEVTQTFHITLHPVDDSLPVVQNLGMRVQEGMRKTITEFELKAVDADTEAESVTFTIVQPPRHGTIERTSNGQHFHLTSTFTMKDIYQNRVSYSHDGSNSLKDRFTFTVSDGTNPFFIIEEGGKEIMTAAPQPFRVDILPVDDGTPRIVTNLGLQWLEYMDGKATNLITKKELLTMDPDTEDAQLVYEITTGPKHGFVENKLQPGRAAATFTQEDVNLGLIRYVLHKEKIREMMDSFQFLVKDSKPNVVSDNVFHIQWSLISFKYTSYNVSEKAGSVSVTVQRTGNLNQYAIVLCRTEQGTASSSSRVSSQPGQQDYVEYAGQVQFDEREDTKSCTIVINDDDVFENVESFTVELSMPAYALLGEFTQAKVIINDTEDEPTLEFDKKIYWVNESAGFLFAPIERKGDASSIVSAICYTVPKSAMGSSLYALESGSDFKSRGMSAASRVIFGPGVTMSTCDVMLIDDSEYEEEEEFEIALADASDNARIGRVATAKVLISGPNDASTVSLGNTAFTVSEDAGTVKIPVIRHGTDLSTFASVWCATRPSDPASATPGVDYVPSSRKVEFGPGVIEQYCTLTILDDTQYPVIEGLETFVVFLSSAQGAELTKPFQAVIAINDTFQDVPSMQFAKDLLLVKEKEGVLHVPITRSGDLSYESSVRCYTQSHSAQVMEDFEERQNADSSRITFLKGDKVKNCTVYIHDDSMFEPEEQFRVYLGLPLGNHWSGARIGKNNMATITISNDEDAPTIEFEEAAYQVREPAGPDAIAILNIKVIRRGDQNRTSKVRCSTRDGSAQSGVDYYPKSRVLKFSPGVDHIFFKVEILSNEDREWHESFSLVLGPDDPVEAVLGDVTTATVTILDQEAAGSLILPAPPIVVTLADYDHVEEVTKEGVKKSPSPGYPLVCVTPCDPHFPRYAVMKERCSEAGINQTSVQFSWEVAAPTDGNGARSPFETITDNTPFTSVNHMVLDSIYFSRRFHVRCVAKAVDKVGHVGTPLRSNIVTIGTDSAICHTPVVAGTSRGFQAQSFIATLKYLDVKHKEHPNRIHISVQIPHQDGMLPLISTMPLHNLHFLLSESIYRHQHVCSNLVTTYDLRGISEAGFLDDVVYDSTALGPGYDRPFQFDPSVREPKTIQLYKHLNLKSCVWTFDAYYDMTELIDVCGGSVTADFQVRDSAQSFLTVHVPLYVSYIYVTAPRGWASLEHHTEMEFSFFYDTVLWRTGIQTDSVLSARLQIIRIYIREDGRLVIEFKTHAKFRGQFVMEHHTLPEVKSFVLTPDHLGGIEFDLQLLWSAQTFDSPHQLWRATSSYNRKDYSGEYTIYLIPCTVQPTQPWVDPGEKPLACTAHAPERFLIPIAFQQTNRPVPVVYSLNTEFQLCNNEKVFLMDPNTSDMSLAEMDYKGAFSKGQILYGRVLWNPEQNLNSAYKLQLEKVYLCTGKDGYVPFFDPTGTIYNEGPQYGCIQPNKHLKHRFLLLDRNQPEVTDKYFHDVPFEAHFASELPDFHVVSNMPGVDGFTLKVDALYKVEAGHQWYLQVIYIIGPDTISGPRVQRSLTAPLRRNRRDLVEPDGQLILDDSLIYDNEGDQVKNGTNMKSLNLEMQELAVAASLSQTGASIGSALAAIMLLLLVFLVACFINRKCQKQRKKKPAEDILEEYPLNTKVEVPKRHPDRVEKNVNRHYCTVRNVNILSEPEAAYTFKGAKVKRLNLEVRVHNNLQDGTEV

SEQ ID NO: 217795 - protein, 737 aa, Artificial Sequence
  derived and/or modified sequence
MGVLKVWLGLALALAEFAVLPHHSEGACVYQDSLLADATIWKPDSCQSCRCHGDIVICKPAVCRNPQCAFEKGEVLQIAANQCCPECVLRTPGSCHHEKKIHEHGTEWASSPCSVCSCNHGEVRCTPQPCPPLSCGHQELAFIPEGSCCPVCVGLGKPCSYEGHVFQDGEDWRLSRCAKCLCRNGVAQCFTAQCQPLFCNQDETVVRVPGKCCPQCSARSCSAAGQVYEHGEQWSENACTTCICDRGEVRCHKQACLPLRCGKGQSRARRHGQCCEECVSPAGSCSYDGVVRYQDEMWKGSACEFCMCDHGQVTCQTGECAKVECARDEELIHLDGKCCPECISRNGYCVYEETGEFMSSNASEVKRIPEGEKWEDGPCKVCECRGAQVTCYEPSCPPCPVGTLALEVKGQCCPDCTSVHCHPDCLTCSQSPDHCDLCQDPTKLLQNGWCVHSCGLGFYQAGSLCLACQPQCSTCTSGLECSSCQPPLLMRHGQCVPTCGDGFYQDRHSCAVCHESCAGCWGPTEKHCLACRDPLHVLRDGGCESSCGKGFYNRQGTCSACDQSCDSCGPSSPRCLTCTEKTVLHDGKCMSECPGGYYADATGRCKVCHNSCASCSGPTPSHCTACSPPKALRQGHCLPRCGEGFYSDHGVCKACHSSCLACMGPAPSHCTGCKKPEEGLQVEQLSDVGIPSGECLAQCRAHFYLESTGICEGQNLDFCQNLEVISAVCLGISSTEN

SEQ ID NO: 217796 - protein, 317 aa, Artificial Sequence
  derived and/or modified sequence
MGVLKVWLGLALALAEFAVLPHHSEGACVYQDSLLADATIWKPDSCQSCRCHGDIVICKPAVCRNPQCAFEKGEVLQIAANQCCPECVLRTPGSCHHEKKIHEHGTEWASSPCSVCSCNHGEVRCTPQPCPPLSCGHQELAFIPEGSCCPVCVGLGKPCSYEGHVFQDGEDWRLSRCAKCLCRNGVAQCFTAQCQPLFCNQDETVVRVPGKCCPQCSARSCSAAGQVYEHGEQWSENACTTCICDRGEVRCHKQACLPLRCGKGQSRARRHGQCCEECVSPALASQSVGITGMSHHAQSLLGPFLTQIKKPHFSCLE

SEQ ID NO: 217797 - protein, 255 aa, Artificial Sequence
  derived and/or modified sequence
ERQGQSRARRHGQCCEECVSPAGSCSYDGVVRYQDEMWKGSACEFCMCDHGQVTCQTGECAKVECARDEELIHLDGKCCPECISRNGYCVYEETGEFMSSNASEVKRIPEGEKWEDGPCKVCECRGAQVTCYEPSCPPCPVGTLALEVKGQCCPDCTSVHCHPDCLTCSQSPDHCDLCQDPTKLLQNGWCVHSCGLGFYQAGSLCLDDGFSLPAPVLHVYQWAGVLILPASPADAARAVCAYLWGRLLPRSPFLC

SEQ ID NO: 217798 - protein, 1976 aa, Artificial Sequence
  derived and/or modified sequence
MGVLKVWLGLALALAEFAVLPHHSEGACVYQDSLLADATIWKPDSCQSCRCHGDIVICKPAVCRNPQCAFEKGEVLQIAANQCCPECVLRTPGSCHHEKKIHEHGTEWASSPCSVCSCNHGEVRCTPQPCPPLSCGHQELAFIPEGSCCPVCVGLGKPCSYEGHVFQDGEDWRLSRCAKCLCRNGVAQCFTAQCQPLFCNQDETVVRVPGKCCPQCSARSCSAAGQVYEHGEQWSENACTTCICDRGEVRCHKQACLPLRCGKGQSRARRHGQCCEECVSPAGSCSYDGVVRYQDEMWKGSACEFCMCDHGQVTCQTGECAKVECARDEELIHLDGKCCPECISRNGYCVYEETGEFMSSNASEVKRIPEGEKWEDGPCKVCECRGAQVTCYEPSCPPCPVGTLALEVKGQCCPDCTSVHCHPDCLTCSQSPDHCDLCQDPTKLLQNGWCVHSCGLGFYQAGSLCLACQPQCSTCTSGLECSSCQPPLLMRHGQCVPTCGDGFYQDRHSCAVCHESCAGCWGPTEKHCLACRDPLHVLRDGGCESSCGKGFYNRQGTCSACDQSCDSCGPSSPRCLTCTEKTVLHDGKCMSECPGGYYADATGRCKVCHNSCASCSGPTPSHCTACSPPKALRQGHCLPRCGEGFYSDHGVCKACHSSCLACMGPAPSHCTGCKKPEEGLQVEQLSDVGIPSGECLAQCRAHFYLESTGICEACHQSCFRCAGKSPHNCTDCGPSHVLLDGQCLSQCPDGYFHQEGSCTECHPTCRQCHGPLESDCISCYPHISLTNGNCRTSCREEQFLNLVGYCADCHHLCQHCAADLHNTGSICLRCQNAHYLLLGDHCVPDCPSGYYAERGACKKCHSSCRTCQGRGPFSCSSCDTNLVLSHTGTCSTTCFPGHYLDDNHVCQPCNTHCGSCDSQASCTSCRDPNKVLLFGECQYESCAPQYYLDFSTNTCKECDWSCSACSGPLKTDCLQCMDGYVLQDGACVEQCLSSFYQDSGLCKNCDSYCLQCQGPHECTRCKGPFLLLEAQCVQECGKGYFADHAKHKCTACPQGCLQCSHRDRCHLCDHGFFLKSGLCVYNCVPGFSVHTSNETCSGKIHTPSLHVNGSLILPIGSIKPLDFSLLNVQDQEGRVEDLLFHVVSTPTNGQLVLSRNGKEVQLDKAGRFSWKDVNEKKVRFVHSKEKLRKGYLFLKISDQQFFSEPQLINIQAFSTQAPYVLRNEVLHISRGERATITTQMLDIRDDDNPQDVVIEIIDPPLHGQLLQTLQSPATPIYQFQLDELSRGLLHYAHDGSDSTSDVAVLQANDGHSFHNILFQVKTVPQNDRGLQLVANSMVWVPEGGMLQITNRILQAEAPGASAEEIIYKITQDYPQFGEVVLLVNMPADSPADEGQHLPDGRTATPTSTFTQQDINEGIVWYRHSGAPAQSDSFRFEVSSASNAQTRLESHMFNIAILPQTPEAPKVSLEASLHMTAREDGLTVIQPHSLSFINSEKPSGKIVYNITLPLHPNQGIIEHRDHPHSPIRYFTQEDINQGKVMYRPPPAAPHLQELMAFSFAGLPESVKFHFTVSDGEHTSPEMVLTIHLLPSDQQLPVFQVTAPRLAVSPGGSTSVGLQVVVRDAETAPKELFFELRRPPQHGVLLKHTAEFRRPMATGDTFTYEDVEKNALQYIHDGSSTREDSMEISVTDGLTVTMLEVRVEVSLSEDRGPRLAAGSSLSITVASKSTAIITRSHLAYVDDSSPDPEIWIQLNYLPSYGTLLRISGSEVEELSEVSNFTMEDINNKKIRYSAVFETDGHLVTDSFYFSVSDMDHNHLDNQIFTIMITPAENPPPVIAFADLITVDEGGRAPLSFHHFFATDDDDNLQRDAIIKLSALPKYGCIENTGTGDRFGPETASDLEASFPIQDVLENYIYYFQSVHESIEPTHDIFSFYVSDGTSRSEIHSINITIEVKTLEVGKVEPLTTIFHTIRELSL

SEQ ID NO: 217799 - DNA, 12479 bp, Artificial Sequence
  derived and/or modified sequence
aactttaaaaagctgcttcggacaaaccagagccaggatttccactgtcggggacccgggatcggaagggtctagcccgagggaaatgctggaagatcccatcggccagtgaccagcaactttccggcgagattttgacgcggagaactgtgctctgcctcctcttattctcccaaagctcacgttggcgtcctgccttgcgggggaactcggcgcgctctctgcctgagcagcgagtgaattgaaccccagcccgctccggcgcctccgggctgatgagtgtcgctctccgcccgtccatctctttttcccggaggtaaaggcccgcggtcccccaccttcagtgcgcccgggttccaagcgccggagccagcgttttggcggagccgcttcttggatgctgaaggctgggctcctccatcgtgggtgccgaggcggcgatgggtgtcctcaaagtgtggctcgggctggccctagcgttggcggaatttgcagtattgcctcatcattccgaaggtgcttgtgtctatcaggattccttgttggcggatgccacaatttggaagcccgattcatgccagagctgccgttgccatggtgatattgttatctgcaaacctgctgtttgcagaaaccctcaatgtgcctttgagaagggagaagtgcttcaaatagctgccaaccaatgctgtcctgagtgtgttttgaggactccaggatcttgccatcatgaaaagaaaatccatgagcatgggacagaatgggcctcttctccatgtagtgtgtgctcttgcaatcatggggaagtccgatgtaccccccaaccatgcccaccgctgtcatgtggacaccaggagctggcattcatccctgaaggaagctgctgcccagtttgtgtgggccttgggaaaccctgttcctatgaaggccatgtgtttcaggatggggaggactggcggctgagccggtgtgccaaatgtctgtgtagaaatggggttgcccagtgcttcacagctcagtgtcagcctctattttgtaaccaggatgagactgtagtccgagtccctggaaaatgttgcccgcagtgctctgcaagatcctgctctgcagctggccaagtatacgagcatggtgagcagtggagcgaaaatgcctgcaccacgtgtatatgtgaccggggtgaggtcaggtgtcacaagcaggcctgcctgcccctgagatgcggaaagggtcagagcagggctcggcgtcatgggcaatgctgtgaggaatgtgtgtctcctgccgggagctgctcctatgatggagttgtgcggtaccaggacgaaatgtggaagggctcggcctgtgagttctgcatgtgtgatcatggccaagtgacctgccagactggagagtgtgccaaagtggagtgtgcccgggatgaagaattaattcacttagatggaaagtgttgtcctgaatgcatttcaaggaatggttattgtgtttatgaagaaactggagaatttatgtcatcaaatgctagtgaagttaaacgtattccagagggagagaagtgggaagatggcccttgcaaggtgtgtgagtgccgaggggctcaggtaacttgctacgagccctcttgcccaccatgtccagtgggcacactggccttagaggtgaagggacagtgctgtccagactgcacatcagttcattgccatccagattgtttgacatgctctcagtctccagaccactgtgacctctgccaagatcctaccaagttactgcagaatggatggtgtgtgcacagctgtggactgggtttttaccaagctggcagtctctgtttagcctgccagccccagtgctccacgtgtaccagtgggctggagtgctcatcctgccagcctcccctgctgatgcggcacgggcagtgtgtgcctacctgtggggacggcttctaccaagatcgccattcctgtgcagtctgccatgagtcctgtgcaggttgctggggcccaacggagaagcactgcttggcctgcagagatcccctccacgtgctgagagatggcggctgtgagagcagctgtggaaaaggcttctacaacaggcagggcacctgtagcgcttgtgaccaatcctgtgacagttgtggccccagtagccccaggtgtcttacctgtactgagaagacagtgctgcatgatgggaaatgcatgtctgaatgccctggcgggtactatgctgatgccactggcaggtgcaaagtttgtcataactcatgtgccagctgctctgggcccacaccctctcactgtacagcctgcagcccccccaaggctctgcgtcaaggccactgtctgccccgctgtggagagggtttctactctgaccatggagtctgcaaagcctgtcactcctcctgcctggcttgtatgggtcccgcaccctctcactgtactgggtgtaagaagccagaggaaggactgcaagtggagcagctgtctgacgtgggcatcccctctggcgagtgtctagcccagtgtagagcccatttttacttggagagcactggcatatgtgaagcttgccaccagtcctgtttcagatgtgcagggaaaagcccacataactgcacagactgtgggccttcccatgtgctgttggatgggcagtgcctctcccagtgcccagatggctactttcaccaggaaggtagttgcacagagtgtcacccaacctgcaggcagtgtcatgggccgttggagtctgactgcatctcctgttaccctcacatctctcttaccaatggtaactgcaggaccagctgcagggaagagcagttcctcaacctcgtgggatactgtgctgactgccatcacctgtgccagcactgtgcagctgatctccacaacactgggagcatctgcctcaggtgccagaatgcccactacctgctgctcggggaccactgtgttcctgactgcccttcaggatactatgcagagagaggagcttgtaaaaaatgccactcctcctgcagaacctgccagggcagaggacctttctcctgctcctcatgtgacaccaacctcgtgctgtcccacactggcacctgcagcaccacctgcttccctgggcactatcttgatgacaatcatgtttgccagccatgcaacacacactgtggaagctgtgattcacaggccagctgtacctcctgccgagatccaaacaaggttctgctctttggggaatgtcaatacgagagctgcgccccacagtactatcttgacttctccaccaacacgtgcaaagagtgtgattggagctgcagtgcatgcagtgggcccctgaaaacagactgcctgcagtgcatggatggctatgttctccaggatggggcctgcgtggagcagtgcttgtcatcattttaccaggactcgggcctctgcaagaactgtgacagctactgtctccagtgccaaggtccccatgagtgtacccgctgcaaagggccatttctcctcttggaagcccagtgtgtccaggaatgtgggaaggggtactttgcagatcatgcaaagcacaaatgcacagcctgccctcaggggtgcttgcagtgcagccacagggaccgttgtcacctctgtgaccatgggttctttctgaagagtggcctctgtgtttacaactgtgttcctggcttttctgtccacacctctaatgaaacatgttctggcaaaatacacacccctagtcttcatgtgaatggttccctgatcctcccaattggttcaataaagccactggatttttccctcctgaatgtccaagaccaggagggtagggtcgaagatctcctatttcatgttgtgagcactcccaccaatggtcagctagtgctctcaagaaatggaaaagaggttcagctggacaaggctggccgttttagctggaaagatgtgaacgagaagaaagtgcgttttgtgcacagcaaagaaaaactcaggaaaggttaccttttcctgaaaattagtgaccagcagttcttctctgagccacagctgatcaacatacaagcattttcaacacaggccccctatgtgctgagaaatgaagttctccacattagcagaggagagagggcaaccatcaccacccagatgcttgacatccgagatgatgacaacccacaggatgtggtcattgaaataatcgatcctccacttcatggccaattgcttcagacacttcagtccccggcaacccctatctatcaattccagctggatgaactctctagaggccttctccactatgctcatgatggttcagacagcacatccgatgttgcagtcttgcaggccaatgatggacactccttccataatatactgttccaagtgaagaccgtgcctcagaatgacaggggtcttcagcttgtggctaattcgatggtgtgggttccagaaggggggatgctgcagatcaccaacagaatcttacaggccgaggctcctggtgccagtgctgaagaaatcatctacaagattacacaagactacccccagtttggggaggtggtccttctagtgaatatgcctgcagacagccctgcagatgaagggcagcacctgcctgatgggaggacagctacccccaccagcaccttcacccagcaggacatcaatgaaggcatcgtatggtacaggcactcaggagccccagcccagagcgactccttccgcttcgaggtgtccagtgcctccaatgcccagacccgcctggagagccacatgttcaacatcgcgatcttaccacagacacctgaagcacctaaagtgtctctggaagcatctctccatatgactgctagagaagatggcctgactgttattcagcctcattccctctccttcataaactctgagaagccaagtggaaagattgtctacaacatcactctacctctgcatccaaatcaaggtatcatcgagcaccgggaccaccctcactctcctatccggtatttcacgcaagaggatattaaccagggcaaagtcatgtaccgccctcccccggcagcaccccacctccaggagctcatggccttctcgttcgctggtctcccagaatcagtgaaattccacttcacagtttcagatggagaacacacaagtccggagatggtcctcaccattcacttacttcccagtgatcagcaactgccagtgttccaggtcacagctccacggctggcggtcagcccaggaggcagcacttctgtaggacttcaggtggtagtaagagatgctgagacagcgcccaaagaactcttctttgagcttcggagacctccacagcatggtgtgcttcttaagcatacagctgagttccgaaggccgatggccacaggtgacactttcacctatgaggatgttgagaaaaatgctctacagtatatacatgatggttcctctacccgggaagacagcatggagatctcagtcacagatggcctcacagtgacaatgctggaggtgagagtagaggtgtccctgtcagaagaccgagggcctcgactggctgctggctcctctctgagcattactgttgccagtaaaagcacagccataatcactaggtcacaccttgcttacgtggatgattcttcccccgacccagagatctggattcagttaaattatctgccctcatatggtactctcttaagaatctcaggatctgaggtggaagagctctcagaagtttccaatttcacaatggaagacatcaataacaagaaaatcagatactcagctgtgtttgaaactgatggtcatctggttactgatagcttctatttctctgtctctgacatggaccacaaccatctggataatcagatatttaccatcatgatcactcctgctgaaaatccacctccagtcattgcttttgctgaccttatcacggttgatgagggagggagagcaccactctcatttcaccatttttttgctactgatgatgatgacaacctccagagagatgccatcattaaactaagtgctctgcccaaatatggctgcattgagaacacaggaacaggtgatcgttttggccctgaaactgccagtgacctagaggcatcatttcctattcaagacgtcctggaaaactacatttactactttcagagtgttcatgaaagcattgagccaacccatgatatttttagtttttatgtgagtgatggaaccagtcgttcagaaattcacagcatcaatatcaccattgagaggaagaacgatgagcctcccaggatgaccttgcagcccctcagagtgcagctgagctcgggagtggtgataagcaattcttctttgagcctgcaagacctggacaccccagataatgagctcatttttgtattgacaaaaaagcctgaccacggtcatgtactctggaggcaaactgcttctgagcctctggagaatgggagagttttagtccagggctcaaccttcacctaccaggatatcctagctgggctggttgggtatgtgcctagtgtccctggcatggtcgtggatgagttccagttctccctcactgatggcctccacgtggacacagggaggatgaagatctacacagaactgcctgcaagtgacacacctcacttggctataaaccaaggcctacagctctcagcagggtctgtagcacgcatcacagaacagcacttgaaagtgacagatattgactcagatgaccatcaggttatgtacatcatgaaggaagatcctggtgcagggcgcctgcagatgatgaagcatggcaacctggagcaaatttctattaaaggccccatccgaagtttcacccaggcagacattagccaaggccacgtagaatatagtcatggaacaggagaacctggagggagctttgcttttaaatttgatgtggttgatggagaaggcaacagattgattgacaagtcattttccatcagcattctagaagacaaatccccaccagtcatcaccaccaataaaggactggtcttggatgaaaactcagtgaagaaaatcaccaccctgcagctgtctgccactgaccaggacagtgggcctacagaattgatctacagaatcaccagacagccccagctgggccacttggaacatgcagcatcaccaggtatccagattagttcctttactcaagctgatctgacttcacgaaatgttcagtatgtccattctagtgaggctgagaaacattcagatgccttcagctttacactgtctgatggagtcagtgaggtgactcagactttccatatcactcttcaccctgtcgatgattcgctgcccgtcgtacagaacttaggaatgcgggtgcaggagggcatgaggaagaccatcacagagtttgagcttaaggcggtggatgctgacacagaggccgagtctgtcacattcaccatcgtgcagcctccacgccatggcaccatcgagcgaaccagcaatgggcagcatttccacctcacctccaccttcaccatgaaagatatctaccagaaccgggtcagctacagccatgacggcagtaactccctcaaggaccggttcaccttcactgtttctgatgggacaaaccccttctttatcattgaggaagggggaaaagagattatgacagcagcacctcagccgttccgagtagacatcctcccggtagatgatggcacgcctagaattgtcaccaacctgggactccagtggctggaatacatggatggcaaggcaaccaacctgatcaccaagaaggaactgctgaccatggacccagacaccgaggacgcgcagcttgtctatgagataacgacgggccctaagcatggctttgtggagaacaagctgcagcctggcagagctgctgccactttcacccaggaggatgtgaacttggggttgattcgttatgtgttgcacaaggagaagatccgtgagatgatggatagttttcagtttctggtgaaagacagtaaacccaatgtggtcagcgacaatgtcttccatatccagtggtcactcatcagctttaaatataccagctacaatgtcagtgagaaggcagggtctgtcagtgtcacggtgcagaggactgggaacctgaaccaatatgccatcgtcctgtgtcgcaccgagcaaggcaccgccagctccagctccagggtcagctcccaacctgggcaacaggactatgtagagtatgctggccaggtccagtttgatgagcgagaggacaccaagtcctgcaccattgtcatcaacgatgatgacgtgtttgaaaatgttgagagtttcactgtggagctcagcatgccagcttatgccctgttaggggaattcacccaggcgaaggtcattatcaacgataccgaggatgaacccacattagagtttgacaagaagatctactgggttaacgagagcgctggttttctgtttgcacctattgaaagaaaaggagatgcaagcagcattgtatctgcaatttgctacacagtccctaagtcagctatgggaagtagcctctatgctctagaatcaggctctgattttaaatctagagggatgtctgccgcgagtcgtgtgatattcgggcctggtgtgaccatgtccacctgtgatgtcatgcttattgatgacagcgagtatgaagaggaagaagagtttgagattgccttggcagatgcctctgacaatgcccgcattggaagggtggcgacagccaaggtgctcattagtggtcccaacgatgcctcgactgtgtccctgggcaacacggctttcactgtcagtgaggacgcaggcacagtaaagattccagttatccgccatggtactgacctctctactttcgcatctgtctggtgtgcaacgcggccctcagacccagcttctgccacaccaggagttgactacgttcccagctctcggaaggtggaatttgggcctggtgtcattgaacagtattgcaccttgactatcttggatgacactcagtatccggtaattgaaggactggagacatttgtggttttcctcagctcagcacaaggagccgaactgaccaaacccttccaggcagtcattgcaattaatgacacattccaagatgtgcccagcatgcagtttgccaaggatttgctcctagtgaaggagaaggagggtgtcctgcatgtccctatcactcggagcggagacctgagctatgagtcatcagtgaggtgctatactcagagccattccgctcaggtcatggaggactttgaggagagacaaaatgcagactcttcacggattacatttctcaaaggggacaaagtgaagaactgtacggtctatatccacgatgactccatgtttgagccagaggaacagttcagggtctacctcggccttcctcttggaaaccactggagtggagctagaattggaaagaataacatggccaccatcaccatatccaatgatgaagatgcccccaccattgagtttgaagaagctgcataccaagtccgggaacccgcaggcccagatgccattgcgattctgaacatcaaggtgatccgcagaggggatcagaacaggacctccaaggttcgctgcagcacgcgggatggctctgcccagtctggtgtggattattacccaaagagccgagtcttgaagttcagtcccggtgtggatcatatcttttttaaagttgagatcctgtccaatgaagaccgggaatggcatgaatctttctcactagtccttggcccagatgacccagtggaagcagttcttggggatgtgactactgccacggtgacaattctagaccaggaggcagcagggagcctcatattgccagcaccacccattgtggtcacacttgctgactatgaccatgtggaagaagttaccaaggaaggagtcaagaaatccccctccccaggctacccactggtctgtgtcaccccctgcgaccctcatttccccagatacgctgtcatgaaggagcgctgcagtgaggccggcatcaaccagacatctgtgcagttcagctgggaagtggctgcccccactgatggcaatggggcccggtctccctttgaaaccatcactgacaacacaccattcaccagtgtcaaccacatggtcctggacagcatttacttcagccggaggttccatgtgcgttgtgtggccaaggctgtggacaaggtgggccatgtggggacccccttaaggagcaacattgttaccattggaacagacagtgctatctgccacacaccagtggtggctgggacatccagaggcttccaggctcagtccttcatcgcaaccttgaaatacctggatgtcaaacataaggagcatccgaacagaatccacatttcggtgcagatcccacaccaggatggaatgctgccccttatctccaccatgccgttgcacaacttacattttctactgtctgagtccatctacagacaccagcacgtctgctccaatttagttaccacctatgacctgagaggcatctcagaggcagggttcctggatgatgtggtctatgatagcactgccctggggcctggctacgatcgccccttccagtttgaccccagcgtgcgagagccgaagaccatccagctctacaaacacctgaacctgaagagctgcgtgtggacctttgatgcttattatgacatgactgagctgattgacgtctgtgggggctctgtaaccgctgacttccaggtgagggactctgcccagtccttcttgacagtgcacgtgcctctatatgtgtcctacatctatgtgacagcccccaggggctgggcctccttggagcaccacaccgagatggagttttctttcttctatgacactgttctctggagaacaggaatccagacagacagcgtgctctctgcaaggcttcagataataagaatctacattcgagaggatggccgtcttgtcattgaattcaagacccatgccaaattcagaggacagtttgtgatggagcatcacactctcccagaagtgaaatctttcgtattgactccagaccacctaggaggaattgaatttgacttgcagctattatggagcgctcagacttttgattctccacatcaactctggagagccacaagctcttataacaggaaggactactcaggagagtacaccatctacctgatcccttgcacagtgcagcccacacagccatgggttgacccaggagagaagcctttggcctgcactgcacatgccccagaaagattcctgatacccattgcattccagcagaccaaccgccctgtgccagttgtgtattcacttaacactgaatttcagctctgcaataatgagaaggtgttcctaatggatcccaatacatctgatatgtcactagcagaaatggattacaaaggagccttttcaaaaggtcaaatcctttatggccgagtactttggaatccagaacaaaatcttaattctgcttacaaactccagctggagaaagtctatctttgtacgggcaaggatggttatgtgcctttctttgatcccacggggacaatctacaatgaagggccccagtatggatgcattcagccaaacaaacacctaaaacacagattcctgctgttggaccgcaatcagccagaggtaactgataagtacttccatgatgtgccttttgaggctcactttgcctctgagttgcctgatttccatgtggtcagtaacatgccaggtgtggatggatttactctaaaagtagatgcactctataaggtggaagcaggacaccagtggtatctccaggtcatctacatcattggccctgacaccatctcagggccccgggtccagcgctctctcacagctccactcagacgcaaccgaagggacctggtagagcccgatggccagctgatccttgatgattccctcatctatgacaatgaaggagaccaagtcaagaatggcaccaatatgaagtccctgaatctggagatgcaagagttggcggtagctgcgtccctgtcacagactggggcgtccattggcagtgccctggctgcaatcatgcttctacttctggtgtttttggtggcttgttttatcaacaggaaatgccagaaacagaggaagaagaagcccgcagaggacattttggaagaatatcctctgaataccaaggtagaagtgcccaagaggcacccggaccgggtggagaagaacgtgaatagacactactgcactgtgcggaacgtcaacatcctgagtgagcctgaggcggcttacacgttcaaaggtgctaaagtcaaaagactgaatctagaagtcagagttcacaacaatttacaagatggaacagaagtttaa

SEQ ID NO: 217800 - DNA, 9869 bp, Artificial Sequence
  derived and/or modified sequence
ctcagaagtttccaatttcacaatggaagacatcaataacaagaaaatcagatactcagctgtgtttgaaactgatggtcatctggttactgatagcttctatttctctgtctctgacatggaccacaaccatctggataatcagatatttaccatcatgatcactcctgctgaaaatccacctccagtcattgcttttgctgaccttatcacggttgatgagggagggagagcaccactctcatttcaccatttttttgctactgatgatgatgacaacctccagagagatgccatcattaaactaagtgctctgcccaaatatggctgcattgagaacacaggaacaggtgatcgttttggccctgaaactgccagtgacctagaggcatcatttcctattcaagacgtcctggaaaactacatttactactttcagagtgttcatgaaagcattgagccaacccatgatatttttagtttttatgtgagtgatggaaccagtcgttcagaaattcacagcatcaatatcaccattgagaggaagaacgatgagcctcccaggatgaccttgcagcccctcagagtgcagctgagctcgggagtggtgataagcaattcttctttgagcctgcaagacctggacaccccagataatgagctcatttttgtattgacaaaaaagcctgaccacggtcatgtactctggaggcaaactgcttctgagcctctggagaatgggagagttttagtccagggctcaaccttcacctaccaggatatcctagctgggctggttgggtatgtgcctagtgtccctggcatggtcgtggatgagttccagttctccctcactgatggcctccacgtggacacagggaggatgaagatctacacagaactgcctgcaagtgacacacctcacttggctataaaccaaggcctacagctctcagcagggtctgtagcacgcatcacagaacagcacttgaaagtgacagatattgactcagatgaccatcaggttatgtacatcatgaaggaagatcctggtgcagggcgcctgcagatgatgaagcatggcaacctggagcaaatttctattaaaggccccatccgaagtttcacccaggcagacattagccaaggccacgtagaatatagtcatggaacaggagaacctggagggagctttgcttttaaatttgatgtggttgatggagaaggcaacagattgattgacaagtcattttccatcagcattctagaagacaaatccccaccagtcatcaccaccaataaaggactggtcttggatgaaaactcagtgaagaaaatcaccaccctgcagctgtctgccactgaccaggacagtgggcctacagaattgatctacagaatcaccagacagccccagctgggccacttggaacatgcagcatcaccaggtatccagattagttcctttactcaagctgatctgacttcacgaaatgttcagtatgtccattctagtgaggctgagaaacattcagatgccttcagctttacactgtctgatggagtcagtgaggtgactcagactttccatatcactcttcaccctgtcgatgattcgctgcccgtcgtacagaacttaggaatgcgggtgcaggagggcatgaggaagaccatcacagagtttgagcttaaggcggtggatgctgacacagaggccgagtctgtcacattcaccatcgtgcagcctccacgccatggcaccatcgagcgaaccagcaatgggcagcatttccacctcacctccaccttcaccatgaaagatatctaccagaaccgggtcagctacagccatgacggcagtaactccctcaaggaccggttcaccttcactgtttctgatgggacaaaccccttctttatcattgaggaagggggaaaagagattatgacagcagcacctcagccgttccgagtagacatcctcccggtagatgatggcacgcctagaattgtcaccaacctgggactccagtggctggaatacatggatggcaaggcaaccaacctgatcaccaagaaggaactgctgaccatggacccagacaccgaggacgcgcagcttgtctatgagataacgacgggccctaagcatggctttgtggagaacaagctgcagcctggcagagctgctgccactttcacccaggaggatgtgaacttggggttgattcgttatgtgttgcacaaggagaagatccgtgagatgatggatagttttcagtttctggtgaaagacagtaaacccaatgtggtcagcgacaatgtcttccatatccagtggtcactcatcagctttaaatataccagctacaatgtcagtgagaaggcagggtctgtcagtgtcacggtgcagaggactgggaacctgaaccaatatgccatcgtcctgtgtcgcaccgagcaaggcaccgccagctccagctccagggtcagctcccaacctgggcaacaggactatgtagagtatgctggccaggtccagtttgatgagcgagaggacaccaagtcctgcaccattgtcatcaacgatgatgacgtgtttgaaaatgttgagagtttcactgtggagctcagcatgccagcttatgccctgttaggggaattcacccaggcgaaggtcattatcaacgataccgaggatgaacccacattagagtttgacaagaagatctactgggttaacgagagcgctggttttctgtttgcacctattgaaagaaaaggagatgcaagcagcattgtatctgcaatttgctacacagtccctaagtcagctatgggaagtagcctctatgctctagaatcaggctctgattttaaatctagagggatgtctgccgcgagtcgtgtgatattcgggcctggtgtgaccatgtccacctgtgatgtcatgcttattgatgacagcgagtatgaagaggaagaagagtttgagattgccttggcagatgcctctgacaatgcccgcattggaagggtggcgacagccaaggtgctcattagtggtcccaacgatgcctcgactgtgtccctgggcaacacggctttcactgtcagtgaggacgcaggcacagtaaagattccagttatccgccatggtactgacctctctactttcgcatctgtctggtgtgcaacgcggccctcagacccagcttctgccacaccaggagttgactacgttcccagctctcggaaggtggaatttgggcctggtgtcattgaacagtattgcaccttgactatcttggatgacactcagtatccggtaattgaaggactggagacatttgtggttttcctcagctcagcacaaggagccgaactgaccaaacccttccaggcagtcattgcaattaatgacacattccaagatgtgcccagcatgcagtttgccaaggatttgctcctagtgaaggagaaggagggtgtcctgcatgtccctatcactcggagcggagacctgagctatgagtcatcagtgaggtgctatactcagagccattccgctcaggtcatggaggactttgaggagagacaaaatgcagactcttcacggattacatttctcaaaggggacaaagtgaagaactgtacggtctatatccacgatgactccatgtttgagccagaggaacagttcagggtctacctcggccttcctcttggaaaccactggagtggagctagaattggaaagaataacatggccaccatcaccatatccaatgatgaagatgcccccaccattgagtttgaagaagctgcataccaagtccgggaacccgcaggcccagatgccattgcgattctgaacatcaaggtgatccgcagaggggatcagaacaggacctccaaggttcgctgcagcacgcgggatggctctgcccagtctggtgtggattattacccaaagagccgagtcttgaagttcagtcccggtgtggatcatatcttttttaaagttgagatcctgtccaatgaagaccgggaatggcatgaatctttctcactagtccttggcccagatgacccagtggaagcagttcttggggatgtgactactgccacggtgacaattctagaccaggaggcagcagggagcctcatattgccagcaccacccattgtggtcacacttgctgactatgaccatgtggaagaagttaccaaggaaggagtcaagaaatccccctccccaggctacccactggtctgtgtcaccccctgcgaccctcatttccccagatacgctgtcatgaaggagcgctgcagtgaggccggcatcaaccagacatctgtgcagttcagctgggaagtggctgcccccactgatggcaatggggcccggtctccctttgaaaccatcactgacaacacaccattcaccagtgtcaaccacatggtcctggacagcatttacttcagccggaggttccatgtgcgttgtgtggccaaggctgtggacaaggtgggccatgtggggacccccttaaggagcaacattgttaccattggaacagacagtgctatctgccacacaccagtggtggctgggacatccagaggcttccaggctcagtccttcatcgcaaccttgaaatacctggatgtcaaacataaggagcatccgaacagaatccacatttcggtgcagatcccacaccaggatggaatgctgccccttatctccaccatgccgttgcacaacttacattttctactgtctgagtccatctacagacaccagcacgtctgctccaatttagttaccacctatgacctgagaggcatctcagaggcagggttcctggatgatgtggtctatgatagcactgccctggggcctggctacgatcgccccttccagtttgaccccagcgtgcgagagccgaagaccatccagctctacaaacacctgaacctgaagagctgcgtgtggacctttgatgcttattatgacatgactgagctgattgacgtctgtgggggctctgtaaccgctgacttccaggtgagggactctgcccagtccttcttgacagtgcacgtgcctctatatgtgtcctacatctatgtgacagcccccaggggctgggcctccttggagcaccacaccgagatggagttttctttcttctatgacactgttctctggagaacaggaatccagacagacagcgtgctctctgcaaggcttcagataataagaatctacattcgagaggatggccgtcttgtcattgaattcaagacccatgccaaattcagaggacagtttgtgatggagcatcacactctcccagaagtgaaatctttcgtattgactccagaccacctaggaggaattgaatttgacttgcagctattatggagcgctcagacttttgattctccacatcaactctggagagccacaagctcttataacaggaaggactactcaggagagtacaccatctacctgatcccttgcacagtgcagcccacacagccatgggttgacccaggagagaagcctttggcctgcactgcacatgccccagaaagattcctgatacccattgcattccagcagaccaaccgccctgtgccagttgtgtattcacttaacactgaatttcagctctgcaataatgagaaggtgttcctaatggatcccaatacatctgatatgtcactagcagaaatggattacaaaggagccttttcaaaaggtcaaatcctttatggccgagtactttggaatccagaacaaaatcttaattctgcttacaaactccagctggagaaagtctatctttgtacgggcaaggatggttatgtgcctttctttgatcccacggggacaatctacaatgaagggccccagtatggatgcattcagccaaacaaacacctaaaacacagattcctgctgttggaccgcaatcagccagaggtaactgataagtacttccatgatgtgccttttgaggctcactttgcctctgagttgcctgatttccatgtggtcagtaacatgccaggtgtggatggatttactctaaaagtagatgcactctataaggtggaagcaggacaccagtggtatctccaggtcatctacatcattggccctgacaccatctcagggccccgggtccagcgctctctcacagctccactcagacgcaaccgaagggacctggtagagcccgatggccagctgatccttgatgattccctcatctatgacaatgaaggagaccaagtcaagaatggcaccaatatgaagtccctgaatctggagatgcaagagttggcggtagctgcgtccctgtcacagactggggcgtccattggcagtgccctggctgcaatcatgcttctacttctggtgtttttggtggcttgttttatcaacaggaaatgccagaaacagaggaagaagaagcccgcagaggacattttggaagaatatcctctgaataccaaggtagaagtgcccaagaggcacccggaccgggtggagaagaacgtgaatagacactactgcactgtgcggaacgtcaacatcctgagtgagcctgaggcggcttacacgttcaaaggtgctaaagtcaaaagactgaatctagaagtcagagttcacaacaatttacaagatggaacagaagtttaatggaggagacctatgtgtatttttttctaaaatcatttttataaaatggggggaaatactggtatttttataatctcgcagataaaaaagggaaaactatagctttgagtggcagacagcacacatcacatgcatcaactcacaactgagctacctcattcagcaaagaaccactgagaaccccagagtattacagttatttccgtagatccctttaatagtgtcaacaactgtacacagctccttctgtaaggctggtcttagaaaacaagtactttagtatcaggacaggagttgaacaattaggttagcagatggagatgagaggactgggtagagtaccatggcagatctcagagagaagaagtaggtacgggcctttggttccctcccccagccccagctttctcctacagggcttttcctgagtccccagacagcagagtatgaactgctgacacccagattccattaaaaattctgctaatcgacacaacacatatatttgctcatgatttcacttgacagcgtatgctccttggcctctaattgtactttgcttttccagagccctttttacctggggatttcagtgtgcttaagtaaaatcctctgaaaaccacgggagcctctgcctcctcagccacagagaactccctcctacaaagggggagactgaaacccgagttaaggaggggcctggcaggcgtatcagagcacattagtgatgcccttcaccccagggaggtgtctgttcccaactagtttatgtggcactgagacatccatccctgaccaaggatgctgcgaaacaggatcaatgtactacggccttttaattcaacattgccataaatgctttaaagaaaacccaccacactttcctcctactccggtctttgcccgttcctgtaacagacaatcccatgtcctaggtatggttttttattctgttagtgcttcgggaaagtaagtgattcatttgaataaggcaaattaggagaaagcccaggttggggtgaaatcagacttaacagatacatgctggttctccttgctgtgtgtgacacagcagacagaggcactattcctggtgcagtatttcagggatttctctttgaggggttcttttctggtagctcaggcaattatttttaccatatcagcacatgacaaggccatgaacacatggctctaaaataatttagtgttcaagtatcagcttaactattttgtgtaggctacacacagcttgcttttgtttctcttctgtttctgccttattggcggaaacataagcgtgcatgccatgttgttttgaattggaggcacaatttcattattcgagagtaaaagacatgtcctcttctgatgcatggcacaccatagtcaccaagcaaataacagagccttcacattgtgtaatatttgtatgagaatgactcaagctctttgagaacattccaaactagtaacatttcgctactaaaagctagaaaggatgaactgtgaaaggttctaggcagctctgtgagactccaagctccttgaaagtaggacctttgtgagccacgcctttcattcttcaacagtgccttgcatgtaacaagcactccagaaatgtttgttgaatgaatgaatggtgtcatgggtgaatgatggggagtaaatttaggaaggggaagtgagagagtatggtggcaatatcacaagggaggagagaggaaaacaattatcttctctacttggattatgagataaccttttcttggaggaaagaaacaccgctttacaaaggcatgactctggcggtggtcctaaggaagcatgagcagaaaattcataaaaatgtatcatcagcaggagatgagactatgaattggcatccagaacaggagatttagagcaaaatctaatttagcattctgagatgagtgtcaggttttcaggagagaatgagttggggtgagcccagagtctgaaactcctgactggtcaggtgctacttaagaccagcttgggcaattcagggcagaactcctgtatcagcctcatggacacccagaattggtatctcatggctggagagctgatcagccaggcacagaatctccagaacaacctagagagtgaatgctaatttgtagagcgaacttccatttggcccattatttgtaactgtgtaactgctccaagtgccagaatgcttacacgttaaagcagcacctttccatttgcccacatattcttcttgcacaccccttccattactgctgaataggacattgcatgggaagagtacagaggtggcagaatgaagctagagtgggaaggactaaagactgagccccagagtgctcccagcaaccgccacgtacaaggtctgaaatgacaagggcaagagtgagataggaaactgtgtgtgaaaggaaagcccttgcagtatttctgcctccctttctttctgcctttcaccccactaaatgtatgttattgaatgccagtacttctctagtggatgcacacttgttaaatagtgttaagagatgtggagatgagatatacccctttgatgtagaattattcatttggtttgtttcatacttcattataggaatcaagtaatttgatgactaatgtggattatatttcagtcaaagctctgctttcaatttctctgatttgctcactaatgccttgtgtgtgttttactaaccttttatatcttgccttcaagtgagaaggaacaaacaactctcagtggttactacttgcttttatatgctggctgtgaaggttaaaagaaagaatggtctgtaccattctgctttgctgcccttttattgtaccccaggcctcctagaggactcctgcagattctattgttgggtgggaaatagtgttggaatgtgtttgcacagtcttatgatattcagtctcagtctgctataggtatttgttattcttggatactacacacctgctcagactgagtaaacatttgtggtgctgtcaacctgatttcttgactctcaaatgatttttgtatttccaatatgaatttgtgtgttatgaatttctgatttctccaatagtatatgccactatataaatttgtattaataaatgacagtcttgttggttt

SEQ ID NO: 217801 - DNA, 765 bp, Artificial Sequence
  derived and/or modified sequence
gagaggcaaggtcagagcagggctcggcgtcatgggcaatgctgtgaggaatgtgtgtctcctgccgggagctgctcctatgatggagttgtgcggtaccaggacgaaatgtggaagggctcggcctgtgagttctgcatgtgtgatcatggccaagtgacctgccagactggagagtgtgccaaagtggagtgtgcccgggatgaagaattaattcacttagatggaaagtgttgtcctgaatgcatttcaaggaatggttattgtgtttatgaagaaactggagaatttatgtcatcaaatgctagtgaagttaaacgtattccagagggagagaagtgggaagatggcccttgcaaggtgtgtgagtgccgaggggctcaggtaacttgctacgagccctcttgcccaccatgtccagtgggcacactggccttagaggtgaagggacagtgctgtccagactgcacatcagttcattgccatccagattgtttgacatgctctcagtctccagaccactgtgacctctgccaagatcctaccaagttactgcagaatggatggtgtgtgcacagctgtggactgggtttttaccaagctggcagtctctgtttagatgatggcttcagcctgccagccccagtgctccacgtgtaccagtgggctggagtgctcatcctgccagcctcccctgctgatgcggcacgggcagtgtgtgcctacctgtggggacggcttctaccaagatcgccattcctgtgc

SEQ ID NO: 217802 - DNA, 12039 bp, Artificial Sequence
  derived and/or modified sequence
atgggggtcctaaaggtatggctggggctggccctggctttggcggagtttgccgtactgcctcatcacagcgaaggcgcttgcgtctatcaggacagtttattggctgacgctactatctggaaacccgattcatgtcagagttgcagatgccacggggacatcgtcatatgcaagccagccgtgtgccgcaatcctcaatgcgccttcgaaaaaggtgaagtgttgcaaattgccgccaaccagtgctgtccagagtgcgttctgagaactccagggtcgtgccaccacgagaagaaaatacatgaacatggaactgaatgggcatccagtccttgttcagtctgctcgtgcaaccacggggaagttaggtgtacccctcaaccatgtcctcctctgtcttgcgggcatcaggagctcgcctttattcccgagggcagttgttgcccagtgtgcgtcggattagggaagccttgcagttatgaaggccacgtgttccaagatggggaggattggcggctatcacgctgtgctaagtgcttgtgcagaaatggggtggcccaatgctttaccgcacagtgtcaaccactgttctgcaaccaagatgaaaccgtcgtgcgcgtgcccggaaagtgctgcccccagtgttccgcacgcagttgcagcgccgcgggtcaggtgtacgagcatggcgagcagtggagcgaaaatgcttgtacaacttgcatctgtgaccggggggaagtacgctgccacaagcaggcatgtcttcccttgaggtgcggcaagggtcagagtcgtgctagacggcatggccagtgctgcgaggagtgtgttagcccagcgggtagctgcagctatgacggcgtggttcgctaccaggacgaaatgtggaagggttctgcttgtgaattttgcatgtgtgaccacggtcaggtaacttgccaaactggtgagtgtgctaaagtggagtgcgctcgcgatgaggaactgatccatttagacgggaagtgttgtcccgaatgtatctccagaaacgggtactgcgtgtacgaggagacaggcgagtttatgtcttccaacgctagtgaagtcaagcggatacctgaaggcgaaaaatgggaggacggaccttgcaaggtgtgtgagtgccgtggtgctcaggttacatgttacgagccctcatgccccccctgtccagtgggaacacttgcacttgaggttaagggccaatgctgtcctgactgcaccagcgtgcactgtcaccccgactgtttgacctgttcccagtctcctgaccattgtgatctgtgccaagacccaaccaagctattgcaaaatggttggtgcgtgcactcctgtgggctcgggttttaccaggccggttcattgtgcctcgcctgccaaccccagtgcagtacttgtacgtccgggcttgagtgttcgagttgtcagcccccactgctgatgcgccatggccagtgcgtccccacttgcggcgacggcttttatcaggatcggcacagctgcgcggtgtgtcatgagagttgtgccgggtgctggggcccaacagagaaacactgcttagcctgccgggatcccttgcacgttctgcgggacggcgggtgcgagagtagctgtggaaagggtttctacaaccgccagggtacttgcagtgcttgtgatcagagctgcgatagctgcggccccagctctcccagatgcttaacttgtacagagaagacagtcttacatgacggaaagtgtatgagcgaatgtcctggcggctattacgcagatgccacgggccgatgcaaggtctgccataattcctgcgcctcttgttccggtcccacaccctcccattgtacggcctgctctcctcccaaggcactgcggcaggggcattgcctgcccaggtgtggggaggggttctactcagaccatggggtctgcaaagcctgccactccagttgtctggcctgcatggggcccgctcctagtcattgtaccgggtgtaaaaagcccgaggaggggttgcaggtcgagcaactcagcgatgtcggaatcccttcaggcgaatgcctcgcccagtgtcgcgcacacttctatctggagtcaacaggaatttgtgaagcatgccaccaaagctgtttccgttgcgccggaaaatccccccataattgcaccgactgcggcccgagccacgtccttcttgacgggcagtgtctaagtcagtgtccagatggctactttcatcaggagggaagttgtaccgaatgccaccctacgtgtagacaatgccatggaccactggagtccgactgtattagttgttatccccacattagcctcaccaacggcaattgcaggacgagttgtagagaagagcaattcttgaacctggttggctattgtgccgactgccaccacttgtgccaacattgtgcggccgatctgcataataccggatcgatctgcctgagatgccaaaacgctcactacctcctcctaggagatcattgcgtacccgactgcccttcaggttactacgctgagcgcggcgcctgtaaaaagtgtcacagctcatgtcggacctgtcagggacgtggccctttttcttgtagctcctgtgatactaatctggttctcagccacacggggacttgctcgactacgtgtttccctggtcactatctggatgacaaccacgtttgtcaaccctgtaacactcactgcggctcatgcgatagccaggcctcttgcacgtcctgccgggacccaaacaaagtactgctctttggcgaatgccagtacgaatcatgcgccccccagtattacctcgatttctctacaaacacctgcaaggaatgtgattggtcgtgcagcgcttgttctggcccactgaagacggactgtctgcagtgcatggacggatatgtgcttcaggatggcgcttgtgtggagcaatgtctgagctccttttatcaggactccgggttatgcaagaactgtgacagctattgcctccagtgccaggggccacatgagtgcacacgctgtaagggtccattccttctactagaggcacaatgcgtgcaagaatgcggcaagggctatttcgctgatcacgccaagcacaagtgtacggcttgtccccagggatgtttgcagtgcagccacagggatagatgtcacctttgcgaccacggcttcttcctgaagtccggcttatgtgtctacaattgtgttccaggcttctcggtgcacacgagtaacgagacctgctctggaaaaatacatactccctcactccacgttaacggctccctgattctcccgattggttccataaagccattggatttctccctgctgaacgttcaggatcaggagggcagggttgaggacctgctgttccatgtcgtttctaccccaactaatggccagctcgtgttgtctagaaacggaaaggaggtccagttggataaagcaggtaggttcagctggaaagacgtgaacgagaagaaagtgcggtttgtgcactcaaaagaaaaattacggaaggggtatctgttcttgaagatctctgaccagcaatttttcagcgaaccccaacttatcaatatccaggcatttagtactcaggcaccttacgttcttaggaacgaagtgctgcatatttctcggggggaaagagcaactattaccactcaaatgctagacatccgggatgacgataatcctcaggatgtggtgatagagatcatcgatcccccactgcatggtcaattgctccagacattgcaatctccggcaacccctatctatcagttccagctagatgaactcagtcggggtttactacactatgctcatgacggttcagactccaccagcgacgttgccgtcctgcaggccaacgacggacactcctttcataatattctgttccaggtgaaaacggttccccagaacgacagaggcctccagcttgtcgccaactctatggtctgggtgccagaaggcggaatgctccagatcacaaacaggattctgcaggccgaggcgccaggcgcatcagccgaagaaatcatttataaaataacccaggactacccccaattcggggaagtggtgttactcgtcaacatgccagccgacagccctgcggatgaaggccagcatttaccagacggacgcacagccactcccacctccacgttcacgcagcaggacatcaacgaggggattgtctggtacaggcactccggagctcccgcccaaagcgatagctttagatttgaagtctcatctgcaagcaacgcacagactaggctggaatcccatatgttcaacatagcaatcctgccccaaacgcctgaggctccaaaagtgtctctggaggcatccctacacatgaccgctcgtgaagacggcctgactgtgatccagcctcactctctctcttttattaattcggaaaaaccctctggcaagattgtgtataacatcactttgcccctccaccccaatcaggggatcattgaacacagggaccacccccacagccccatacgatactttacccaggaagacataaatcagggaaaggtgatgtacagacctccaccagctgctccccatctccaggaactgatggccttctcattcgctggccttccagagtccgtcaaatttcatttcactgtatccgacggtgaacacacttctcccgagatggtactgaccatccatcttctgccgagcgaccagcagctgcctgtatttcaagtgaccgctccccgcttggccgtgagccccgggggatctacctcggtgggactgcaggtcgttgtccgggacgcagagaccgcacccaaggagcttttcttcgaattgagacgccctcctcagcacggtgttctgctgaagcacaccgcagagttcaggcgcccgatggctacgggtgacacatttacctatgaagacgtggaaaaaaacgccctgcagtacatccatgacggatcctccacacgggaggactccatggagatctccgtgaccgacggactaacagtcaccatgcttgaagtccgagttgaggtgtcgctaagcgaggatagggggcccaggctggccgcaggctccagtctcagcatcacagttgcaagcaaatccacagctatcatcaccagatcccatctcgcctacgtcgacgacagcagccctgatcctgagatctggattcagctgaattacctgccatcttacggcaccttgttgcggatttcagggtctgaagtcgaggaactatccgaggtgtctaatttcacgatggaggatatcaacaacaaaaagatccgctattccgctgtcttcgagactgatggtcatctcgttacagactcattttactttagcgtgtcagacatggaccataaccacctggacaatcagatcttcactatcatgattactcctgctgaaaaccctcctccagtgatcgctttcgccgatttgattacagtcgacgaaggtggaagagcaccgctgtcctttcatcactttttcgcaaccgacgatgatgacaatctacagagagatgccatcataaaactctccgccctccccaaatacggctgcatcgagaacacaggaaccggcgaccgttttggtcccgaaaccgcctcggatctggaagcttctttcccaatacaagacgtgcttgagaattatatctactactttcaatcagtccatgaatccatcgagcctacccacgatatctttagtttctacgtctcagacggcacatctagatccgaaatccactcaattaacattacaatcgagagaaagaacgacgaaccacctagaatgacacttcagccactccgcgtacagctgtctagcggagtggttatttccaattcaagtctatctttacaagatctggacacacccgacaacgagttgatctttgtgctgaccaagaagccggatcatggccacgttctgtggcggcagaccgcatccgaacccttagagaacggaagagtgctagtgcagggttccacgttcacctaccaggacatactggctggcctggtgggctacgtgccctccgtgccaggaatggtagtcgacgagttccagtttagcctgacagatggtttgcacgtggacactgggcggatgaaaatttacaccgagttgcccgccagtgatactcctcacctggctattaaccagggtttacagctgtccgccggcagcgtggcccggatcactgagcaacacctcaaggtgacagacattgattctgacgaccaccaggtgatgtacatcatgaaagaagatcccggcgctggacgcctccaaatgatgaagcatgggaacctggaacagatcagcatcaaggggcccatcaggagcttcacacaagctgatatatcacaaggacacgtggagtacagccatggaaccggtgagcccggaggttcttttgccttcaaattcgacgtcgtcgatggagagggcaaccgactcatcgacaagtctttctcaatcagcatactagaggacaaatccccacccgtaattaccacaaacaaaggactagtcctagacgaaaattccgtcaagaaaatcaccactctgcagttgagtgccactgatcaagacagcgggcccaccgagctcatctatcgtatcactcgacaaccacagttagggcatctggaacatgccgctagcccaggaatccagattagctcgtttacacaggctgatctgacgtcgaggaatgtccagtacgtgcactcctccgaggctgaaaagcactctgatgccttctcgtttacactgagcgatggggtttctgaggtgacccaaaccttccatattacactgcatccagttgatgactccctccccgttgtccagaatcttggaatgcgggtacaagaggggatgcgaaaaaccatcacagaatttgagctaaaggcagttgacgcggacacagaggccgagtcagtcacctttactatcgtgcagcccccacgccacggaaccattgagagaacctctaacggtcagcactttcatcttacttccacattcacaatgaaagatatctatcagaaccgggtgtcctactcgcacgatggctctaatagtctcaaggaccgatttactttcaccgtgtcggacggtaccaatccgttctttatcatcgaggagggcggaaaggagatcatgaccgccgcccctcagccctttcgggtggacatactgccggtggatgatgggacaccacggatcgttaccaacctgggactccagtggctcgagtacatggatggcaaagctactaaccttatcaccaaaaaggagctcctcaccatggatcctgataccgaggacgcgcagctggtatacgagataactacagggcccaaacacggattcgtagagaataaacttcagcctggacgtgccgctgcaacttttactcaggaggacgtgaatctggggctgattcggtatgtgctccataaggagaagatccgcgaaatgatggactcatttcagtttttggtgaaagatagcaaacctaacgtggtgtctgataacgtctttcacatccaatggtcactgattagtttcaagtacacaagttataatgtttctgaaaaggctgggagtgtatctgttactgtgcagagaaccggcaatctgaatcagtacgctattgtcttgtgtagaacagaacagggaacagcatccagcagcagtcgtgtcagcagccaaccgggtcagcaagactacgtggagtacgccggacaagtccagtttgatgagcgggaggacaccaaaagctgtacaatcgtgatcaacgacgacgatgttttcgaaaatgtggagagtttcacggttgagttgagtatgcctgcgtatgccttgctgggagagttcacgcaggcgaaagtgatcatcaacgacaccgaggatgaacctacactcgaatttgacaagaaaatctactgggtgaacgagagtgcgggattcctgttcgcacctatcgagcgcaaaggtgatgcttccagcatagtatccgctatttgctacacagtccctaagtcagccatgggctctagcctctacgctctggagtctggaagcgacttcaaaagtaggggaatgagtgcagccagtcgggtgattttcgggcctggagtaacgatgagcacatgcgacgttatgcttatcgacgactcggaatatgaggaggaagaggaattcgagattgccctagctgacgctagcgacaacgcgagaattggaagagtggcgaccgcaaaggtgcttatcagcggccccaacgacgcctctaccgtgagcctgggcaacacagcgtttacagtgtccgaggacgccggcacggtgaagattcctgtgatacgccacggcaccgatcttagcaccttcgcttccgtctggtgcgccacaagacccagtgaccccgccagcgctacccctggagttgattacgtgccttctagccggaaggtagagtttggaccgggcgtgattgagcagtactgtactttaaccatattagacgatacccagtatccggtcatcgagggccttgagacgtttgtcgtttttctatcctcggcccaaggagccgagcttactaagccgttccaggcagtgattgccatcaacgatacattccaggacgtgcccagcatgcaattcgccaaagacctcctgctagtaaaagagaaggaaggggtgctgcatgtgcctattacccgatccggcgatttaagttacgagagtagcgtaagatgctacacccagtcccactcagcacaagtcatggaagatttcgaggagcggcaaaacgccgacagttcgcgaatcacttttcttaagggtgacaaggtaaaaaactgcacagtgtatattcatgacgatagcatgtttgagccagaagagcagttccgagtgtatctgggactccccctgggcaaccactggagcggggcacggattggtaaaaacaatatggcgacaataactattagcaacgatgaggatgctcctactattgaattcgaagaggctgcctatcaggtgagggaacctgctggtccagacgccatagcgatccttaatatcaaggtgattaggaggggagaccaaaaccggacatcgaaggttcggtgcagcacaagagatggatccgcacaaagcggcgtggactactacccaaagtcacgggtgctcaagttcagtcccggagtcgaccatatcttctttaaagtggagatcttgtctaacgaagaccgggagtggcatgagagcttttctctggtactgggacccgacgaccccgtggaggccgtcctaggagacgtgacgaccgccaccgtgactattctcgatcaggaggcggctggttctctcattctgcctgcccccccgatcgtggtgaccctggcagactatgaccacgtagaggaggtaacaaaggaaggcgtgaagaagtcccccagcccagggtatcccctggtgtgtgttacaccttgtgacccccacttcccaaggtatgccgtgatgaaggagcgctgctcggaagccggtatcaatcagacgagcgtccagttttcttgggaagtggccgcccccacagacggcaacggcgctagaagtcctttcgagacaatcaccgacaataccccgtttacatccgtgaatcatatggtgctcgatagtatctattttagtaggaggttccatgtgcggtgcgtagcaaaggcggtggacaaggtgggccacgtgggtacaccactccgcagcaacattgtaacaattgggactgattcagctatatgtcatacccctgtggttgccgggacatcaagaggtttccaggcccaatcatttatcgctaccctgaagtacctggatgtgaagcataaagagcatcccaaccgaattcatatctctgtccagattccacatcaggatggaatgttgcctctgataagcactatgccactccacaatctacacttcttattgagtgaaagtatttataggcaccagcatgtatgttctaatctcgtgacaacatacgatctgcgaggcattagcgaggcgggctttctcgatgatgtggtatatgatagtacagcccttggcccaggctatgataggccgttccagttcgacccctcagtcagggagcctaagaccatacagttgtacaagcacttgaatttgaaaagttgtgtgtggacatttgacgcatattacgacatgaccgagctgatcgatgtgtgtgggggaagtgtgactgctgatttccaggtgagagactctgcccagtcgttcttgacagtacatgtgcccctctacgtctcttacatttacgttacagcccctcgcggatgggcatccttagaacaccatacagagatggagttctctttcttctacgacaccgttttatggcgcactggtatccaaactgacagtgttctttctgccaggctacaaatcatccggatctatatcagggaggacggccgtctcgtgattgagttcaagacccatgccaaatttagggggcaattcgtgatggagcatcacaccctgcctgaggtgaagtcatttgtgctcacccctgaccatctgggaggaatcgaatttgatttgcagctactgtggagtgctcagacatttgactctccacaccaactgtggagggcaacgtctagctacaataggaaagattactcaggagaatacacaatctacctcataccttgcaccgtgcaacctactcagccatgggtcgatccaggggaaaaaccactcgcgtgtacagcgcatgctcctgagcgcttcttgattccaatcgctttccagcagacaaaccggcccgtacctgtcgtgtattccctgaatacggaattccagctgtgcaataacgagaaagtgttcttgatggacccaaatactagcgatatgagtttggcagagatggattacaaaggagccttttccaaaggccagattctgtacggaagagtgttgtggaatccggagcagaatcttaattctgcgtacaagttacaactcgagaaggtctacctatgcactggtaaagacggatatgtgccgttttttgatccaacgggcacgatttacaacgaggggccccaatatggctgtattcagcctaataagcacctcaaacacaggttcctgcttctagataggaatcagccagaagtcacggataaatacttccacgatgtgccattcgaagcccatttcgcatctgagctaccagattttcatgtggtaagtaacatgcccggcgtagatgggtttacattaaaggtggatgctctctacaaagtcgaggcgggccatcagtggtatctgcaggtgatatacataatcggccctgataccatttctggtcccagagtccaacggtctcttacagccccactgagacgtaaccgcagagatttggtagagccagatgggcagctgatattagatgattcccttatctatgacaacgagggggaccaggtcaagaatggtacaaacatgaagagcctgaatctcgagatgcaggaactcgccgtggcagcaagcctttctcagaccggggcctccattgggtccgctctggctgccatcatgctgttgctgttggtattccttgtggcctgttttattaacaggaagtgtcagaagcagagaaagaaaaaacccgccgaggacatcctggaagagtacccactgaacactaaagttgaggtccccaagcggcacccagatagggtggagaaaaacgtgaacagacattactgtaccgtgcggaacgttaatatattgtccgagccagaggcagcttacaccttcaagggtgctaaggttaaaaggctgaaccttgaagtgagggtccataacaaccttcaagatgggaccgaggtttag

SEQ ID NO: 217803 - DNA, 6726 bp, Artificial Sequence
  derived and/or modified sequence
tagagtgaagtttccaattttactatggaggatatcaacaacaaaaagatcaggtatagcgctgtgtttgaaaccgacgggcatctggtgacagactcgttttattttagcgtgagcgacatggaccacaatcatcttgataatcagattttcactatcatgatcacgccagctgagaaccctcccccagtcatcgcctttgctgaccttataacagtcgatgagggtggcagagcccctctgtccttccatcatttttttgcaactgacgacgacgataacctgcaaagagatgcaatcataaagttgtccgcattgccgaagtacggctgtatagagaacacaggaaccggcgaccgctttggtcccgagacagcctctgatctcgaagcttcctttcccatccaggacgtcctggaaaactacatctactatttccagtccgtccatgagagcattgaaccaacacatgacattttctccttttatgtgagcgacggcacaagtagatccgaaatccatagtattaacatcactatcgagcgcaagaacgatgaaccccctagaatgactctccagcctttgagggtccagttgagtagtggggtggtgataagcaatagtagtctctccttgcaggatctggacacacctgataatgagctgatcttcgtactgaccaaaaaacctgaccatgggcatgtgttgtggaggcagactgcctccgaaccactcgaaaacggcagggtgctggtacagggttcaacgtttacctaccaagatatacttgctggcctcgttggatacgtgccctccgttcccggtatggtagtcgacgaattccaattctctcttacggacggactgcacgtcgacactgggcgcatgaagatctacaccgaactcccagcttccgatacaccccatttagcgataaatcagggtcttcagctttccgccggctctgtggctaggattactgagcagcacttgaaggtcactgatatcgattccgacgaccatcaggtgatgtatattatgaaggaagacccgggggccggtcgacttcagatgatgaagcatgggaacctggagcagatttccattaagggccctatcaggtcattcactcaagccgacatcagccagggccacgttgagtatagccatggaaccggtgagcctggtggctcgtttgccttcaaattcgacgtggtagacggggaggggaatcggttgatagacaagtcgttctccattagcattcttgaggataagtcaccacctgttataactacgaacaagggtctggttctggacgagaactccgtgaaaaagatcaccaccctccagctgtcggcaacggatcaggactcgggtcctacggagcttatatatcgtatcacccgacagcctcagctcggccatctcgaacatgcagcttcccctggaattcagatctcatcatttactcaggcggaccttacctccaggaatgttcagtatgtccatagcagtgaggctgagaaacactccgatgcgttcagtttcacacttagcgacggagtgtcggaggtaacccagacgttccacattacccttcacccggtggacgattctctacctgtggtccagaacctgggtatgagggttcaggaaggcatgcgcaagacgatcacagagtttgagcttaaagccgttgacgccgacacggaggccgaatcagtgactttcacaatagtgcaacctccgcgtcacggcaccattgaacgaacctcaaatggacagcactttcacttgacaagtacgttcacaatgaaggacatctaccaaaatagagtgtcttacagtcacgacggtagtaactcattaaaagatcgcttcaccttcactgtttctgatggtactaacccatttttcattatcgaggaagggggaaaagagatcatgaccgcggctccccagccgttccgtgtagacatactgcccgttgatgatggcactccgaggattgtgaccaatttggggctccagtggttagagtatatggatgggaaggcaaccaacttaatcaccaaaaaggagctgttaaccatggaccccgacaccgaggacgctcagctcgtttacgaaattaccacaggccctaagcatggattcgtcgaaaacaagctccagcccggccgtgctgcagcaacctttacacaggaggacgtcaacctggggcttatcagatatgtcctgcataaggaaaagatcagggaaatgatggatagcttccaatttctagttaaggatagtaaaccgaatgtagtgagtgataacgtattccacattcaatggtctctcatctcctttaagtatacctcctataacgtgagtgagaaggcaggatctgtttcggtgaccgtacagcgaacgggcaacctcaatcagtacgcaatcgtgttgtgccggacagagcagggaaccgcttctagttcttctcgcgtttcatcccagcctggccagcaggattacgtggagtacgctgggcaggtccagttcgacgagcgggaggatacaaagtcctgcacgattgtgattaacgacgacgacgttttcgagaacgtggagtcttttacagttgagctgtcaatgcctgcttacgctctcctgggcgaattcacccaggccaaagtgattatcaatgatactgaagacgagccaacattagaattcgacaagaagatttattgggtcaacgagtcagctggatttctgtttgcaccgattgaacgaaagggagacgcaagctctatcgtgagtgcaatttgttacacagttccaaaaagtgcaatgggctcctcactttatgccctggaatcaggaagtgattttaagagccggggaatgagcgccgcttcgagagttatatttggtccaggtgtgactatgtccacctgcgacgtaatgcttattgacgacagtgaatacgaagaagaggaagagttcgaaatcgccctggcagatgcaagtgacaatgcaagaattgggcgggtcgcgacagcaaaggtgttgatatctggcccaaatgacgcctccactgtgagtctaggcaataccgcgtttacagtgtctgaggacgcgggcactgttaagatcccagtgattagacatggcacagacttgagtacttttgcttctgtgtggtgtgcaacgcggccgagcgacccagctagcgctacacccggcgttgactacgtgccctcttcccgaaaagttgaattcggtcctggagttattgagcagtattgtactctgaccattctggatgacacccagtatcctgtgatagaaggactggagacgttcgtggtgtttcttagcagtgctcagggagccgaactgacgaagccatttcaggctgttattgccataaatgatacctttcaagacgtgccgtctatgcagttcgctaaagatctgttgctcgtaaaggaaaaggagggcgtattacacgtgccgattacaagatctggagatctctcctatgaatcctctgtgaggtgctacactcagagccactctgctcaggtgatggaggactttgaagaaagacagaatgcagatagtagtagaattacgtttctgaagggcgataaggtgaagaactgtaccgtgtacatacatgatgactcgatgtttgagccagaagagcaatttcgagtgtacctggggctgccgttaggaaatcactggtctggcgccagaattggtaagaataatatggcaaccataacgatctcgaatgacgaagacgccccgaccattgaattcgaggaggctgcgtaccaagtgagggaacccgccggaccagacgcaatcgcaatattgaacataaaggtgattcgccggggagaccaaaaccggactagtaaggtcagatgttcgacaagggacggaagcgcccaaagcggcgtggactactatccaaaatcccgtgtactcaaattttcaccgggcgttgatcacattttcttcaaggttgagatcttgtctaatgaggaccgagaatggcacgagagcttcagcctggttctgggacctgatgaccccgtggaggcagtgctgggggacgtcaccacagctaccgtcactattctggatcaggaggccgcagggtcactaatcctgcctgcgccaccgatcgtcgtgacactggctgactacgatcatgttgaggaggtgactaaggagggggttaaaaaatcgcccagccctgggtaccccctcgtgtgcgtgactccttgtgatccacactttccacgatacgcagtgatgaaggaaagatgctcagaagccgggattaatcagacctccgtgcaattctcctgggaggttgccgcacccactgatggcaacggcgcaagatctccattcgagactatcacagataatacccctttcacatccgtgaatcacatggttctagacagtatttatttctctcggagatttcacgtacggtgcgtggccaaggccgtggacaaggtcggacacgtgggcacccctctgcggagtaacattgtcaccattggtaccgacagcgccatctgccacactcctgttgtcgccggaacgtctaggggctttcaggcccaatcatttattgccacgctgaagtatctggacgtcaagcataaagagcaccccaacaggattcatatttcggtccaaattcctcaccaggatgggatgctacctttaatctctacaatgcccctccacaaccttcactttctcctcagcgaatctatatacaggcatcagcatgtgtgctccaatctcgtaactacctacgatcttcgagggatttctgaggccggatttctggacgacgtggtgtacgattccacagctctcggccctggctacgacaggccattccaattcgaccccagcgtgagggagccaaaaacaatccaactctataaacacctgaacttgaaatcgtgtgtgtggacctttgacgcctactacgacatgaccgagctcatcgatgtgtgtggcggctcggtcacagccgactttcaggtccgggattccgcccagagctttctcaccgtgcatgttcccttatatgtctcctatatctatgttaccgctccacgcggctgggcaagcctcgagcatcacaccgaaatggagttttctttcttttatgatacagttttgtggcgtacgggtatccagacagatagtgtcctatcagccaggcttcagatcatccgcatctatattcgagaggatggacgcctcgtaatcgaattcaagacacacgctaaattcagagggcagttcgttatggaacatcataccctgccagaagtgaagtcttttgttctaactcctgaccacttaggagggatcgagtttgatctgcagctgctgtggtcagcacagacgttcgatagcccacatcagctgtggagagctacctcctcttataatcggaaggactacagcggggagtataccatataccttatcccttgtacagtacaaccaacacagccctgggtggatccaggcgaaaaaccactcgcctgcacggctcatgcacctgaacgattcctgatcccaatcgcgtttcagcagacaaacaggccagtccctgttgtttattctctaaacacagagtttcagctgtgcaataacgaaaaggtgtttctcatggatccaaatacctccgatatgtcactggcagaaatggattacaagggagcattcagtaaaggacagatcctgtatggtagagtgttatggaatcctgagcagaatctcaacagcgcctacaagctgcagcttgagaaggtttacctctgtactggcaaagacggatatgtgccattcttcgatcctaccgggactatttacaatgaaggaccccagtacggatgtatccaacccaacaagcatctgaaacaccgctttctgctgctagatcggaatcagccggaggtgacagataagtacttccacgatgttcccttcgaggctcactttgccagcgagttgcctgactttcacgtagtttctaatatgcccggcgtggatggctttacacttaaggtggacgccctatacaaggtggaggccggccatcagtggtatctccaggtgatttacataatcggacccgataccatcagcggccctcgtgttcagcgttctttgaccgcaccattgcgaagaaataggcgcgaccttgtggaacccgacggccaactgatcctcgatgattcattgatctatgacaatgagggggatcaggtgaagaatggaacgaacatgaagtcgctaaacctggaaatgcaagagctggcagtggcagcctcccttagccagactggcgctagcataggatcagctctggccgcaatcatgttgcttctgctcgtttttctagtggcctgttttatcaatcggaagtgtcagaaacaaaggaaaaagaagccagccgaggatatcctggaggaataccccttgaataccaaggtcgaggtccctaagaggcacccggacagagtcgaaaagaacgtgaacagacactactgtacagttagaaacgtgaacatactcagcgaacctgaggcagcatacaccttcaaaggcgcgaaggtcaaacgtcttaatcttgaggtcagggtccacaacaatctacaggacggcaccgaagtgtag

SEQ ID NO: 217804 - DNA, 12039 bp, Artificial Sequence
  derived and/or modified sequence
atgggcgtgctgaaggtgtggctgggcctggccctggccctggccgagtttgctgtgctgccccaccacagcgagggcgcctgtgtgtaccaggacagcctgctggctgatgccaccatctggaagccagacagctgccagagctgccgctgccacggggacatcgtcatctgcaagccagctgtgtgcaggaacccccagtgtgcctttgagaagggggaggtgctgcagattgctgccaaccagtgctgcccagaatgtgtgctgcggaccccaggcagctgccaccacgagaagaagatccacgagcacggcacagagtgggccagcagcccctgcagcgtgtgcagctgcaaccacggggaggtgcgctgcaccccccagccctgcccccccctgagctgtggccaccaggagctggccttcatccctgagggcagctgctgccctgtgtgtgtgggcctgggcaagccctgcagctatgagggccacgtgttccaggatggagaggactggaggctgagccgctgtgccaagtgcctgtgcagaaatggagtggcccagtgcttcaccgcccagtgccagcccctcttctgcaaccaggatgagaccgtggtgcgggtgcctgggaagtgctgcccccagtgcagcgcccggagctgcagcgctgctggccaggtgtatgagcacggggagcagtggagcgaaaatgcctgcaccacctgcatctgtgacagaggagaggtgcgctgccacaagcaggcctgcctgcccctgcgctgtgggaagggccagagccgggccaggagacatggccagtgctgtgaagaatgtgtgtccccagctggcagctgcagctatgatggagtggtgcgctaccaggatgagatgtggaagggcagcgcctgtgagttctgcatgtgtgaccacggccaggtgacctgccagacaggagaatgtgccaaggtggagtgtgccagagatgaggagctgatccacctggatggcaagtgctgcccagagtgcatcagcagaaatggctactgtgtgtatgaggagaccggggagttcatgagcagcaatgccagcgaggtgaagagaattcctgagggggagaagtgggaggatggcccctgcaaggtgtgtgaatgtagaggagcccaggtgacctgctatgagcccagctgccccccctgccctgtgggcaccctggccctggaggtgaagggccagtgctgcccagactgcacctctgtgcactgccacccagactgcctgacctgcagccagagcccagaccactgtgacctgtgccaggaccccaccaagctgctgcagaatggctggtgtgtgcacagctgtggcctgggcttctaccaggccggcagcctgtgcctggcctgccagccccagtgcagcacctgcaccagcggcctggagtgcagcagctgccagccccccctgctgatgagacatggccagtgtgtgcccacctgtggagatggcttctaccaggacagacacagctgtgctgtgtgccacgagagctgtgccggctgctggggccccacagagaagcactgcctggcctgccgggaccccctgcacgtgctgagagatggcggctgtgagagcagctgtgggaagggcttctacaaccggcagggcacctgcagcgcctgtgaccagagctgtgacagctgtggccccagcagcccccgctgcctgacctgcacagagaagacagtgctgcatgatggcaagtgcatgtctgagtgccctgggggctactatgcagatgccaccggccgctgcaaggtgtgccacaacagctgtgccagctgcagcggccccacccccagccactgcacagcctgcagcccccccaaggccctgcggcagggccactgcctgccccgctgtggggagggcttctacagcgaccatggagtgtgcaaggcctgccacagcagctgcctggcctgcatgggccctgcccccagccactgcaccggctgcaagaagccagaggagggcctgcaggtggagcagctgagtgatgtgggcatccccagcggggagtgcctggcccagtgccgggcccacttctacctggagagcacaggcatctgtgaggcctgccaccagagctgcttccgctgtgccggcaagagcccccacaactgcacagactgtggccccagccacgtgctgctggatggccagtgcctgagccagtgcccagatggctacttccaccaggagggcagctgcacagagtgccaccccacctgccggcagtgccacggccccctggagagtgactgcatcagctgctacccccacatcagcctgaccaatggaaactgcaggaccagctgccgggaggagcagttcctgaacctggtgggctactgtgccgactgccaccacctgtgccagcactgtgccgctgacctgcacaacacaggcagcatctgcctgcgctgccagaatgcccactacctgctgctgggggaccactgtgtgcctgactgccccagcggctactatgcagagcggggggcctgcaagaagtgccacagcagctgcaggacctgccagggccggggccccttcagctgcagcagctgtgacaccaacctggtgctgagccacacaggcacctgcagcaccacctgcttccctggccactacctggatgacaaccacgtgtgccagccctgcaacacccactgcggcagctgtgacagccaggccagctgcaccagctgccgggaccccaacaaggtgctgctgtttggagagtgccagtatgagagctgtgccccccagtactacctggacttcagcaccaacacctgcaaggaatgtgactggagctgcagcgcctgcagcggccccctgaagacagactgcctgcagtgcatggatggctacgtgctgcaggatggagcctgtgtggagcagtgcctgagcagcttctaccaggacagcggcctgtgcaagaactgtgacagctactgcctgcagtgccagggcccccatgaatgtacccgctgcaagggccccttcctgctgctggaggcccagtgtgtgcaggagtgtgggaagggctactttgctgaccacgccaagcacaagtgcacagcctgcccccagggctgcctgcagtgcagccaccgggaccgctgccacctgtgtgaccacggcttcttcctgaagagcggcctgtgtgtgtacaactgtgtgcccggcttctctgtgcacaccagcaatgagacctgcagcggcaagatccacacccccagcctgcacgtgaatggcagcctcatcctgcccatcggcagcatcaagcccctggacttcagcctgctgaatgtgcaggaccaggagggccgggtggaggacctgctcttccacgtggtgtccacccccaccaacggccagctggtgctgagcagaaatggcaaggaggtgcagctggacaaggccggccgcttctcctggaaggatgtgaatgagaagaaggtgcgctttgtgcacagcaaggagaagctgaggaagggctacctgttcctgaagatcagtgaccagcagttcttcagcgagccccagctgatcaacatccaggccttcagcacccaggccccctacgtgctgagaaatgaggtgctgcacatcagcagaggagagcgggccaccatcaccacccagatgctggacatcagagatgatgacaacccccaggatgtggtgattgagatcattgatcctcccctgcacggccagctgctgcagaccctgcagagccctgccacccccatctaccagttccagctggatgagctgagccggggcctgctgcactacgcccatgatggcagtgacagcaccagtgatgtggccgtgctgcaggccaatgatggccacagcttccacaacatcctcttccaggtgaagacagtgccccagaatgaccggggcctgcagctggtggccaacagcatggtgtgggtgcctgagggcggcatgctgcagatcaccaaccgcatcctgcaggccgaggcccctggggccagcgctgaggagatcatctacaagatcacccaggactacccccagtttggagaggtggtgctgctggtgaacatgcctgctgacagccctgcagatgagggccagcacctgcctgatggccgcacagccacccccaccagcaccttcacccagcaggacatcaatgaaggcatcgtgtggtaccgccacagcggggccccagcccagagcgacagcttccgctttgaggtgtcctctgccagcaatgcccagacccggctggagagccacatgttcaacatcgccatcctgccccagaccccagaggcccccaaggtgtccctggaggccagcctgcacatgacagcccgggaggatggcctgaccgtcatccagccccacagcctgtccttcatcaacagcgagaagcccagcggcaagatcgtgtacaacatcaccctgcccctgcaccccaaccagggcatcatcgagcaccgggaccacccccacagccccatccgctacttcacccaggaggacatcaaccagggcaaggtgatgtacagacctcctcctgctgccccccacctgcaggagctgatggccttctcctttgctggcctgcctgagagcgtgaagttccacttcaccgtgtctgatggagagcacaccagccctgagatggtgctgaccatccacctgctgcccagcgaccagcagctgcctgtgttccaggtgacagccccccggctggccgtgtcccctgggggcagcacctctgtgggcctgcaggtggtggtgagagatgctgagacagcccccaaggagctgttctttgagctgcggcggcccccccagcacggcgtgctgctgaagcacacagctgagttcagaagacccatggccaccggggacaccttcacctatgaagatgtggagaagaatgccctgcagtacatccatgatggcagcagcaccagagaagattccatggagatctctgtgacagatggcctgactgtgaccatgctggaggtgcgggtggaggtgtccctgtctgaagatcggggcccccggctggccgccggcagcagcctgagcatcaccgtggccagcaagagcacagccatcatcaccaggagccacctggcctacgtggatgacagcagcccagaccctgagatctggatccagctgaactacctgcccagctatggcaccctgctgcgcatcagcggcagcgaggtggaggagctgtctgaggtgagcaacttcaccatggaggacatcaacaacaagaagatccgctacagcgctgtgtttgaaacagatggccacctggtgacagacagcttctacttctctgtgtctgacatggaccacaaccacctggacaaccagatcttcaccatcatgatcaccccagctgagaaccccccacctgtgattgcctttgctgacctgatcaccgtggatgaaggaggccgggcccccctgtccttccaccacttctttgccacagatgatgatgacaacctgcagagagatgccatcatcaagctgagcgccctgcccaagtatggctgcatcgagaacacaggcaccggggaccgcttcggccctgagacagccagtgacctggaggccagcttccccatccaggatgtgctggagaactacatctactacttccagagcgtgcatgagagcattgagcccacccatgacatcttctccttctacgtgtctgatggcaccagccgctctgagatccacagcatcaacatcaccattgaaaggaagaatgatgagccccccaggatgaccctgcagcccctgcgggtgcagctgagcagcggcgtggtgatcagcaacagcagcctgagcctgcaggacctggacaccccagacaatgaactcatctttgtgctgaccaagaagccagaccacggccacgtgctgtggaggcagacagccagcgagcccctggagaatggccgggtgctggtgcagggcagcaccttcacctaccaggacatcctggccggcctggtgggctacgtgcccagcgtgcccggcatggtggtggatgagttccagttcagcctgacagatggcctgcacgtggacaccggccgcatgaagatctacacagagctgcctgccagtgacaccccccacctggccatcaaccagggcctgcagctgtctgctggctctgtggcccgcatcacagagcagcacctgaaggtgacagacatcgacagtgatgaccaccaggtgatgtacatcatgaaggaggaccccggggccggccgcctgcagatgatgaagcacggcaacctggagcagatcagcatcaagggccccatccgctccttcacccaggccgacatcagccagggccacgtggagtacagccatggaactggagagcccggcggcagctttgccttcaagtttgatgtggtggatggagagggcaaccggctgattgacaagagcttcagcatcagcatcctggaggacaagagcccccctgtgatcaccaccaacaagggcctggtgctggatgagaacagcgtgaagaagatcaccaccctgcagctgagcgccacagaccaggacagcggccccacagagctgatctaccgcatcacccggcagccccagctgggccacctggagcacgccgccagccctggcatccagatcagcagcttcacccaggccgacctgaccagcagaaatgtgcagtatgtgcacagcagcgaggccgagaagcacagtgatgccttctccttcaccctgagtgatggagtgtctgaggtgacccagaccttccacatcaccctgcaccctgtggatgacagcctgcctgtggtgcagaacctgggcatgagggtgcaggagggcatgaggaagaccatcacagaatttgagctgaaggctgtggatgctgacacagaggccgagagcgtgaccttcaccatcgtgcagccccccaggcatggcaccatcgagaggaccagcaatggccagcacttccacctgaccagcaccttcaccatgaaggacatctaccagaacagagtgtcctacagccatgatggcagcaacagcctgaaggaccgcttcaccttcaccgtgtctgatggcaccaaccccttcttcatcatcgaggagggcggcaaggagatcatgacagctgccccccagcccttccgggtggacatcctgcctgtggatgatggcaccccccgcatcgtgaccaacctgggcctgcagtggctggagtacatggatggcaaggccaccaacctgatcaccaagaaggagctgctgaccatggaccctgacacagaagatgcccagctggtgtatgagatcaccaccggccccaagcacggctttgtggagaacaagctgcagcccggccgggccgccgccaccttcacccaggaggatgtgaacctgggcctcatccgctacgtgctgcacaaggagaagatccgggagatgatggacagcttccagttcctggtgaaggacagcaagcccaacgtggtgtctgacaacgtgttccacatccagtggagcctcatctccttcaagtacaccagctacaacgtgtctgagaaggccggctctgtgtctgtgacagtgcagaggacaggcaacctgaaccagtatgccatcgtgctgtgcaggacagagcagggcacagccagcagcagcagccgggtgagcagccagcccggccagcaggactatgtggagtatgccggccaggtgcagtttgatgagcgggaggacaccaagagctgcaccatcgtcatcaatgatgatgatgtgtttgaaaatgtggagagcttcaccgtggagctgtccatgcctgcctatgccctgctgggggagttcacccaggccaaggtgatcatcaatgacacagaagatgagcccaccctggagtttgacaagaagatctactgggtgaatgaatctgctggcttcctgtttgcccccatcgagaggaaaggagatgccagcagcatcgtgtctgccatctgctacacagtgcccaagagcgccatgggcagcagcctgtatgccctggagagcggcagtgacttcaagagccggggcatgtctgctgccagcagggtcatcttcggccctggggtgaccatgagcacctgtgatgtgatgctgattgatgattctgaatatgaggaggaggaggagtttgaaattgccctggctgatgccagtgacaatgcccgcatcggccgggtggccacagccaaggtgctgatcagcggccccaatgatgccagcacagtgtccctgggcaacacagccttcaccgtgtctgaagatgctggcaccgtgaagatccctgtgatccgccacggcacagacctgagcacctttgcctctgtgtggtgtgccacccggcccagcgaccctgccagcgccaccccaggagtggactatgtgcccagcagcaggaaggtggagtttggacctggggtcatcgagcagtactgcaccctgaccatcctggatgacacccagtaccctgtgattgagggcctggagacctttgtggtgttcctgagcagcgcccagggcgctgagctgaccaagcccttccaggccgtgattgccatcaatgacaccttccaggatgtgcccagcatgcagtttgccaaggacctgctgctggtgaaggagaaggagggcgtgctgcacgtgcccatcaccaggtctggggacctgtcctatgagagctctgtgcgctgctacacccagagccacagcgcccaggtgatggaggactttgaggagcggcagaatgctgacagcagccgcatcaccttcctgaagggggacaaggtgaagaactgcaccgtgtacatccatgatgacagcatgtttgagcctgaggagcagttccgggtgtacctgggcctgcccctgggcaaccactggagcggggccagaattggcaagaacaacatggccaccatcaccatcagcaatgatgaagatgcccccaccatcgagtttgaggaggccgcctaccaggtgcgggagcctgctggcccagatgccatcgccatcctgaacatcaaggtgatcagaagaggagaccagaacagaaccagcaaggtgcgctgcagcaccagagatggcagcgcccagagcggcgtggactactaccccaagagccgggtgctgaagttcagccctggggtggaccacatcttcttcaaggtggagatcctgagcaatgaagatcgggagtggcatgagagcttcagcctggtgctgggcccagatgatcctgtggaggccgtgctgggagatgtgaccacagccaccgtgaccatcctggaccaggaggccgccggcagcctcatcctgcctgccccacccatcgtggtgaccctggccgactatgaccacgtggaggaggtgaccaaggagggcgtgaagaagagccccagccctggctaccccctggtgtgtgtgaccccctgtgacccccacttccccaggtatgctgtgatgaaggagcgctgcagcgaggccggcatcaaccagacctctgtgcagttctcctgggaggtggccgcccccacagatggaaatggagcccggagcccctttgagaccatcacagacaacacccccttcacctctgtgaaccacatggtgctggacagcatctacttcagccgccgcttccacgtgcgctgtgtggccaaggctgtggacaaggtgggccacgtgggcacccccctgcggagcaacatcgtgaccatcggcacagattctgccatctgccacacccctgtggtggccggcaccagccggggcttccaggcccagagcttcatcgccaccctgaagtacctggatgtgaagcacaaggagcaccccaaccgcatccacatctctgtgcagatcccccaccaggacggcatgctgcccctcatcagcaccatgcccctgcacaacctgcacttcctgctgtctgagagcatctaccgccaccagcacgtgtgcagcaacctggtgaccacctatgacctgcggggcatcagcgaggccggcttcctggatgatgtggtgtatgacagcacagccctgggccctggctatgaccggcccttccagtttgaccccagcgtgcgggagcccaagaccatccagctgtacaagcacctgaacctgaagagctgtgtgtggacctttgatgcctactatgacatgacagagctgattgatgtgtgtggcggctctgtgacagctgacttccaggtgcgggacagcgcccagagcttcctgactgtgcacgtgcccctgtatgtgtcctacatctacgtgacagccccccggggctgggccagcctggagcaccacacagagatggagttctccttcttctatgacacagtgctgtggaggacaggcatccagacagattctgtgctgagcgcccggctgcagatcatccgcatctacatccgggaggatggccgcctggtgattgagttcaagacccacgccaagttccggggccagtttgtgatggagcaccacaccctgcctgaggtgaagagctttgtgctgaccccagaccacctgggcggcattgaatttgacctgcagctgctgtggagcgcccagacctttgacagcccccaccagctgtggagggccaccagcagctacaacaggaaggactacagcggggagtacaccatctacctgatcccctgcaccgtgcagcccacccagccctgggtggaccccggggagaagcccctggcctgcacagcccacgcccctgagcgcttcctgatccccatcgccttccagcagaccaacagacctgtgcctgtggtgtacagcctgaacacagagttccagctgtgcaacaatgagaaggtgttcctgatggaccccaacaccagtgacatgagcctggccgagatggactacaagggggccttcagcaagggccagatcctgtatggccgggtgctgtggaaccctgagcagaacctgaacagcgcctacaagctgcagctggagaaggtgtacctgtgcaccgggaaggatggctacgtgcccttctttgaccccaccggcaccatctacaatgaaggcccccagtatggctgcatccagcccaacaagcacctgaagcaccgcttcctgctgctggacaggaaccagcctgaggtgacagacaagtacttccatgatgtgccctttgaggcccactttgccagcgagctgcctgacttccacgtggtgagcaacatgcctggggtggatggcttcaccctgaaggtggatgccctgtacaaggtggaggccggccaccagtggtacctgcaggtgatctacatcatcggccctgacaccatcagcggcccccgggtgcagaggagcctgacagcccccctgcggaggaacagaagagacctggtggagccagatggccagctgatcctggatgacagcctcatctatgacaatgaaggagaccaggtgaagaatggcaccaacatgaagagcctgaacctggagatgcaggagctggccgtggccgccagcctgagccagacaggagccagcatcggcagcgccctggccgccatcatgctgctgctgctggtgttcctggtggcctgcttcatcaacaggaagtgccagaagcagaggaagaagaagccagctgaggacatcctggaggagtaccccctgaacaccaaggtggaggtgcccaagaggcacccagacagagtggagaagaatgtgaacagacactactgcaccgtgagaaatgtgaacatcctgtctgagcctgaggccgcctacaccttcaagggggccaaggtgaagaggctgaacctggaggtgcgggtgcacaacaacctgcaggacggcacagaggtgtag

SEQ ID NO: 217805 - DNA, 6726 bp, Artificial Sequence
  derived and/or modified sequence
tgaagtgaggtgagcaacttcaccatggaggacatcaacaacaagaagatccgctacagcgctgtgtttgaaacagatggccacctggtgacagacagcttctacttctctgtgtctgacatggaccacaaccacctggacaaccagatcttcaccatcatgatcaccccagcagaaaatcctcctcctgtgattgcctttgctgacctgatcaccgtggatgagggcggccgggcccccctgtccttccaccacttctttgccacagatgatgatgacaacctgcagagagatgccatcatcaagctgagcgccctgcccaagtatggctgcattgaaaatactggaactggagacagatttggacctgagacagccagtgacctggaggccagcttccccatccaggatgtgctggagaactacatctactacttccagagcgtgcatgagagcattgagcccacccatgacatcttctccttctacgtgtctgatggcaccagccgctctgagatccacagcatcaacatcaccatcgagaggaagaatgatgagccccccaggatgaccctgcagcccctgcgggtgcagctgagcagtggagtggtgatcagcaacagcagcctgagcctgcaggacctggacaccccagacaatgagctgatctttgtgctgaccaagaagccagaccacggccacgtgctgtggaggcagacagccagcgagcccctggagaatggccgggtgctggtgcagggcagcaccttcacctaccaggacatcctggccggcctggtgggctacgtgcccagcgtgcccggcatggtggtggatgagttccagttcagcctgacagatggcctgcacgtggacaccggccgcatgaagatctacacagagctgcctgccagtgacaccccccacctggccatcaaccagggcctgcagctgtctgctggctctgtggcccgcatcacagagcagcacctgaaggtgacagacatcgacagtgatgaccaccaggtgatgtacatcatgaaggaggaccctggagctggccgcctgcagatgatgaagcacggcaacctggagcagatcagcatcaagggccccatccgctccttcacccaggccgacatcagccagggccacgtggagtacagccacggcaccggggagcccggcggcagctttgccttcaagtttgatgtggtggatggagagggcaaccggctgattgacaagagcttcagcatcagcatcctggaggacaagagcccccctgtgatcaccaccaacaagggcctggtgctggatgaaaattctgtgaagaagatcaccaccctgcagctgagcgccacagaccaggacagcggccccacagagctgatctaccgcatcacccggcagccccagctgggccacctggagcacgccgccagccctggcatccagatcagcagcttcacccaggccgacctgaccagcagaaatgtgcagtatgtgcacagcagcgaggccgagaagcacagtgatgccttctccttcaccctgagtgatggagtgtctgaggtgacccagaccttccacatcaccctgcaccctgtggatgacagcctgcctgtggtgcagaacctgggcatgagggtgcaggagggcatgaggaagaccatcacagaatttgagctgaaggctgtggatgctgacacagaagctgagagcgtgaccttcaccatcgtgcagcccccaagacatggcaccattgaaagaaccagcaatggccagcacttccacctgaccagcaccttcaccatgaaggacatctaccagaacagagtgtcctacagccatgatggcagcaacagcctgaaggaccgcttcaccttcaccgtgtctgatggcaccaaccccttcttcatcatcgaggagggcggcaaggagatcatgacagctgccccccagcccttccgggtggacatcctgcctgtggatgatggcaccccaagaattgtgaccaacctgggcctgcagtggctggagtacatggatggcaaggccaccaacctgatcaccaagaaggagctgctgaccatggaccctgacacagaagatgcccagctggtgtatgagatcaccaccggccccaagcacggctttgtggagaacaagctgcagcccggccgggctgctgccaccttcacccaggaggatgtgaacctgggcctcatccgctacgtgctgcacaaggagaagatccgggagatgatggacagcttccagttcctggtgaaggacagcaagcccaacgtggtgtctgacaacgtgttccacatccagtggagcctcatctccttcaagtacaccagctacaacgtgtctgagaaggccggctctgtgtctgtgacagtgcagaggactggaaacctgaaccagtatgccatcgtgctgtgcaggacagagcagggcacagccagcagcagcagccgggtgagcagccagcccggccagcaggactatgtggagtatgccggccaggtgcagtttgatgaaagagaggacaccaagagctgcaccatcgtcatcaatgatgatgatgtgtttgaaaatgtggagagcttcaccgtggagctgtccatgcctgcctatgccctgctgggggagttcacccaggccaaggtgatcatcaatgacacagaagatgagcccaccctggagtttgacaagaagatctactgggtgaatgaatctgctggcttcctgtttgcccccattgaaagaaaaggagatgccagcagcatcgtgtctgccatctgctacacagtgcccaagagcgccatgggcagcagcctgtatgccctggagagcggcagtgacttcaagagccggggcatgtctgctgccagcagggtcatctttggacctggggtgaccatgagcacctgtgatgtgatgctgattgatgacagtgaatatgaggaggaggaggagtttgagatcgccctggctgatgccagtgacaatgccagaattggccgggtggccacagccaaggtgctgatcagcggccccaatgatgccagcacagtgtccctgggcaacacagccttcaccgtgtctgaagatgctggcaccgtgaagatccctgtgatcagacatggaacagacctgagcacctttgcctctgtgtggtgtgccacccggcccagcgaccctgccagcgccaccccaggagtggactatgtgcccagcagcaggaaggtggagtttggacctggggtgattgagcagtactgcaccctgaccatcctggatgacacccagtaccctgtgattgagggcctggagacctttgtggtgttcctgagcagcgcccagggcgctgagctgaccaagcccttccaggccgtcatcgccatcaatgacaccttccaggatgtgcccagcatgcagtttgccaaggacctgctgctggtgaaggagaaggagggcgtgctgcacgtgcccatcaccaggtctggggacctgtcctatgagagctctgtgcgctgctacacccagagccacagcgcccaggtgatggaggactttgaggagcggcagaatgctgacagcagccgcatcaccttcctgaagggggacaaggtgaagaactgcaccgtgtacatccatgatgacagcatgtttgagcctgaggagcagttccgggtgtacctgggcctgcccctgggcaaccactggagcggggcccgcatcggcaagaacaacatggccaccatcaccatcagcaatgatgaagatgcccccaccattgaatttgaggaggccgcctaccaggtgcgggagcccgccggcccagatgccatcgccatcctgaacatcaaggtgatccggcggggggaccagaacagaaccagcaaggtgcgctgcagcaccagagatggcagcgcccagagcggcgtggactactaccccaagagccgggtgctgaagttcagccctggggtggaccacatcttcttcaaggtggagatcctgagcaatgaagatcgggagtggcatgagagcttcagcctggtgctgggcccagatgatcctgtggaggccgtgctgggagatgtgaccacagccaccgtgaccatcctggaccaggaggccgccggcagcctcatcctgcctgccccacccatcgtggtgaccctggccgactatgaccacgtggaggaggtgaccaaggagggcgtgaagaagagccccagccctggctaccccctggtgtgtgtgaccccctgtgacccccacttccccaggtatgctgtgatgaaggagcgctgcagcgaggccggcatcaaccagacctctgtgcagttctcctgggaggtggccgcccccacagatggaaatggagcccggagcccctttgagaccatcacagacaacacccccttcacctctgtgaaccacatggtgctggacagcatctacttcagccgccgcttccacgtgcgctgtgtggccaaggctgtggacaaggtgggccacgtgggcacccccctgcggagcaacatcgtgaccatcggcacagacagcgccatctgccacacccctgtggtggccggcaccagccggggcttccaggcccagagcttcatcgccaccctgaagtacctggatgtgaagcacaaggagcaccccaaccgcatccacatctctgtgcagatcccccaccaggacggcatgctgcccctcatcagcaccatgcccctgcacaacctgcacttcctgctgtctgagagcatctaccgccaccagcacgtgtgcagcaacctggtgaccacctatgacctgcggggcatcagcgaggccggcttcctggatgatgtggtgtatgacagcacagccctgggccctggctatgaccggcccttccagtttgaccccagcgtgcgggagcccaagaccatccagctgtacaagcacctgaacctgaagagctgtgtgtggacctttgatgcctactatgacatgacagagctgattgatgtgtgtggcggctctgtgacagctgacttccaggtgcgggacagcgcccagagcttcctgactgtgcacgtgcccctgtatgtgtcctacatctacgtgacagccccccggggctgggccagcctggagcaccacacagagatggagttctccttcttctatgacacagtgctgtggaggacaggcatccagacagacagcgtgctgagcgcccggctgcagatcatccgcatctacatcagagaagatggccgcctggtgattgagttcaagacccacgccaagttccggggccagtttgtgatggagcaccacaccctgcctgaggtgaagagctttgtgctgaccccagaccacctgggcggcatcgagtttgacctgcagctgctgtggagcgcccagacctttgacagcccccaccagctgtggagggccaccagcagctacaacaggaaggactacagcggggagtacaccatctacctgatcccctgcaccgtgcagcccacccagccctgggtggaccctggagagaagcccctggcctgcacagcccacgcccctgagcgcttcctgatccccatcgccttccagcagaccaacagacctgtgcctgtggtgtacagcctgaacacagagttccagctgtgcaacaatgagaaggtgttcctgatggaccccaacaccagtgacatgagcctggccgagatggactacaagggggccttcagcaagggccagatcctgtatggccgggtgctgtggaaccctgagcagaacctgaacagcgcctacaagctgcagctggagaaggtgtacctgtgcaccgggaaggatggctacgtgcccttctttgaccccaccggcaccatctacaatgaaggcccccagtatggctgcatccagcccaacaagcacctgaagcaccgcttcctgctgctggacaggaaccagcctgaggtgacagacaagtacttccatgatgtgccctttgaggcccactttgccagcgagctgcctgacttccacgtggtgagcaacatgcctggggtggatggcttcaccctgaaggtggatgccctgtacaaggtggaggccggccaccagtggtacctgcaggtgatctacatcattggaccagacaccatcagcggcccccgggtgcagaggagcctgacagcccccctgcggaggaacagaagagacctggtggagccagatggccagctgatcctggatgacagcctcatctatgacaatgaaggagaccaggtgaagaatggcaccaacatgaagagcctgaacctggagatgcaggagctggccgtggccgccagcctgagccagacaggagccagcatcggcagcgccctggccgccatcatgctgctgctgctggtgttcctggtggcctgcttcatcaacaggaagtgccagaagcagaggaagaagaagccagctgaggacatcctggaggagtaccccctgaacaccaaggtggaggtgcccaagaggcacccagacagagtggagaagaatgtgaacagacactactgcaccgtgagaaatgtgaacatcctgtctgagcctgaggccgcctacaccttcaagggggccaaggtgaagaggctgaacctggaggtgcgggtgcacaacaacctgcaggatggaacagaggtgtag

SEQ ID NO: 217806 - DNA, 12039 bp, Artificial Sequence
  derived and/or modified sequence
atgggcgtgctgaaggtgtggctgggcctggccctggccctggccgagttcgccgtcctgccgcatcattccgagggcgcctgtgtatatcaggattctctgctggccgatgctacaatatggaagccagattcctgccaatcttgcaggtgtcacggggacattgtgatttgcaagccagcagtttgccggaatccacaatgcgcgttcgaaaagggcgaagtgctgcagattgcagcaaaccaatgctgccccgaatgcgtattgcggacccccggttcatgtcatcatgagaaaaaaatccacgaacacggtaccgagtgggctagctctccttgcagcgtatgctcatgtaaccacggcgaagtgcggtgtacccctcaaccatgcccacccctcagttgtgggcatcaggagctggcctttatccctgaaggctcttgctgtccagtgtgcgtgggactggggaaaccatgtagttacgagggccatgtgtttcaagacggagaagattggagattgtctcgctgcgccaagtgcctatgtagaaatggcgtggcacagtgtttcaccgcacagtgccaacctctcttttgtaatcaggacgagacagtggttcgcgttcctggaaaatgctgtccccaatgtagcgctcggagctgttcagcagctggccaggtttacgagcacggagaacagtggtccgagaacgcttgtactacatgtatctgcgatcggggcgaggtgaggtgtcataagcaagcgtgcctgccgctgcgctgcgggaaaggtcagtctagagctcgaagacacggccagtgttgtgaggagtgtgtttccccagcaggaagctgtagttatgacggggtggtgcgttatcaggacgagatgtggaagggcagtgcttgcgagttttgcatgtgcgaccatgggcaggtcacatgtcagacaggagagtgcgccaaagtagagtgcgccagggacgaagagttgatccaccttgacggcaaatgctgtcctgagtgcattagtcggaacggatactgcgtgtacgaagagaccggggagtttatgtcttcgaacgcaagcgaagtcaagcggatcccagagggcgaaaagtgggaagatgggccttgtaaagtctgcgagtgccgcggagcccaggtcacatgttatgaaccctcgtgccccccttgtcctgtcgggactttagcattggaggtgaagggccaatgctgccctgactgtaccagtgttcactgtcaccctgactgcctgacctgctctcaatctccggaccactgcgatctgtgccaggacccaaccaagctgttgcagaatggctggtgtgtgcatagttgtggtctgggcttctaccaagctggcagcttatgcctcgcctgccagcctcagtgctctacgtgtaccagtggcctggaatgttcgtcgtgccagccccctctgttgatgaggcatggacagtgcgtacctacatgtggagatggtttctatcaggaccggcatagctgtgctgtttgccatgagtcttgcgccgggtgctggggacctacagagaagcactgcctcgcatgtagagatccactccacgtcctaagagacggcggatgcgagtcttcgtgcgggaaaggcttctataaccggcagggcacctgcagcgcttgtgaccaatcgtgtgactcttgtggcccatccagtcccaggtgccttacgtgcactgagaagaccgttctgcacgacggaaagtgcatgtcagagtgtccgggaggctattatgctgatgctacggggcggtgcaaggtctgtcacaatagctgtgcgtcctgcagtggacctacaccctctcactgtactgcttgctcaccacctaaagccctccggcaaggacattgcctccctaggtgcggcgaaggcttttacagtgatcatggtgtgtgcaaagcttgccactcttcatgtctcgcttgcatgggacctgccccaagccactgcaccggctgcaaaaaacctgaggagggactccaggttgagcaactgagcgatgtgggcatcccatcgggtgagtgcttggcccagtgcagagctcacttttatctggagtccacagggatctgcgaggcatgtcatcagtcttgttttcgctgcgcaggcaagtcgccccacaattgcacagattgcgggccgagccacgtactcctagatggccagtgtctgtcccaatgtcccgatggatattttcatcaggagggcagctgtacggagtgccacccaacctgccggcaatgtcacggccctctagagtcggattgcatttcttgttaccctcacataagtctgactaacggaaactgccgcacctcctgccgcgaagaacagtttctgaacctcgttgggtactgcgcagattgccaccacctatgtcagcattgtgctgctgacttgcacaacaccgggagcatttgcttacggtgccagaacgctcactacctgctgctgggagaccactgcgtgccagactgtccgtctgggtattatgccgagaggggcgcttgcaagaagtgccactccagctgccgtacctgtcaaggccgtggtccttttagctgcagctcatgtgatactaacctcgtgttgtcccacactggaacctgctcgactacttgctttccaggccactatctagacgacaaccacgtttgccagccctgtaacacccactgcgggtcctgcgactctcaggcctcttgcacatcttgccgcgatcccaacaaggtgctcctgtttggcgagtgccagtatgaatcttgcgcgccacagtattatttggatttttcaactaatacctgtaaggagtgtgactggagttgtagcgcttgtagcggtcccctgaagacggattgtctgcagtgcatggatggttacgtgctccaggacggtgcctgcgtggagcagtgcttatcaagcttttaccaggatagtggcctgtgtaagaattgtgacagctactgcctccagtgccaggggccccacgagtgtactcgctgcaaggggccatttctcctgttggaggctcagtgtgtccaagagtgcggcaaaggatacttcgcagatcatgccaagcacaagtgcacggcttgtccacagggatgtttacaatgctcacacagagatcggtgtcatctctgtgatcatggattcttcctgaaatccggcttgtgtgtttataactgcgtaccagggttttccgtgcatacttctaacgagacctgcagcggtaagattcacacacctagtttgcatgtgaatggctctctcatattgcccattggcagtatcaagcccctggattttagcttactgaacgtgcaggaccaagagggcagggttgaggacttactctttcatgtggttagtactcccactaatggtcagctggtcctgagccgaaacggaaaagaggtgcagctggacaaggcagggcggtttagctggaaggatgtgaacgagaagaaagtccgattcgtgcactccaaggagaaactcaggaaaggttatttgtttctgaaaatcagcgaccagcagttcttcagcgagccgcagctgatcaatatccaggccttctccacccaagccccttacgtgttacgtaacgaggtcttacacatcagtcgcggtgagcgcgcaactattaccacacagatgttggatatccgagatgacgacaatccgcaggatgtagtgattgaaatcatcgacccccctctgcatggccagcttttgcagaccctccagtcaccagccacgcccatttatcagtttcaattagacgaactctctagaggtcttctgcactacgctcatgacggaagtgactctacaagcgacgttgcagtgcttcaggccaacgacggccatagtttccacaacatcctctttcaggtcaaaacggttcctcagaacgacaggggtctgcagctcgtggccaactcgatggtttgggttcccgagggtgggatgctccagattactaatcggatcctgcaggccgaagcaccgggagcctctgcggaagagattatttacaaaatcacacaggattacccccagttcggagaggttgtcttgctggttaatatgcctgctgatagccccgccgacgaaggacagcatttgccagatggaagaactgccacgcccactagtacgttcacccagcaggacattaacgagggaatcgtatggtaccggcactctggcgcacccgcacagagtgattcctttcgattcgaagtgtcctcagccagcaatgctcaaactcgattggagagccacatgttcaatatagcgatcctgccgcagaccccggaggctcccaaggtgtcactagaggcctcgctccatatgaccgcaagggaagacggccttacagttatccagccacactctctctcttttatcaactctgaaaagccctccggcaagatcgtgtacaatatcaccctgcctcttcacccaaaccaaggtatcatagagcatagagaccacccacacagtccaatcaggtactttacccaggaggacatcaatcagggcaaggtcatgtatcgcccgccgcctgctgctcctcatctgcaggagttgatggccttttctttcgcaggtctgcccgaatcggtgaagttccactttacagtgtctgatggggaacacactagtcctgagatggttttgaccatccatttattaccgagcgaccagcagttgcctgtgtttcaagttacagccccacgcctcgcagtttcgccaggcgggtccacgtctgtagggttgcaggtcgttgtgcgtgatgccgaaaccgctcccaaggaactgtttttcgaattaagaaggcctccccagcatggagttcttctaaagcacaccgccgagtttaggcgccccatggctactggagatacctttacctacgaagacgtggaaaagaatgctctgcagtacatccatgacggaagctctactagggaggacagcatggaaatttccgtcactgacgggttgacggtcacaatgctcgaggtccgggtggaggtgtctctcagcgaggatcggggacctcggctcgctgctggtagctccctgagcatcacggtcgcgtctaagagcacggccattattacacgctctcatttggcctacgttgacgactcttcacccgatcccgagatttggatacaactgaattatctgccatcatatggtacactgctccgcatctctggttccgaggtggaggagctctcagaagtgtctaacttcactatggaagatattaacaacaagaagatccgttatagcgctgtcttcgagacagatgggcatctggtcaccgacagcttttattttagcgttagtgatatggaccataaccatttagataatcagatattcactattatgatcacacccgccgaaaatcctcccccagtaatcgcctttgctgatctgatcactgtggatgagggggggagggcccctctgtcctttcaccacttttttgcgactgacgacgatgataacttacaacgggacgccatcattaaattatctgcactccctaagtatggttgtattgagaataccgggaccggtgatcggtttggaccggagaccgcatccgatctggaggcaagtttccccatccaggacgtgcttgaaaactacatatactacttccagtcagttcacgagtcaatcgaaccaacccatgatattttctcattttatgtgtcagatggcacatcccgctctgagattcattccattaacatcactatcgaacgcaaaaatgacgaaccacccagaatgactcttcagcccctacgggtacagctcagcagtggcgtcgttatcagcaactctagtctctctttgcaggacctagatacccccgataatgaattgatctttgttctcacaaagaaacccgaccatgggcatgttctgtggaggcagactgcctctgaacccctggaaaacggtcgtgtgttggtccaaggatcaaccttcacctatcaagatatcctggccggacttgtgggctatgtgccaagtgtccccgggatggttgtcgatgagtttcagttttccctgacagatggacttcatgtggacacaggccgcatgaagatctataccgaactaccagcaagcgatacccctcacctcgctattaaccagggtctgcaactgagcgccgggtccgtcgccagaattaccgagcaacacctcaaggtcactgacattgacagcgacgatcatcaagtgatgtatattatgaaggaggaccccggcgccggtcggctgcagatgatgaagcacggcaacctggaacagatcagtatcaaaggccctattcgcagcttcacccaggcagacatctcacagggccacgtggagtattcacatggaactggagagcctggtggcagttttgcttttaaattcgacgtggtcgatggagagggaaacaggttgatcgataaatcctttagcatctccattctggaagacaaatcccccccagtcatcactactaataagggcctggtgctggacgagaattcagtaaaaaaaataactactttgcagctgtcggccactgatcaggacagcggtccaaccgaactgatctacagaatcactcggcaaccacagctcggacacttggagcacgcggcttcccctggcatccagatttcctctttcacccaagccgaccttacctcgaggaacgtgcagtacgttcactcttctgaagctgagaaacatagtgatgctttttcattcaccctgagcgacggcgttagcgaggtgacacagacattccacattacacttcacccagtggacgacagtctcccagtagtccaaaacctggggatgcgcgtgcaggaaggcatgagaaaaactatcacagaattcgagctaaaggctgtggacgccgataccgaagctgaatccgtaacttttacaatagtgcaaccgccccgacatggaacaattgagcgaacgtctaatgggcagcactttcacctgacttccactttcaccatgaaagacatttaccagaacagggtttcatattcacacgacgggtcaaatagcctgaaagacaggttcacattcactgtaagcgatggcactaaccccttcttcattatcgaggaaggcggtaaggaaatcatgaccgcagccccccaacccttccgcgtagacattctccctgtcgatgacggcacgcctagaatcgtgactaatctgggactgcagtggctggagtacatggatggcaaggctacaaatctaattacaaagaaggaactgctgaccatggatccagatacagaagatgctcagttagtgtacgagatcaccacaggacctaaacatggctttgtggagaataaactccaaccagggagagccgctgcaacattcacgcaggaagacgttaatttagggctgatccgatacgtgctgcataaagagaagattagagagatgatggacagcttccagtttctcgttaaagattccaaaccaaacgtggtttcggacaacgtgtttcacatccagtggtccctcatttccttcaagtacacatcttacaatgtctccgaaaaggccggatcagtttccgtgaccgttcagcgaaccggcaacctgaaccagtatgccatcgttttgtgtcgcaccgaacaagggacggcatcttcttcgagtcgggtgagcagccaacccggccagcaggactacgtggaatatgccggtcaagtacaattcgacgaaagggaggatacaaaaagctgcacaatcgttatcaacgatgacgatgtgtttgagaatgtggagtcgttcacagtggagttgtcgatgccagcgtacgccctgctgggcgagttcacacaagccaaggtgattatcaacgatacggaggatgagccgacccttgagttcgacaagaagatctattgggttaatgagagcgctgggttcttgttcgctcccattgaacgcaaaggcgacgcatcctccatagttagcgccatatgctacacagtccccaagtccgccatgggcagctcgctgtatgccttagaatcaggtagcgactttaaatcacgcggcatgtccgcggcgtccagagtgatcttcggacctggcgtcaccatgtccacctgcgacgtgatgcttatagacgacagcgagtatgaagaagaggaggagttcgaaatcgctctcgccgacgcgtccgataacgcgcgcatcggcagggtggcgactgcaaaagtgcttattagtgggccgaatgacgctagcactgtcagtctggggaacactgccttcaccgtgagcgaggacgccggcactgtcaagataccagtaattaggcatggcactgacttgtctaccttcgccagcgtttggtgcgccacacgtccgagcgatccggcatccgccacccctggggtggactacgtcccgtctagtcggaaagtggagttcgggcctggtgtgattgagcaatattgcactttgacgattcttgacgacactcaataccccgtgatcgaaggcctggagaccttcgttgtgttcctgtcatcagcacagggagccgaattgacaaagcccttccaagccgttatcgcaatcaacgacacatttcaagatgttccttcaatgcagttcgcaaaagatttgctcctggttaaggagaaagagggtgtgcttcatgtcccgattacaagaagcggagatttgagttatgagtcatccgttcgctgctacacccagagtcatagcgcccaagttatggaagactttgaagagcggcagaatgctgacagctctcgcattacattcctgaagggagacaaagtgaaaaattgtacagtgtatattcacgatgactctatgttcgagccagaagaacaattccgcgtatatttgggtttgccgctcggaaatcactggagcggcgccaggattggcaaaaataacatggcaaccatcaccatctctaacgatgaagacgcccccacgatcgaattcgaggaggcagcgtaccaggtgcgtgagcctgcaggccctgacgctatcgctatcctgaacattaaggttattaggcgaggcgaccagaataggacatcaaaggtcagatgttcaactagggatgggagcgcccaatctggtgtggattactacccaaaatcccgggtactgaaattctctcccggagtcgatcacattttctttaaggtggagattctgagtaacgaggatagggagtggcacgaatcattctctttggttttaggccctgacgaccccgtagaggcagtattgggtgatgtgacaaccgccaccgtgacaatactggaccaggaggccgcgggttccctgattttaccagcacctccaatcgtggttacgctggccgattatgaccatgtggaagaggtgactaaggagggcgtcaaaaagagtccctctcccggctatccgctggtatgcgttaccccctgtgatccccacttccctcggtatgccgtcatgaaggaacgctgctctgaggcaggcattaatcagacctcggtgcagttctcttgggaagtggcagcccccacagatggcaacggcgcgcgcagcccctttgagacaattactgataacacccctttcacatccgttaaccacatggtcctggatagtatttattttagccgaagatttcacgtgaggtgcgtcgctaaagcggtagataaggttggccacgtcgggactccattgcgttctaatatcgtcacgatcggcaccgacagcgcaatttgtcacaccccagtggtggcgggcacttcacgcgggtttcaggcccagagctttatcgccactctgaaatatcttgacgtgaaacataaagaacaccctaatcgcattcatatatccgtgcagatcccacaccaagatggaatgcttcccctgatttctaccatgcctcttcataaccttcacttcttgctgtccgaatctatatacaggcaccagcatgtgtgttccaatctggtgacaacttacgatctcaggggtattagcgaggccgggtttctcgatgacgtggtctacgactccaccgccttaggacccggttatgacaggccttttcagttcgatccctcagtccgcgaacccaaaacaattcagttgtataaacatctaaatctaaagtcttgtgtttggacctttgacgcctattacgatatgaccgagctcattgatgtttgcggtgggtctgtgacggctgattttcaagtcagagactctgcccagtcttttctgacagtgcacgtgcctctatacgtttcctacatctatgtaactgctccacgcggttgggcaagcttggagcaccacacggagatggaattctccttcttttacgacacagtgttatggaggacagggatccaaactgacagcgttctttcggcgagactccaaatcatcagaatttacattcgcgaagacggtcgtctggtcattgaattcaaaacacacgctaaattcagggggcagttcgtgatggagcaccatacattaccagaggtgaagtcttttgttctgacccctgatcatttgggagggatcgaatttgaccttcagttattgtggtcagcccaaacctttgatagcccccatcagctatggcgagccactagttcttacaaccgaaaagattattctggcgagtacactatatacctcattccatgtacagttcagcctactcagccttgggtggaccctggcgagaaaccactagcctgcaccgcgcacgcccccgagcggttccttattcccattgcctttcagcagactaatagacctgtcccggtcgtgtactcacttaatacggaatttcagctgtgcaataatgaaaaagtctttctcatggatccaaatacatccgacatgtctctggcggaaatggactacaagggagccttcagtaaaggccagatcttatacgggagagtgttatggaaccccgaacagaacctgaattcagcctacaagctgcagctcgagaaggtttacctgtgcactggtaaagacgggtatgtgccgttcttcgatccgacaggcacaatttataacgaaggccctcagtatggatgcatccagcccaacaaacacttgaagcatagattcctcctactcgaccgtaatcagcccgaggttacagataaatacttccatgatgtgccatttgaagcgcactttgcctcggagctcccagatttccacgtcgttagcaatatgcccggcgtggatgggttcacccttaaggtggatgctctgtataaagtagaggccggtcatcagtggtacttacaagtaatctacatcattgggcccgatactatcagcgggcctagggttcaaagatctcttacggctcctctgcgccggaaccggcgggatctggtcgagccggacgggcagttgattctggatgattctctcatctatgataacgaaggagaccaggtcaagaatgggaccaatatgaagtctctgaacctagaaatgcaggagcttgcggtggcggcctccctctcacaaaccggagcttctattgggtctgccctggccgcgatcatgttactgcttctggtgttcctggtggcctgctttatcaatcgcaagtgccaaaaacagcggaaaaaaaagcctgcagaagacatccttgaagagtacccactgaacacaaaggtcgaagtgcctaaacggcaccctgacagagtggagaagaacgttaacaggcactactgcactgtgcggaacgtgaacatcctttcagagcctgaggccgcgtacacattcaagggcgccaaagtgaagaggcttaatctcgaggtgcgggtgcataataacctccaggatggcactgaggtgtag

SEQ ID NO: 217807 - DNA, 6726 bp, Artificial Sequence
  derived and/or modified sequence
tgaagcgaggtgagcaacttcaccatggaggacatcaacaacaagaaaatccgctacagtgctgtcttcgagactgatgggcatctggtgactgacagcttctacttctccgtgtctgacatggaccataaccacctcgacaatcaaatctttacaattatgataacgccagctgaaaacccacctcctgtcatcgccttcgccgatttgatcactgtggatgagggtggcagggcacccttgagtttccatcacttctttgcaactgatgatgacgataacctccaacgggacgcaattataaaacttagtgctttgccgaaatacggctgcatagagaacacaggcacaggggatcgcttcggccccgaaacggcctctgacctggaagcatcattccctatacaggatgtgttagagaattatatctactatttccagagcgttcacgaatccatcgaacctacacacgacatcttctctttttatgttagcgatgggacctccagatcagagatccacagtattaatatcactatcgagcggaaaaatgatgagccaccgcgcatgactcttcagccactcagagtgcaactgtcatccggagtagtgatcagtaactcatccctttccctgcaggatctggatacccccgacaacgagctgatattcgtactgactaagaaacccgatcacggacatgtcctctggcgccagactgcatccgagccactcgagaacggcagagttttagtacaagggtcaaccttcacatatcaggatatccttgctggattagtgggatatgttcccagcgtacctggaatggtcgtcgacgaatttcaattcagtttgactgacggcctccatgtcgataccggccggatgaaaatatataccgagctgcctgcaagtgacacgccccacttggcgatcaaccaggggttgcagttatccgccgggtctgtggcccgcataactgagcaacacttaaaagtaactgatatcgacagtgacgaccaccaggttatgtacataatgaaggaggacccaggcgctggccgactccagatgatgaagcacggtaacctggaacagatcagcattaaaggcccaattcggagctttacccaggccgatattagtcaaggccacgtcgaatactcgcatggtacaggcgagccaggagggagtttcgcttttaaattcgatgtggttgatggcgaaggcaaccgtctgatcgacaaatccttttcaatttcaattctggaggacaagagccctcctgtgattacaacaaacaagggcttggtgctggacgagaactcagtaaagaaaatcacaactctacagttaagtgcaaccgaccaggatagcgggcccaccgagctgatttaccgtattacgaggcagccccagctgggccatctggagcatgcggcctcgcccggcattcagattagctcatttacacaagctgaccttaccagtcgcaacgtccagtacgtacattcttcggaagctgagaagcattctgatgccttctcattcaccctgtcagacggcgtctccgaagtgacccagaccttccacatcacgctgcaccccgtggatgattctttaccggtggtgcagaatctaggcatgcgtgtacaagaagggatgcgaaagacaatcacagagtttgagctgaaggccgtggacgcagacaccgaggctgagtctgtcacatttacaatcgtccagccaccccgtcacggtaccatcgaaaggacctctaacggacagcattttcatctaacgtcaacctttactatgaaggacatctaccagaatcgggtcagctacagtcatgacggatccaacagcttaaaggaccgattcacattcacagtttcggatgggacgaaccccttttttataatcgaagagggcggtaaggagattatgaccgccgctccgcagccctttcgggtcgacatcttacctgtggacgatggtacgccaagaatcgtaacaaacctggggcttcagtggttagagtatatggatggcaaggctacaaatctgatcacaaagaaggagctgctgaccatggaccctgatacagaagatgcacagctggtgtatgagattaccaccggccctaagcatggattcgttgagaataaattgcaacccggtcgcgccgctgccaccttcacccaggaggacgtgaatctgggcttaattcgctacgtgcttcataaggagaagatccgtgagatgatggatagtttccaattcctcgtaaaggatagtaaaccaaacgttgtctccgataatgtgtttcacattcagtggtctctgattagtttcaaatacacttcttataatgtttctgaaaaagctggatcagtgagtgtcaccgtgcaacggactggaaatctgaaccagtatgcaattgtactgtgtagaaccgaacagggcactgctagtagcagcagccgcgtctccagccagccaggtcagcaagactacgtggaatacgcagggcaagtccagttcgacgagagagaagacaccaaaagctgtaccatcgtcatcaatgacgatgatgtatttgaaaacgtagaaagtttcacagtcgaacttagcatgcctgcctatgctcttctcggcgagtttacacaggctaaggtaatcatcaacgatacagaagacgaacctacgttggagttcgataaaaagatctactgggtgaacgaaagcgccggctttctctttgctcccatcgaacgaaaaggggatgcaagctccatagtgtccgccatctgttatactgtgcctaagagcgcaatgggaagctctctgtacgccctggagtcgggcagcgactttaagagcaggggcatgtcagctgcatcccgagttattttcgggcccggggtaactatgtcaacatgcgatgtcatgctgatcgatgattccgagtacgaagaggaggaagagtttgagatcgccctggctgacgctagcgacaatgcccgtatcggccgtgtggccactgccaaggtcttgatttccgggcccaacgatgcctctacggtaagccttggcaacaccgcgttcacagtgtctgaggatgctggtaccgtgaagattcccgtgattcgacatggaactgacctgtcaacttttgcttccgtctggtgtgctacgagaccctcagatccagcatccgccacgccaggggtcgactatgtcccttctagccgcaaagtggaatttggacccggcgtgattgaacagtattgcacacttacaatattggacgatacccaatacccagtaatcgagggcttggaaacattcgtcgtttttctctcatccgcacagggtgccgagcttaccaaaccctttcaggccgtgatagctatcaacgacacattccaggatgtaccttccatgcagtttgcaaaggacttattgttggttaaggagaaggaaggagttcttcatgtgcctatcactaggagcggcgatctgagctatgaatctagcgtccgatgctacacacaaagtcatagcgctcaggtgatggaagattttgaagaaaggcaaaatgccgacagctctaggatcacttttcttaaaggggataaggtcaagaactgtaccgtgtatatccacgacgacagcatgttcgaaccagaggaacaatttcgtgtgtacttaggtctgccactgggcaatcattggtcaggcgcccggataggaaagaacaacatggctaccattacgatttccaatgatgaagatgcacccaccatcgagttcgaggaggcggcttaccaagtaagggagcctgccggtcccgacgccattgccatcctaaacattaaggttatcagacggggagatcaaaataggacctctaaggtgaggtgctcaacacgcgatggtagcgcacagtcaggtgtcgactactacccaaaatcaagagttctgaaattcagtcctggagtggatcacattttcttcaaggtggagatattgagtaatgaagaccgtgaatggcacgaaagttttagtcttgtgcttggtcctgacgatccggtggaagccgtgcttggcgatgtgaccacggcaaccgtcaccatcctggatcaggaggctgccggaagtctgattctccccgctcctcccatcgtagtaaccctagctgactacgatcatgtggaggaagtgactaaggagggcgttaagaagtctccaagcccagggtatccactcgtctgcgtaacaccatgcgacccacactttccccggtacgctgtgatgaaggagcgttgtagcgaagcgggaatcaaccagacatctgtgcagttctcctgggaggttgctgcccctactgacggtaacggcgcccggagtcctttcgagactatcacggacaatacgccctttacttctgtgaatcatatggtcctggacagtatctacttctcacggcgctttcacgtcaggtgcgtggcaaaggccgtggataaggtggggcatgtgggcacccctctgaggtcaaatatcgtgaccatcggaactgactccgcgatctgccacaccccagtggtggccggaacctcccgtggattccaggctcagtctttcatcgctacactcaagtacctggacgttaagcacaaggagcacccaaatcgcatccatatcagcgttcaaattccccatcaagatggcatgctaccactgataagtacaatgcctctgcataacctgcattttctactgtccgagtcaatatatcggcaccagcacgtctgtagcaacctcgtgaccacatatgacctcagggggattagcgaagccgggttcctggatgatgtggtttatgacagcactgcactgggccccggatacgacaggccgttccaatttgatccatcggtgagggagccaaagaccatccagctttataaacatctcaatcttaagagctgcgtttggaccttcgacgcctattacgatatgaccgaattaatcgatgtgtgcggaggctcagtcacagccgattttcaggtccgcgacagtgcccagagttttcttactgtccacgttccactctacgtgtcttacatctacgtgactgctcctcgaggctgggccagcttagaacaccatacagagatggagttctccttcttttatgataccgtgctgtggcgcactggcatccagaccgactcagtgctctcggccaggcttcagataatcagaatctatattcgcgaggatgggcggctcgtgatcgagttcaaaacacacgcgaagttcaggggacaatttgtgatggaacaccataccctgcccgaggtgaaaagctttgttctgactcccgaccacctgggaggaattgaattcgatctgcagctcttgtggtccgctcagacctttgattctccgcaccaattatggcgcgctacatcatcgtacaataggaaagactatagcggcgaatacacgatctacttgattccatgcactgtgcaacctactcagccttgggtcgacccaggcgaaaaacctcttgcttgtactgcacacgctcccgagcgattcctgatccctatcgcgtttcagcagaccaaccggccagtccctgttgtatatagcctaaacactgagtttcagttgtgcaacaacgaaaaagtgtttttaatggaccccaatacatcggatatgtccctcgcggagatggactacaagggggcctttagtaaaggacaaattctgtacggaagggtgctttggaaccccgaacagaatcttaatagtgcgtacaagctccagctggaaaaggtctacttatgtacagggaaggacgggtacgtgccctttttcgatcccacggggaccatttacaacgagggaccccaatatggctgtatccagccaaacaaacacctgaagcatcggttccttctgttagaccggaatcagccagaggtgactgacaaatattttcacgatgttccatttgaagcccacttcgcatccgaattgcctgactttcatgttgtgagcaacatgcccggtgttgatggtttcacactgaaggtagatgccctctataaggtggaagccgggcaccaatggtacctccaggttatttatattattgggcccgacaccatctcagggcctagggtgcagcgctctctgactgcacccttgcggcggaatagacgcgatctggttgagcccgatggccagctgatcttagacgactccttgatttatgataatgaaggggatcaggtgaagaatggcacaaatatgaagtccttgaacttggagatgcaggaactcgctgtagcggcgtccctgagccagacaggcgcgtctatcggttccgcgctggctgcgattatgctgctgttgcttgtgttcctggtagcttgttttattaaccggaaatgccagaaacagagaaagaagaaacccgcggaggatatcctggaagagtatcctttaaataccaaagtggaggtccccaaacgtcatcccgaccgggtcgagaaaaacgttaataggcattactgtactgtgcggaacgtcaatattctgagtgagccggaagccgcttacacctttaagggggcaaaggtaaagcgtctaaacctcgaagtgcgtgtgcacaataatctccaggacggcactgaggtctag

SEQ ID NO: 217808 - DNA, 12039 bp, Artificial Sequence
  derived and/or modified sequence
atgggagtgctgaaagtgtggttaggattagccctagcattggccgagttcgcagtgctcccacaccacagcgagggagcttgcgtatatcaggattctctcctggccgacgccaccatctggaaaccggacagctgccagagttgtaggtgccacggagacattgtaatatgcaaacctgccgtttgtcggaaccctcagtgtgcctttgaaaagggcgaggttctgcagatcgctgcgaaccagtgttgcccagaatgcgtgctccgtacaccaggctcatgtcaccacgagaagaagattcacgagcatgggaccgagtgggcatcatctccctgcagcgtgtgttcatgcaaccatggcgaagtacggtgcacgccccaaccctgcccccctctgtcttgcggccatcaggagcttgccttcatcccagaaggcagctgttgccctgtgtgcgtcggccttggaaagccctgcagttatgaaggccatgtgtttcaggatggggaagactggcggttgtcgcggtgcgcgaaatgcctgtgcagaaatggcgtcgcccaatgtttcactgcccagtgtcagcccttgttctgtaaccaagatgaaaccgtagtgagagttcccggaaagtgttgcccgcaatgcagcgcccgttcatgttctgccgcaggccaagtgtacgaacacggcgaacagtggagtgagaatgcatgcaccacttgcatttgtgatcgcggagaggtgaggtgccacaagcaggcttgcctgcctctgcggtgcgggaaaggccagtcgagagcccgacgccacggtcagtgctgtgaggaatgcgtcagccccgctggatcttgctcgtacgatggcgttgtgagatatcaagacgaaatgtggaagggaagcgcgtgcgagttttgtatgtgcgaccacggccaggtaacctgccagacaggtgaatgtgctaaagttgagtgcgccagggacgaagaactgatccacctggacggcaagtgctgtccagagtgtattagtagaaacggttactgtgtgtacgaagagaccggcgagtttatgtctagcaacgcctccgaggtgaagaggattcctgaaggcgaaaaatgggaggatggtccttgtaaagtgtgcgaatgcagaggcgctcaggttacctgttatgaaccatcctgcccaccatgtcctgtgggcacattggcccttgaggtgaagggccaatgttgccctgactgcacatccgtgcattgtcaccctgactgtctgacctgctcccagtccccagatcattgcgatctgtgtcaggaccccacaaaactgttacagaacgggtggtgcgtccacagttgtggcctaggtttttaccaggctggatcactgtgtctcgcatgtcagccacaatgctccacatgtaccagcggactggagtgttctagctgccaaccacctctgctgatgagacacgggcagtgcgttcccacctgcggggacggattttatcaggaccgacactcttgcgctgtttgtcatgagtcctgcgctgggtgctgggggcctacggagaaacattgcctggcatgccgggatcccttgcatgtgctgcgtgatggcggatgcgaaagcagctgcggcaagggattttacaaccgacagggaacttgttctgcatgcgatcagtcttgtgactcttgtggaccctccagccctcggtgtcttacatgtactgagaagactgtcctgcacgacggaaaatgtatgagtgagtgtcctgggggatattacgctgacgcgacaggtcgttgcaaggtctgccacaattcttgcgcctcatgtagcggtcctaccccctcacactgcacggcctgctcaccacctaaggcactgcgacagggccactgcctaccccgatgcggagaggggttttattcagatcatggagtgtgcaaggcgtgtcatagttcatgcctcgcttgtatggggcctgccccttcacactgcactggttgtaaaaagcccgaagaaggccttcaggtggagcagctttcagatgtcggaatcccaagcggcgagtgcttggcacagtgtagggcccatttctatctagagagtactggcatttgcgaggcatgtcatcagagctgctttcgctgcgccggtaaaagtccccataactgtacggattgcgggccttcccatgtgctactcgatggccaatgcctgtctcagtgcccagatggatacttccaccaggaaggtagttgcactgagtgccatcctacttgccggcagtgtcacggcccacttgaatctgattgcatttcttgttatccacacatttctctcacaaacggcaactgcaggaccagctgtagggaagagcaatttttaaacctggtcggatactgtgcagattgtcaccatctttgccagcattgtgctgccgatttgcacaatacaggaagcatttgccttagatgtcagaatgcgcattacctactgctgggggatcattgcgtgcccgactgtccgagcggctattacgccgagaggggtgcctgcaagaagtgtcatagtagctgccggacctgtcagggtcggggacccttctcttgtagctcatgcgatactaacctcgtgctctcccacacagggacatgttccaccacttgctttcctggccactatttagacgacaatcacgtgtgccagccttgcaatacacactgtggttcttgcgactcacaagctagttgtacttcctgtcgtgatcctaataaggtcctcctgtttggtgagtgccagtatgagagctgcgccccacaatactatctcgatttttctacgaatacatgcaaagagtgcgactggtcttgctcagcatgctcagggccactcaagacggactgcttacaatgcatggatgggtatgtcctgcaggacggcgcatgtgtcgaacagtgcctgagctccttctatcaggacagtggtttatgcaagaactgcgactcctactgcctccagtgtcagggtccccacgagtgtacccgctgcaagggtccgtttctgctgttggaagcacagtgcgtgcaggagtgtggcaagggatattttgctgaccacgccaagcacaagtgcaccgcctgccctcaaggctgtcttcagtgctcgcaccgcgatagatgtcatctgtgcgatcacggcttttttttgaaatctggtctgtgtgtgtataactgcgttccgggtttttccgtacacacttctaacgaaacatgctctgggaaaattcataccccctctttgcacgtaaatggatcccttatcttgccaatcgggtccataaagccactggacttctcattgctcaacgtgcaggatcaggaggggcgtgtggaagacctcctgtttcacgttgtctctacccctaccaacggtcagctcgtgctttcgcggaatgggaaggaggtacagttagataaagcagggcgtttttcctggaaagacgtgaatgaaaaaaaggtaaggtttgttcattctaaagagaagctgagaaaaggctacctgtttctcaagatctcagatcagcagtttttctccgaacctcagttaattaacatccaggccttctctacccaggccccatacgtcctaaggaacgaagttttgcacatttctaggggagaaagggccacaatcacgactcagatgcttgacatccgggatgatgacaatccccaggacgttgtgatcgaaattatcgatccacctctccacggacagctcctgcagactctgcaatccccagctaccccaatctatcagtttcagctggatgaattgtcccggggactgctgcactacgcacacgatggctctgactcaacttcggatgtcgcggtgctccaggctaatgacggacactctttccacaacatcctgttccaggtcaagacagtcccacagaacgacagaggcctccagttggtggctaattctatggtgtgggtgcccgaaggtggcatgctgcagattacaaacagaattctgcaggctgaagcaccaggtgcaagtgccgaagagatcatttacaagatcacacaggattacccccagttcggggaagtggtgcttcttgtgaatatgccagccgactcccctgccgacgaggggcagcacctgccagacgggcgaacagctactcccacctccacattcacccagcaggacatcaacgagggtatcgtctggtatcgccattctggcgctcctgcccagtcagactccttcaggttcgaagtctcatcagcttcaaatgcacaaacgcgactcgagtcccacatgtttaatatcgcgattcttccccagactcctgaagcaccaaaggtgtccctggaggccagcctgcatatgaccgcgagagaagatggtctcaccgtcatccagccccactccctgtcttttataaacagcgaaaagccatccgggaagattgtctataatatcactttgccactgcatcctaaccagggcatcatagagcaccgggaccacccccactcccctattcgctactttacccaagaggacatcaatcagggcaaagtcatgtacaggccccctccagcagccccacatcttcaggaactgatggccttctccttcgctggtcttccagaaagcgtgaagttccactttaccgtcagtgatggtgagcatacctctccagaaatggtgctgaccattcatctcttgccgtcagaccaacagctgcctgtcttccaggtgactgcccctaggctggctgtttcaccaggaggcagcacttcagttgggctgcaggtcgttgttcgcgatgcggaaactgccccaaaagagctgttttttgaactgaggagacctcctcaacatggagtattgcttaagcacacagccgaatttcgaagacctatggctacaggggacactttcacttatgaggacgtggagaagaatgctttgcagtatattcatgatgggtcttcaacacgggaggacagcatggaaatatcagtgacagacggtttgacagttaccatgttggaggtgcgcgttgaagtatctctgtccgaagatagggggcctcggctggcggcagggtcatccctcagcataaccgtggcatcaaagagtacggctatcatcacccgctcacacctggcttatgtggacgatagtagccctgatcctgagatctggatccagctgaactaccttcccagctacggaacactcctgagaataagtggctcagaagtggaggagctctcagaggtaagcaactttacgatggaagatatcaataataaaaaaattagatatagcgctgtgttcgaaaccgatggacacctggtcacagactctttctacttttctgtgtcggatatggaccataatcatctcgataatcaaatctttactatcatgataacaccagcagagaacccgcctcctgtcattgctttcgcagacctgattactgtggacgaaggcggtagggcccctctgtcttttcaccatttttttgccaccgacgacgacgataacctacagagagacgctatcatcaagctgtcagcactcccaaaatacgggtgtatcgagaacactggaaccggcgacaggttcgggcctgagacggcttccgatcttgaggcctcctttcctatccaagacgtgctggaaaattacatatactactttcagagtgtgcatgagtccatcgaacccactcacgatatattttccttctatgttagtgacggcacctctcggtctgagattcattctatcaacataacaattgagagaaaaaacgacgaacctccacggatgaccttgcagcctctgagggttcagttgtcctcgggggtggtcatttctaatagttccttgtccttacaggacctggatacccctgacaacgagctcattttcgtgctcacaaaaaagcccgaccacggccatgtgctgtggcgccagactgccagtgagccgctagagaacggacgtgtgctcgtgcaaggctccacatttacatatcaggacatactcgccggactagtcgggtacgtcccaagcgttcccggaatggttgtcgacgaattccagttctcactcaccgacggtcttcacgtggacacggggcgtatgaaaatctacactgagcttcccgcaagcgacaccccacacttagcaatcaaccaggggctgcagctgagcgcaggaagcgttgcccgtataaccgaacagcacctgaaagtcacggatattgactccgatgatcaccaagtgatgtacatcatgaaagaggatccaggggcagggcgactccaaatgatgaaacatggcaacctggagcagatttctattaagggtcccattcgttcctttacgcaagccgatatcagtcaaggtcacgttgagtattcgcacgggaccggtgagcctggcggttcttttgcattcaagtttgatgtcgtagacggagaaggaaaccgcttaatcgacaaaagcttctccattagtatcctggaggacaagtcccctccagtcattactacaaataagggacttgttctggatgaaaatagtgtaaagaaaatcaccaccctgcaactaagtgcaaccgaccaggactccggccctactgagcttatctaccgtatcacccgtcagcctcaactgggacacttagagcacgcagcctcccctggcatccagatttctagcttcacccaggctgacctcaccagccgcaatgtccagtacgttcatagttctgaggctgagaagcatagtgatgccttttcattcacactctccgacggagtgagtgaagtgacccagaccttccatattactcttcaccccgtggacgattcactccccgtggttcaaaacttgggcatgcgcgtacaggagggtatgagaaagaccattacggaatttgaactcaaggcagtggacgccgataccgaagcagagagcgtgactttcacgatcgtgcagccaccaaggcatgggaccatcgagaggacatccaatggacagcatttccacttgacatcgacttttacgatgaaggatatctaccagaatcgcgtcagttacagccacgacggatcaaactctctcaaagacagattcactttcacagtgtcggatgggaccaatcctttcttcatcatcgaagaggggggtaaggagatcatgactgcagcaccccagccttttagggtggatattctccctgtcgatgacggtacgcctcgaatcgtgaccaatctgggcctgcagtggctggagtatatggacgggaaagcaacgaatctgattactaaaaaggagttactgactatggacccagataccgaggatgctcagctggtctatgaaataacaaccggccctaagcacggctttgtggagaataaattgcagcctggacgcgcagcagccacctttacgcaggaggatgttaatctcgggctgattaggtatgtgctgcacaaggaaaaaattagagagatgatggacagttttcagttccttgttaaagactccaaacctaacgtggtgtctgacaacgtttttcacatccagtggtccctaattagcttcaaatacacgtcctacaacgtgagcgagaaggcgggatctgtgagcgtgaccgtgcaaaggacgggaaacttgaaccaatacgccatcgttctctgtaggactgaacaggggaccgcgtccagtagttcccgggtgagtagccaacccggacagcaagattacgtggaatacgctggtcaagtgcagttcgatgaacgcgaagataccaaatcctgcaccattgttatcaacgatgatgatgtttttgagaatgtggagtccttcaccgttgaactgtcgatgcctgcctatgcactgttgggcgagtttacccaggccaaagttattattaatgataccgaggacgagccaactcttgaatttgacaaaaaaatctactgggttaacgagtccgccggatttctgttcgccccaatcgagcgcaagggtgatgctagctcaatcgtaagtgccatctgttacaccgtaccaaaatctgccatgggctcttctttgtatgcgttggaaagtggatcggatttcaagtccagaggcatgagcgccgcttcacgcgtcatttttgggcctggtgtgacaatgtctacgtgcgatgtgatgttaattgacgatagcgaatacgaagaggaggaggaattcgaaatcgcgctcgcagatgcgtccgataacgcccgaatcggcagggttgcaaccgccaaagtgctgatcagcggacccaatgacgccagcactgtttcactgggtaacaccgccttcactgttagcgaagacgcaggcaccgttaaaattccagtgattagacatggaactgacttgtctacattcgcatctgtctggtgtgccacaagacccagtgaccccgcatccgcgacccctggggtggactacgttccgagctctcggaaagtggagttcgggccaggagttatcgaacagtattgcactttaactattctggatgatacgcagtatccagtcattgaaggccttgaaacctttgtggtcttcctaagctctgctcagggagcagagcttaccaagccgtttcaggccgtgatcgctattaacgacacatttcaagacgtaccctctatgcagtttgccaaggacctcttgcttgttaaagaaaaggagggagtgctgcacgtccctattacacgttctggggacttatcttacgagtcttctgtaaggtgttatacacagagtcattcagctcaggtgatggaggactttgaggagcggcagaatgccgactcttccagaatcacttttctgaagggtgataaggtgaagaactgcacagtgtacatacacgacgatagcatgttcgagcccgaagagcagtttagagtctacctcgggttaccgctggggaaccactggagcggggctaggataggcaagaacaacatggctaccatcaccattagcaatgacgaggacgctccaaccatcgagtttgaagaggcggcttaccaggtgcgtgaacccgctggccctgacgcaatcgccatccttaatataaaagtaatccgtagaggcgaccagaatcgtacctccaaagttcggtgcagtactagggatggatccgcacagtctggggttgattactaccctaaaagtcgggtgctaaaattttcccctggcgtcgatcacattttcttcaaggtagaaatattgtctaatgaagacagagaatggcatgaatccttctccctcgtcttggggccagacgatccagtggaagccgtgctgggcgatgttaccaccgctacagtgaccatcctcgaccaggaggcggctggaagcctcatcctccctgctccccctatagttgtgacgctggctgattacgaccacgtagaggaagtgaccaaggaaggcgtgaaaaagtctccaagcccagggtatccattggtctgtgtgacaccatgtgatccccactttcctagatacgcagtgatgaaggaaaggtgtagcgaggccggaattaatcagacatctgtgcagttttcctgggaggtggcggctcctaccgacgggaacggcgctaggtccccctttgagacgataactgataacaccccctttactagtgtaaaccacatggtgttagattcaatctatttcagtaggagattccacgtgcgctgtgtggcgaaagcagtagataaagtaggacacgtagggaccccactcagatctaatattgtgacaattggaacagacagtgctatctgccacacccctgtggtggcgggaacctctagaggtttccaggcccaatcctttatcgcaactctgaagtatttggatgttaaacacaaggaacatcctaatcgtatccacatttctgtccagataccacaccaggacggtatgctaccgcttatatctacgatgccattgcacaatctgcattttcttctgtccgaaagcatttataggcaccaacacgtttgcagcaatctagtcactacttatgacctccggggaataagcgaggccggtttcctagacgatgtggtgtacgattccactgccttagggcctggatacgatcgcccattccagtttgatcccagcgtgcgcgagcccaaaaccatacaattatacaagcaccttaatctgaaaagctgcgtctggacctttgatgcgtactatgacatgaccgaactgatagatgtgtgtggcggttccgtaaccgcggacttccaagtccgtgattcagcccagtctttcctgacagtccatgtacccctctacgtgtcctacatctacgtcacagctcccagggggtgggcatcattggagcaccacacggagatggagttcagttttttttacgacacggttctttggcgcacaggcatccagaccgacagcgtactgtctgctcggctccagattattcggatctacataagggaagatggcaggctggtgatcgaatttaagactcacgccaagttcagaggccagtttgtcatggaacatcatacactccctgaggtgaagtcttttgtcctgacccctgaccacctcgggggaatagagtttgatctacagttgttatggtcagctcagactttcgactcaccacaccagctgtggagggctacttcatcttataacagaaaggactattcaggagaatacaccatatacctgatcccatgcacagtccagccaactcagccttgggttgaccctggcgaaaagcctttagcttgcaccgcacacgcacccgagaggttcttaatccctatcgccttccagcaaactaatcggcctgtgcccgtcgtatattccttgaacactgagttccagctgtgtaacaatgagaaagtgttccttatggatcccaacacttccgatatgagcctggccgagatggattacaagggtgcattctctaagggtcagattctgtatggcagagtgctgtggaatccggagcagaacctgaattcggcctataagcttcagcttgaaaaggtttacctgtgcaccggaaaagatggatatgtgccattcttcgatccaacagggaccatctataacgaggggcctcagtatgggtgtattcagcccaacaaacacctcaaacatcgatttttgcttctcgatcggaatcagccagaagtaacagataagtattttcacgatgtgccgttcgaagcacatttcgcttctgagttgccagacttccatgtagtctccaacatgcccggagtagacggtttcactctgaaagtagatgctctgtataaagtggaagctgggcatcagtggtatctgcaggtcatctacattattggacccgacacgatttctgggccacgcgtccagaggagtttgaccgcccctctacgtagaaataggagggaccttgtagagccagacggccagcttatactcgatgattcccttatttacgataacgaaggcgaccaggtgaagaatgggaccaacatgaaatcgctcaacctagagatgcaagaactggccgtggctgcctcactgtcacagaccggtgcttccattggatctgctcttgctgccataatgctgttacttctggtcttcctcgtggcttgttttattaacaggaaatgccaaaagcagaggaagaagaaacccgcagaggatatcctggaagaataccctctgaataccaaagtcgaagttccaaagcggcatcccgaccgggtggagaaaaatgttaaccgccactactgcaccgtgaggaacgtgaacatcttaagtgaaccagaagctgcctatacttttaagggtgccaaggtgaagaggctgaacctggaagtccgagtacataacaatttgcaggacggaaccgaagtgtag

SEQ ID NO: 217809 - DNA, 6725 bp, Artificial Sequence
  derived and/or modified sequence
tgatccgaggtttctaatttcactatggaggatatcaacaacaaaaaaatacgatactctgccgtctttgagacagacggccacttggtcaccgactccttttatttctcagtgtccgatatggatcataaccatctggataaccaaatctttaccattatgatcacccctgctgaaaatccacctcctgttattgcatttgccgaccttatcaccgttgatgaggggggacgggcaccactgagcttccaccactttttcgctactgatgacgacgataatctccagcgcgatgcaatcattaagctgtccgccctgcctaaatacggttgcatcgagaacaccggcaccggagacagattcggacctgagacagcaagtgatctcgaagcaagcttccccatccaggacgtgttagagaattacatctactattttcagtccgtgcatgaatccatagaaccaacccatgacatcttcagcttctacgtttcggatgggacatctcgcagcgagatccacagcatcaacatcaccatcgaacgtaagaacgacgagccacctcgaatgactttacagcccctccgcgttcaactgagctctggcgtggtcatatctaattcctctttgtcccttcaggatctggacacacctgataacgaattgatcttcgtgctcacaaaaaagcccgatcacgggcacgtgctgtggcgccaaactgcatccgaacctctggagaatggtcgggtactggtgcaagggtccacatttacctatcaggatattctggccggattggttggttatgtgccatcagtccctggaatggtcgttgacgaattccagttttctctgaccgacggactgcacgtggataccggcagaatgaaaatctatacggagttgccagcctctgacaccccgcatctggcgatcaaccaaggcctgcagctgtcagcgggaagtgtggcgagaataaccgagcaacacctgaaggtgaccgacattgattcggatgaccaccaggttatgtacataatgaaggaggaccccggagcagggagactgcaaatgatgaagcatggcaacttggaacaaattagcatcaagggcccaatacgatcgtttacccaggctgatatctcccagggtcacgtcgagtattctcatgggacaggcgagcctgggggaagtttcgcctttaagtttgacgtggtggacggagagggaaatagacttatagataagagtttttccatttctattctggaggataagagtccacccgtaatcactacaaacaagggcttagtactggacgaaaatagcgttaagaagataaccacattacagcttagcgccacagatcaggatagtggtcctaccgagttgatctacaggatcacaagacagcctcagctgggccatttagaacatgcggcaagtcctggtatccagattagctcctttacacaggctgacttaacaagcaggaatgtccagtacgtgcacagctccgaagctgagaagcactctgacgcgttctcgttcactctttccgacggagtgtcagaggtgacccagacctttcacattacgttacaccccgtggatgacagcctccctgtggtgcagaacctgggcatgagagtccaggagggaatgcgcaagacgattacagaatttgagttaaaggccgtggatgcagataccgaggcagagtctgtcacattcaccatcgtccagccccctcggcatgggactattgagcgaacttccaacggccaacactttcacctaacctcgacatttaccatgaaggatatctatcagaaccgagtgagctattcccacgacgggtcaaactcactgaaggataggtttacatttaccgtaagtgacgggaccaacccattttttataattgaagaagggggtaaagaaatcatgacagctgccccacaaccatttagagtggatatcctccctgtcgacgacggtacgccccgaattgtgaccaatctgggactgcagtggttagaatacatggacggaaaggccacaaacctgatcaccaaaaaagagcttcttacaatggaccccgatacagaggacgcacagctcgtgtatgagatcaccaccgggccaaagcatgggttcgttgaaaacaagctgcagccagggcgagccgctgcgaccttcacccaggaggatgtcaacttaggtctcatcaggtacgttctgcacaaggagaagatcagggaaatgatggattctttccagttccttgtgaaggacagtaaacccaacgtcgttagcgataacgtgttccatattcagtggagccttatctcttttaaatacacatcctataatgttagtgaaaaggctggatccgttagcgtgaccgtgcaaagaacggggaacttgaatcagtatgctattgtgctatgcagaacagaacaaggcacagccagttctagctcaagagtgagctctcagccgggacagcaggactacgtggagtatgcgggtcaggtacagtttgacgagagggaggacactaagagttgtacgattgtaataaatgatgacgatgtgtttgagaacgtagagtctttcaccgtagagctgtccatgcctgcctacgccctgctgggtgagtttacgcaggctaaggtgattattaacgatacggaggatgagccgactctggagtttgacaagaaaatctactgggtgaatgaatccgctggctttctcttcgcacccattgagcggaagggagacgcctcctccatcgtctccgccatttgctatacagtacccaaaagcgccatgggctcatctttgtatgctctagagagtggctccgattttaagagccggggaatgtccgccgcatctagggtaatcttcgggcctggagtgacgatgtcaacctgcgacgtgatgctaattgacgacagtgagtatgaagaggaagaagaattcgaaattgcactagcagacgcatctgataatgccaggatcggaagagtggcaacggcaaaggttttgatctccggcccaaatgatgcctctacagtgtctctgggaaatactgccttcacagtgagtgaagacgccggaactgtgaagattcccgtcattcgccatgggacagacctgtccacttttgccagcgtgtggtgcgccacacgcccttccgaccctgcttcagccaccccaggtgtagattatgttccctcctcaagaaaagtcgagtttggccctggtgtcatagagcagtactgtacgctgacgatcctggatgacacacaatatcccgtgatcgagggcctggaaacctttgtagtgtttcttagcagtgcccagggagccgaacttaccaagcccttccaggcagtaatcgcaatcaatgacacattccaagacgttccaagtatgcagtttgcaaaagaccttctcctggtgaaggagaaggagggagtgttgcatgtacctatcactcggtctggtgacctgtcttatgagtcgtctgttaggtgttacactcagtcccactcggctcaagtgatggaagacttcgaggagcgacagaacgccgattcaagccgcatcacatttttgaaaggtgataaagtcaagaactgtactgtgtacattcatgacgacagtatgttcgaaccagaggaacaatttcgagtatatctgggactgcccttaggaaaccattggagtggtgcgagaatcggcaagaataacatggcgaccatcacgatttctaacgacgaggacgctcctacgattgagttcgaggaggccgcttatcaggtgcgtgagcccgctggccctgacgcaatcgcgattctcaacattaaggtcattcggaggggcgaccaaaatcggacttccaaagttaggtgcagcacaagagatggcagcgcgcaaagtggggtggattactaccctaaatcaagagttctgaagtttagccccggagtggaccacatcttttttaaggtggaaattctctctaacgaagatcgggagtggcatgagtcattcagcctcgtcctgggacccgacgatccagttgaggccgtgcttggggatgtgacgactgctacggtgacgatcctggaccaggaggcagcaggatccctcatcctgccggctcctcctatcgtggtgacactggccgattacgaccacgtcgaagaagtgaccaaggagggcgtgaagaagtcgccgagccccggatatccactggtttgcgtcactccttgtgatccacacttccctaggtatgccgtgatgaaagagagatgctcagaggcgggtatcaaccaaacaagcgtacagttcagttgggaagtagccgctcccaccgatggcaatggggctcgttcaccatttgagacaattaccgacaatactccatttaccagcgtgaaccacatggtactcgatagcatctatttctcgcgacgctttcatgtccgatgtgtagccaaagccgtggacaaggtgggccacgtgggcaccccactgcgctcaaacatcgttacgatcggcaccgatagtgccatctgtcatacaccagtagtcgcaggtacaagtagaggatttcaagcgcagagcttcatcgctaccctgaagtatctggacgtgaaacacaaggaacatcctaacagaatacatatttctgtccagatcccgcatcaggacggcatgctgccactgatttctactatgccgctgcataatcttcacttcctgctcagcgaaagtatctatcgccatcagcacgtgtgcagtaatctcgtgaccacctatgacctgcgtggtatctccgaggccggttttttagatgatgtagtgtatgacagtaccgccttggggccaggctatgatcgaccctttcaattcgatccatctgtcagagaacctaagaccattcagctgtataaacacttaaacctcaaaagctgcgtttggacgttcgatgcctactatgatatgacggagctgatcgacgtgtgcggtggtagcgtcacggccgacttccaggtgagagattccgcacaaagtttccttaccgtgcacgttccactgtacgttagttatatctatgttactgctcctcgagggtgggcatcgttggagcaccataccgagatggagtttagcttcttttacgatactgtcctttggcgcacaggcattcagactgactctgtgctgtccgcacgcctgcagatcatacgcatctatattcgcgaggacgggagacttgttatcgaatttaagacgcatgccaagtttagaggccaatttgtaatggagcatcacaccctccccgaggtaaagtcctttgtactaaccccagaccatttaggaggtatcgagtttgaccttcaactactctggtctgcccagacatttgactcccctcaccagctttggcgggctacctcttcatataaccggaaagactactcaggtgagtatacaatctaccttattccatgtaccgttcagcccacacagccgtgggtggacccgggtgagaagccgctcgcctgcacagctcacgcgccagagcgttttctgatacccattgcttttcagcagacaaatcgacccgtgcccgttgtctactccctgaacactgagtttcagttgtgtaataacgagaaggtgttcctcatggacccgaataccagcgacatgagtctggctgagatggattataagggtgccttcagtaaagggcagatattatatggaagggtcttatggaaccccgaacagaacctgaacagcgcatataagcttcagctggagaaggtctacctctgcacaggaaaggacggttatgtaccattttttgacccgaccggaactatctataatgagggtcctcagtacggatgcatccagccaaataagcacctcaagcataggtttttgctgctggaccgaaaccagcctgaggtgaccgataaatactttcatgacgtcccattcgaggcacacttcgcttctgaattgcctgattttcatgtagtgtctaacatgcctggagtggacggcttcacgcttaaagtagatgccctgtataaggtcgaggccggacatcaatggtacctgcaagtgatttacattatcggtcccgacacaatcagcggtccccgtgtacagagaagcttaacagctccgttacgtaggaacagaagggacctggtggagcccgacggacagcttatcctggacgattcgttaatctatgataacgaaggcgaccaggtgaaaaatggtaccaatatgaaatccctaaatctggaaatgcaggagctggcagtggctgcatcactctctcagactggggcatctatcggctcggcactggccgcaatcatgctactgctacttgtgttcctggtggcgtgctttataaatcgaaaatgtcaaaaacaaaggaagaaaaagcctgccgaagatattctcgaagagtacccattgaacacaaaggtggaagtgcctaagaggcatcctgaccgggtggagaaaaacgtcaataggcattactgcactgttcggaacgttaatatcctgtcagagccagaggctgcctatactttcaagggggctaaagtgaagcgtctgaacctggaggtgagggttcataacaacctgcaggatggtacagaagtcta

SEQ ID NO: 217810 - DNA, 12039 bp, Artificial Sequence
  derived and/or modified sequence
atgggcgtgctgaaggtgtggctgggcctggccctggccctggccgagttcgccgtgctgccccaccacagcgagggcgcctgcgtgtaccaggacagcctgctggccgacgccaccatctggaagcccgacagctgccagagctgcagatgccacggcgacatcgtgatctgcaagcccgccgtgtgcagaaacccccagtgcgccttcgagaagggcgaggtgctgcagatcgccgccaaccagtgctgccccgagtgcgtgctgagaacccccggcagctgccaccacgagaagaagatccacgagcacggcaccgagtgggccagcagcccctgcagcgtgtgcagctgcaaccacggcgaggtgagatgcaccccccagccctgcccccccctgagctgcggccaccaggagctggccttcatccccgagggcagctgctgccccgtgtgcgtgggcctgggcaagccctgcagctacgagggccacgtgttccaggacggcgaggactggagactgagcagatgcgccaagtgcctgtgcagaaacggcgtggcccagtgcttcaccgcccagtgccagcccctgttctgcaaccaggacgagaccgtggtgagagtgcccggcaagtgctgcccccagtgcagcgccagaagctgcagcgccgccggccaggtgtacgagcacggcgagcagtggagcgagaacgcctgcaccacctgcatctgcgacagaggcgaggtgagatgccacaagcaggcctgcctgcccctgagatgcggcaagggccagagcagagccagaagacacggccagtgctgcgaggagtgcgtgagccccgccggcagctgcagctacgacggcgtggtgagataccaggacgagatgtggaagggcagcgcctgcgagttctgcatgtgcgaccacggccaggtgacctgccagaccggcgagtgcgccaaggtggagtgcgccagagacgaggagctgatccacctggacggcaagtgctgccccgagtgcatcagcagaaacggctactgcgtgtacgaggagaccggcgagttcatgagcagcaacgccagcgaggtgaagagaatccccgagggcgagaagtgggaggacggcccctgcaaggtgtgcgagtgcagaggcgcccaggtgacctgctacgagcccagctgccccccctgccccgtgggcaccctggccctggaggtgaagggccagtgctgccccgactgcaccagcgtgcactgccaccccgactgcctgacctgcagccagagccccgaccactgcgacctgtgccaggaccccaccaagctgctgcagaacggctggtgcgtgcacagctgcggcctgggcttctaccaggccggcagcctgtgcctggcctgccagccccagtgcagcacctgcaccagcggcctggagtgcagcagctgccagccccccctgctgatgagacacggccagtgcgtgcccacctgcggcgacggcttctaccaggacagacacagctgcgccgtgtgccacgagagctgcgccggctgctggggccccaccgagaagcactgcctggcctgcagagaccccctgcacgtgctgagagacggcggctgcgagagcagctgcggcaagggcttctacaacagacagggcacctgcagcgcctgcgaccagagctgcgacagctgcggccccagcagccccagatgcctgacctgcaccgagaagaccgtgctgcacgacggcaagtgcatgagcgagtgccccggcggctactacgccgacgccaccggcagatgcaaggtgtgccacaacagctgcgccagctgcagcggccccacccccagccactgcaccgcctgcagcccccccaaggccctgagacagggccactgcctgcccagatgcggcgagggcttctacagcgaccacggcgtgtgcaaggcctgccacagcagctgcctggcctgcatgggccccgcccccagccactgcaccggctgcaagaagcccgaggagggcctgcaggtggagcagctgagcgacgtgggcatccccagcggcgagtgcctggcccagtgcagagcccacttctacctggagagcaccggcatctgcgaggcctgccaccagagctgcttcagatgcgccggcaagagcccccacaactgcaccgactgcggccccagccacgtgctgctggacggccagtgcctgagccagtgccccgacggctacttccaccaggagggcagctgcaccgagtgccaccccacctgcagacagtgccacggccccctggagagcgactgcatcagctgctacccccacatcagcctgaccaacggcaactgcagaaccagctgcagagaggagcagttcctgaacctggtgggctactgcgccgactgccaccacctgtgccagcactgcgccgccgacctgcacaacaccggcagcatctgcctgagatgccagaacgcccactacctgctgctgggcgaccactgcgtgcccgactgccccagcggctactacgccgagagaggcgcctgcaagaagtgccacagcagctgcagaacctgccagggcagaggccccttcagctgcagcagctgcgacaccaacctggtgctgagccacaccggcacctgcagcaccacctgcttccccggccactacctggacgacaaccacgtgtgccagccctgcaacacccactgcggcagctgcgacagccaggccagctgcaccagctgcagagaccccaacaaggtgctgctgttcggcgagtgccagtacgagagctgcgccccccagtactacctggacttcagcaccaacacctgcaaggagtgcgactggagctgcagcgcctgcagcggccccctgaagaccgactgcctgcagtgcatggacggctacgtgctgcaggacggcgcctgcgtggagcagtgcctgagcagcttctaccaggacagcggcctgtgcaagaactgcgacagctactgcctgcagtgccagggcccccacgagtgcaccagatgcaagggccccttcctgctgctggaggcccagtgcgtgcaggagtgcggcaagggctacttcgccgaccacgccaagcacaagtgcaccgcctgcccccagggctgcctgcagtgcagccacagagacagatgccacctgtgcgaccacggcttcttcctgaagagcggcctgtgcgtgtacaactgcgtgcccggcttcagcgtgcacaccagcaacgagacctgcagcggcaagatccacacccccagcctgcacgtgaacggcagcctgatcctgcccatcggcagcatcaagcccctggacttcagcctgctgaacgtgcaggaccaggagggcagagtggaggacctgctgttccacgtggtgagcacccccaccaacggccagctggtgctgagcagaaacggcaaggaggtgcagctggacaaggccggcagattcagctggaaggacgtgaacgagaagaaggtgagattcgtgcacagcaaggagaagctgagaaagggctacctgttcctgaagatcagcgaccagcagttcttcagcgagccccagctgatcaacatccaggccttcagcacccaggccccctacgtgctgagaaacgaggtgctgcacatcagcagaggcgagagagccaccatcaccacccagatgctggacatcagagacgacgacaacccccaggacgtggtgatcgagatcatcgacccccccctgcacggccagctgctgcagaccctgcagagccccgccacccccatctaccagttccagctggacgagctgagcagaggcctgctgcactacgcccacgacggcagcgacagcaccagcgacgtggccgtgctgcaggccaacgacggccacagcttccacaacatcctgttccaggtgaagaccgtgccccagaacgacagaggcctgcagctggtggccaacagcatggtgtgggtgcccgagggcggcatgctgcagatcaccaacagaatcctgcaggccgaggcccccggcgccagcgccgaggagatcatctacaagatcacccaggactacccccagttcggcgaggtggtgctgctggtgaacatgcccgccgacagccccgccgacgagggccagcacctgcccgacggcagaaccgccacccccaccagcaccttcacccagcaggacatcaacgagggcatcgtgtggtacagacacagcggcgcccccgcccagagcgacagcttcagattcgaggtgagcagcgccagcaacgcccagaccagactggagagccacatgttcaacatcgccatcctgccccagacccccgaggcccccaaggtgagcctggaggccagcctgcacatgaccgccagagaggacggcctgaccgtgatccagccccacagcctgagcttcatcaacagcgagaagcccagcggcaagatcgtgtacaacatcaccctgcccctgcaccccaaccagggcatcatcgagcacagagaccacccccacagccccatcagatacttcacccaggaggacatcaaccagggcaaggtgatgtacagacccccccccgccgccccccacctgcaggagctgatggccttcagcttcgccggcctgcccgagagcgtgaagttccacttcaccgtgagcgacggcgagcacaccagccccgagatggtgctgaccatccacctgctgcccagcgaccagcagctgcccgtgttccaggtgaccgcccccagactggccgtgagccccggcggcagcaccagcgtgggcctgcaggtggtggtgagagacgccgagaccgcccccaaggagctgttcttcgagctgagaagacccccccagcacggcgtgctgctgaagcacaccgccgagttcagaagacccatggccaccggcgacaccttcacctacgaggacgtggagaagaacgccctgcagtacatccacgacggcagcagcaccagagaggacagcatggagatcagcgtgaccgacggcctgaccgtgaccatgctggaggtgagagtggaggtgagcctgagcgaggacagaggccccagactggccgccggcagcagcctgagcatcaccgtggccagcaagagcaccgccatcatcaccagaagccacctggcctacgtggacgacagcagccccgaccccgagatctggatccagctgaactacctgcccagctacggcaccctgctgagaatcagcggcagcgaggtggaggagctgagcgaggtgagcaacttcaccatggaggacatcaacaacaagaagatcagatacagcgccgtgttcgagaccgacggccacctggtgaccgacagcttctacttcagcgtgagcgacatggaccacaaccacctggacaaccagatcttcaccatcatgatcacccccgccgagaaccccccccccgtgatcgccttcgccgacctgatcaccgtggacgagggcggcagagcccccctgagcttccaccacttcttcgccaccgacgacgacgacaacctgcagagagacgccatcatcaagctgagcgccctgcccaagtacggctgcatcgagaacaccggcaccggcgacagattcggccccgagaccgccagcgacctggaggccagcttccccatccaggacgtgctggagaactacatctactacttccagagcgtgcacgagagcatcgagcccacccacgacatcttcagcttctacgtgagcgacggcaccagcagaagcgagatccacagcatcaacatcaccatcgagagaaagaacgacgagccccccagaatgaccctgcagcccctgagagtgcagctgagcagcggcgtggtgatcagcaacagcagcctgagcctgcaggacctggacacccccgacaacgagctgatcttcgtgctgaccaagaagcccgaccacggccacgtgctgtggagacagaccgccagcgagcccctggagaacggcagagtgctggtgcagggcagcaccttcacctaccaggacatcctggccggcctggtgggctacgtgcccagcgtgcccggcatggtggtggacgagttccagttcagcctgaccgacggcctgcacgtggacaccggcagaatgaagatctacaccgagctgcccgccagcgacaccccccacctggccatcaaccagggcctgcagctgagcgccggcagcgtggccagaatcaccgagcagcacctgaaggtgaccgacatcgacagcgacgaccaccaggtgatgtacatcatgaaggaggaccccggcgccggcagactgcagatgatgaagcacggcaacctggagcagatcagcatcaagggccccatcagaagcttcacccaggccgacatcagccagggccacgtggagtacagccacggcaccggcgagcccggcggcagcttcgccttcaagttcgacgtggtggacggcgagggcaacagactgatcgacaagagcttcagcatcagcatcctggaggacaagagcccccccgtgatcaccaccaacaagggcctggtgctggacgagaacagcgtgaagaagatcaccaccctgcagctgagcgccaccgaccaggacagcggccccaccgagctgatctacagaatcaccagacagccccagctgggccacctggagcacgccgccagccccggcatccagatcagcagcttcacccaggccgacctgaccagcagaaacgtgcagtacgtgcacagcagcgaggccgagaagcacagcgacgccttcagcttcaccctgagcgacggcgtgagcgaggtgacccagaccttccacatcaccctgcaccccgtggacgacagcctgcccgtggtgcagaacctgggcatgagagtgcaggagggcatgagaaagaccatcaccgagttcgagctgaaggccgtggacgccgacaccgaggccgagagcgtgaccttcaccatcgtgcagccccccagacacggcaccatcgagagaaccagcaacggccagcacttccacctgaccagcaccttcaccatgaaggacatctaccagaacagagtgagctacagccacgacggcagcaacagcctgaaggacagattcaccttcaccgtgagcgacggcaccaaccccttcttcatcatcgaggagggcggcaaggagatcatgaccgccgccccccagcccttcagagtggacatcctgcccgtggacgacggcacccccagaatcgtgaccaacctgggcctgcagtggctggagtacatggacggcaaggccaccaacctgatcaccaagaaggagctgctgaccatggaccccgacaccgaggacgcccagctggtgtacgagatcaccaccggccccaagcacggcttcgtggagaacaagctgcagcccggcagagccgccgccaccttcacccaggaggacgtgaacctgggcctgatcagatacgtgctgcacaaggagaagatcagagagatgatggacagcttccagttcctggtgaaggacagcaagcccaacgtggtgagcgacaacgtgttccacatccagtggagcctgatcagcttcaagtacaccagctacaacgtgagcgagaaggccggcagcgtgagcgtgaccgtgcagagaaccggcaacctgaaccagtacgccatcgtgctgtgcagaaccgagcagggcaccgccagcagcagcagcagagtgagcagccagcccggccagcaggactacgtggagtacgccggccaggtgcagttcgacgagagagaggacaccaagagctgcaccatcgtgatcaacgacgacgacgtgttcgagaacgtggagagcttcaccgtggagctgagcatgcccgcctacgccctgctgggcgagttcacccaggccaaggtgatcatcaacgacaccgaggacgagcccaccctggagttcgacaagaagatctactgggtgaacgagagcgccggcttcctgttcgcccccatcgagagaaagggcgacgccagcagcatcgtgagcgccatctgctacaccgtgcccaagagcgccatgggcagcagcctgtacgccctggagagcggcagcgacttcaagagcagaggcatgagcgccgccagcagagtgatcttcggccccggcgtgaccatgagcacctgcgacgtgatgctgatcgacgacagcgagtacgaggaggaggaggagttcgagatcgccctggccgacgccagcgacaacgccagaatcggcagagtggccaccgccaaggtgctgatcagcggccccaacgacgccagcaccgtgagcctgggcaacaccgccttcaccgtgagcgaggacgccggcaccgtgaagatccccgtgatcagacacggcaccgacctgagcaccttcgccagcgtgtggtgcgccaccagacccagcgaccccgccagcgccacccccggcgtggactacgtgcccagcagcagaaaggtggagttcggccccggcgtgatcgagcagtactgcaccctgaccatcctggacgacacccagtaccccgtgatcgagggcctggagaccttcgtggtgttcctgagcagcgcccagggcgccgagctgaccaagcccttccaggccgtgatcgccatcaacgacaccttccaggacgtgcccagcatgcagttcgccaaggacctgctgctggtgaaggagaaggagggcgtgctgcacgtgcccatcaccagaagcggcgacctgagctacgagagcagcgtgagatgctacacccagagccacagcgcccaggtgatggaggacttcgaggagagacagaacgccgacagcagcagaatcaccttcctgaagggcgacaaggtgaagaactgcaccgtgtacatccacgacgacagcatgttcgagcccgaggagcagttcagagtgtacctgggcctgcccctgggcaaccactggagcggcgccagaatcggcaagaacaacatggccaccatcaccatcagcaacgacgaggacgcccccaccatcgagttcgaggaggccgcctaccaggtgagagagcccgccggccccgacgccatcgccatcctgaacatcaaggtgatcagaagaggcgaccagaacagaaccagcaaggtgagatgcagcaccagagacggcagcgcccagagcggcgtggactactaccccaagagcagagtgctgaagttcagccccggcgtggaccacatcttcttcaaggtggagatcctgagcaacgaggacagagagtggcacgagagcttcagcctggtgctgggccccgacgaccccgtggaggccgtgctgggcgacgtgaccaccgccaccgtgaccatcctggaccaggaggccgccggcagcctgatcctgcccgccccccccatcgtggtgaccctggccgactacgaccacgtggaggaggtgaccaaggagggcgtgaagaagagccccagccccggctaccccctggtgtgcgtgaccccctgcgacccccacttccccagatacgccgtgatgaaggagagatgcagcgaggccggcatcaaccagaccagcgtgcagttcagctgggaggtggccgcccccaccgacggcaacggcgccagaagccccttcgagaccatcaccgacaacacccccttcaccagcgtgaaccacatggtgctggacagcatctacttcagcagaagattccacgtgagatgcgtggccaaggccgtggacaaggtgggccacgtgggcacccccctgagaagcaacatcgtgaccatcggcaccgacagcgccatctgccacacccccgtggtggccggcaccagcagaggcttccaggcccagagcttcatcgccaccctgaagtacctggacgtgaagcacaaggagcaccccaacagaatccacatcagcgtgcagatcccccaccaggacggcatgctgcccctgatcagcaccatgcccctgcacaacctgcacttcctgctgagcgagagcatctacagacaccagcacgtgtgcagcaacctggtgaccacctacgacctgagaggcatcagcgaggccggcttcctggacgacgtggtgtacgacagcaccgccctgggccccggctacgacagacccttccagttcgaccccagcgtgagagagcccaagaccatccagctgtacaagcacctgaacctgaagagctgcgtgtggaccttcgacgcctactacgacatgaccgagctgatcgacgtgtgcggcggcagcgtgaccgccgacttccaggtgagagacagcgcccagagcttcctgaccgtgcacgtgcccctgtacgtgagctacatctacgtgaccgcccccagaggctgggccagcctggagcaccacaccgagatggagttcagcttcttctacgacaccgtgctgtggagaaccggcatccagaccgacagcgtgctgagcgccagactgcagatcatcagaatctacatcagagaggacggcagactggtgatcgagttcaagacccacgccaagttcagaggccagttcgtgatggagcaccacaccctgcccgaggtgaagagcttcgtgctgacccccgaccacctgggcggcatcgagttcgacctgcagctgctgtggagcgcccagaccttcgacagcccccaccagctgtggagagccaccagcagctacaacagaaaggactacagcggcgagtacaccatctacctgatcccctgcaccgtgcagcccacccagccctgggtggaccccggcgagaagcccctggcctgcaccgcccacgcccccgagagattcctgatccccatcgccttccagcagaccaacagacccgtgcccgtggtgtacagcctgaacaccgagttccagctgtgcaacaacgagaaggtgttcctgatggaccccaacaccagcgacatgagcctggccgagatggactacaagggcgccttcagcaagggccagatcctgtacggcagagtgctgtggaaccccgagcagaacctgaacagcgcctacaagctgcagctggagaaggtgtacctgtgcaccggcaaggacggctacgtgcccttcttcgaccccaccggcaccatctacaacgagggcccccagtacggctgcatccagcccaacaagcacctgaagcacagattcctgctgctggacagaaaccagcccgaggtgaccgacaagtacttccacgacgtgcccttcgaggcccacttcgccagcgagctgcccgacttccacgtggtgagcaacatgcccggcgtggacggcttcaccctgaaggtggacgccctgtacaaggtggaggccggccaccagtggtacctgcaggtgatctacatcatcggccccgacaccatcagcggccccagagtgcagagaagcctgaccgcccccctgagaagaaacagaagagacctggtggagcccgacggccagctgatcctggacgacagcctgatctacgacaacgagggcgaccaggtgaagaacggcaccaacatgaagagcctgaacctggagatgcaggagctggccgtggccgccagcctgagccagaccggcgccagcatcggcagcgccctggccgccatcatgctgctgctgctggtgttcctggtggcctgcttcatcaacagaaagtgccagaagcagagaaagaagaagcccgccgaggacatcctggaggagtaccccctgaacaccaaggtggaggtgcccaagagacaccccgacagagtggagaagaacgtgaacagacactactgcaccgtgagaaacgtgaacatcctgagcgagcccgaggccgcctacaccttcaagggcgccaaggtgaagagactgaacctggaggtgagagtgcacaacaacctgcaggacggcaccgaggtgtag

SEQ ID NO: 217811 - DNA, 6726 bp, Artificial Sequence
  derived and/or modified sequence
tgaagcgaggtgagcaacttcaccatggaggacatcaacaacaagaagatcagatacagcgccgtgttcgagaccgacggccacctggtgaccgacagcttctacttcagcgtgagcgacatggaccacaaccacctggacaaccagatcttcaccatcatgatcacccccgccgagaaccccccccccgtgatcgccttcgccgacctgatcaccgtggacgagggcggcagagcccccctgagcttccaccacttcttcgccaccgacgacgacgacaacctgcagagagacgccatcatcaagctgagcgccctgcccaagtacggctgcatcgagaacaccggcaccggcgacagattcggccccgagaccgccagcgacctggaggccagcttccccatccaggacgtgctggagaactacatctactacttccagagcgtgcacgagagcatcgagcccacccacgacatcttcagcttctacgtgagcgacggcaccagcagaagcgagatccacagcatcaacatcaccatcgagagaaagaacgacgagccccccagaatgaccctgcagcccctgagagtgcagctgagcagcggcgtggtgatcagcaacagcagcctgagcctgcaggacctggacacccccgacaacgagctgatcttcgtgctgaccaagaagcccgaccacggccacgtgctgtggagacagaccgccagcgagcccctggagaacggcagagtgctggtgcagggcagcaccttcacctaccaggacatcctggccggcctggtgggctacgtgcccagcgtgcccggcatggtggtggacgagttccagttcagcctgaccgacggcctgcacgtggacaccggcagaatgaagatctacaccgagctgcccgccagcgacaccccccacctggccatcaaccagggcctgcagctgagcgccggcagcgtggccagaatcaccgagcagcacctgaaggtgaccgacatcgacagcgacgaccaccaggtgatgtacatcatgaaggaggaccccggcgccggcagactgcagatgatgaagcacggcaacctggagcagatcagcatcaagggccccatcagaagcttcacccaggccgacatcagccagggccacgtggagtacagccacggcaccggcgagcccggcggcagcttcgccttcaagttcgacgtggtggacggcgagggcaacagactgatcgacaagagcttcagcatcagcatcctggaggacaagagcccccccgtgatcaccaccaacaagggcctggtgctggacgagaacagcgtgaagaagatcaccaccctgcagctgagcgccaccgaccaggacagcggccccaccgagctgatctacagaatcaccagacagccccagctgggccacctggagcacgccgccagccccggcatccagatcagcagcttcacccaggccgacctgaccagcagaaacgtgcagtacgtgcacagcagcgaggccgagaagcacagcgacgccttcagcttcaccctgagcgacggcgtgagcgaggtgacccagaccttccacatcaccctgcaccccgtggacgacagcctgcccgtggtgcagaacctgggcatgagagtgcaggagggcatgagaaagaccatcaccgagttcgagctgaaggccgtggacgccgacaccgaggccgagagcgtgaccttcaccatcgtgcagccccccagacacggcaccatcgagagaaccagcaacggccagcacttccacctgaccagcaccttcaccatgaaggacatctaccagaacagagtgagctacagccacgacggcagcaacagcctgaaggacagattcaccttcaccgtgagcgacggcaccaaccccttcttcatcatcgaggagggcggcaaggagatcatgaccgccgccccccagcccttcagagtggacatcctgcccgtggacgacggcacccccagaatcgtgaccaacctgggcctgcagtggctggagtacatggacggcaaggccaccaacctgatcaccaagaaggagctgctgaccatggaccccgacaccgaggacgcccagctggtgtacgagatcaccaccggccccaagcacggcttcgtggagaacaagctgcagcccggcagagccgccgccaccttcacccaggaggacgtgaacctgggcctgatcagatacgtgctgcacaaggagaagatcagagagatgatggacagcttccagttcctggtgaaggacagcaagcccaacgtggtgagcgacaacgtgttccacatccagtggagcctgatcagcttcaagtacaccagctacaacgtgagcgagaaggccggcagcgtgagcgtgaccgtgcagagaaccggcaacctgaaccagtacgccatcgtgctgtgcagaaccgagcagggcaccgccagcagcagcagcagagtgagcagccagcccggccagcaggactacgtggagtacgccggccaggtgcagttcgacgagagagaggacaccaagagctgcaccatcgtgatcaacgacgacgacgtgttcgagaacgtggagagcttcaccgtggagctgagcatgcccgcctacgccctgctgggcgagttcacccaggccaaggtgatcatcaacgacaccgaggacgagcccaccctggagttcgacaagaagatctactgggtgaacgagagcgccggcttcctgttcgcccccatcgagagaaagggcgacgccagcagcatcgtgagcgccatctgctacaccgtgcccaagagcgccatgggcagcagcctgtacgccctggagagcggcagcgacttcaagagcagaggcatgagcgccgccagcagagtgatcttcggccccggcgtgaccatgagcacctgcgacgtgatgctgatcgacgacagcgagtacgaggaggaggaggagttcgagatcgccctggccgacgccagcgacaacgccagaatcggcagagtggccaccgccaaggtgctgatcagcggccccaacgacgccagcaccgtgagcctgggcaacaccgccttcaccgtgagcgaggacgccggcaccgtgaagatccccgtgatcagacacggcaccgacctgagcaccttcgccagcgtgtggtgcgccaccagacccagcgaccccgccagcgccacccccggcgtggactacgtgcccagcagcagaaaggtggagttcggccccggcgtgatcgagcagtactgcaccctgaccatcctggacgacacccagtaccccgtgatcgagggcctggagaccttcgtggtgttcctgagcagcgcccagggcgccgagctgaccaagcccttccaggccgtgatcgccatcaacgacaccttccaggacgtgcccagcatgcagttcgccaaggacctgctgctggtgaaggagaaggagggcgtgctgcacgtgcccatcaccagaagcggcgacctgagctacgagagcagcgtgagatgctacacccagagccacagcgcccaggtgatggaggacttcgaggagagacagaacgccgacagcagcagaatcaccttcctgaagggcgacaaggtgaagaactgcaccgtgtacatccacgacgacagcatgttcgagcccgaggagcagttcagagtgtacctgggcctgcccctgggcaaccactggagcggcgccagaatcggcaagaacaacatggccaccatcaccatcagcaacgacgaggacgcccccaccatcgagttcgaggaggccgcctaccaggtgagagagcccgccggccccgacgccatcgccatcctgaacatcaaggtgatcagaagaggcgaccagaacagaaccagcaaggtgagatgcagcaccagagacggcagcgcccagagcggcgtggactactaccccaagagcagagtgctgaagttcagccccggcgtggaccacatcttcttcaaggtggagatcctgagcaacgaggacagagagtggcacgagagcttcagcctggtgctgggccccgacgaccccgtggaggccgtgctgggcgacgtgaccaccgccaccgtgaccatcctggaccaggaggccgccggcagcctgatcctgcccgccccccccatcgtggtgaccctggccgactacgaccacgtggaggaggtgaccaaggagggcgtgaagaagagccccagccccggctaccccctggtgtgcgtgaccccctgcgacccccacttccccagatacgccgtgatgaaggagagatgcagcgaggccggcatcaaccagaccagcgtgcagttcagctgggaggtggccgcccccaccgacggcaacggcgccagaagccccttcgagaccatcaccgacaacacccccttcaccagcgtgaaccacatggtgctggacagcatctacttcagcagaagattccacgtgagatgcgtggccaaggccgtggacaaggtgggccacgtgggcacccccctgagaagcaacatcgtgaccatcggcaccgacagcgccatctgccacacccccgtggtggccggcaccagcagaggcttccaggcccagagcttcatcgccaccctgaagtacctggacgtgaagcacaaggagcaccccaacagaatccacatcagcgtgcagatcccccaccaggacggcatgctgcccctgatcagcaccatgcccctgcacaacctgcacttcctgctgagcgagagcatctacagacaccagcacgtgtgcagcaacctggtgaccacctacgacctgagaggcatcagcgaggccggcttcctggacgacgtggtgtacgacagcaccgccctgggccccggctacgacagacccttccagttcgaccccagcgtgagagagcccaagaccatccagctgtacaagcacctgaacctgaagagctgcgtgtggaccttcgacgcctactacgacatgaccgagctgatcgacgtgtgcggcggcagcgtgaccgccgacttccaggtgagagacagcgcccagagcttcctgaccgtgcacgtgcccctgtacgtgagctacatctacgtgaccgcccccagaggctgggccagcctggagcaccacaccgagatggagttcagcttcttctacgacaccgtgctgtggagaaccggcatccagaccgacagcgtgctgagcgccagactgcagatcatcagaatctacatcagagaggacggcagactggtgatcgagttcaagacccacgccaagttcagaggccagttcgtgatggagcaccacaccctgcccgaggtgaagagcttcgtgctgacccccgaccacctgggcggcatcgagttcgacctgcagctgctgtggagcgcccagaccttcgacagcccccaccagctgtggagagccaccagcagctacaacagaaaggactacagcggcgagtacaccatctacctgatcccctgcaccgtgcagcccacccagccctgggtggaccccggcgagaagcccctggcctgcaccgcccacgcccccgagagattcctgatccccatcgccttccagcagaccaacagacccgtgcccgtggtgtacagcctgaacaccgagttccagctgtgcaacaacgagaaggtgttcctgatggaccccaacaccagcgacatgagcctggccgagatggactacaagggcgccttcagcaagggccagatcctgtacggcagagtgctgtggaaccccgagcagaacctgaacagcgcctacaagctgcagctggagaaggtgtacctgtgcaccggcaaggacggctacgtgcccttcttcgaccccaccggcaccatctacaacgagggcccccagtacggctgcatccagcccaacaagcacctgaagcacagattcctgctgctggacagaaaccagcccgaggtgaccgacaagtacttccacgacgtgcccttcgaggcccacttcgccagcgagctgcccgacttccacgtggtgagcaacatgcccggcgtggacggcttcaccctgaaggtggacgccctgtacaaggtggaggccggccaccagtggtacctgcaggtgatctacatcatcggccccgacaccatcagcggccccagagtgcagagaagcctgaccgcccccctgagaagaaacagaagagacctggtggagcccgacggccagctgatcctggacgacagcctgatctacgacaacgagggcgaccaggtgaagaacggcaccaacatgaagagcctgaacctggagatgcaggagctggccgtggccgccagcctgagccagaccggcgccagcatcggcagcgccctggccgccatcatgctgctgctgctggtgttcctggtggcctgcttcatcaacagaaagtgccagaagcagagaaagaagaagcccgccgaggacatcctggaggagtaccccctgaacaccaaggtggaggtgcccaagagacaccccgacagagtggagaagaacgtgaacagacactactgcaccgtgagaaacgtgaacatcctgagcgagcccgaggccgcctacaccttcaagggcgccaaggtgaagagactgaacctggaggtgagagtgcacaacaacctgcaggacggcaccgaggtgtag

SEQ ID NO: 217812 - protein, 420 aa, Artificial Sequence
  derived and/or modified sequence
MVSKALLRLVSAVNRRRMKLLLGIALLAYVASVWGNFVNMRSIQENGELKIESKIEEMVEPLREKIRDLEKSFTQKYPPVKFLSEKDRKRILITGGAGFVGSHLTDKLMMDGHEVTVVDNFFTGRKRNVEHWIGHENFELINHDVVEPLYIEVDQIYHLASPASPPNYMYNPIKTLKTNTIGTLNMLGLAKRVGARLLLASTSEVYGDPEVHPQSEDYWGHVNPIGPRACYDEGKRVAETMCYAYMKQEGVEVRVARIFNTFGPRMHMNDGRVVSNFILQALQGEPLTVYGSGSQTRAFQYVSDLVNGLVALMNSNVSSPVNLGNPEEHTILEFAQLIKNLVGSGSEIQFLSEAQDDPQKRKPDIKKAKLMLGWEPVVPLEEGLNKAIHYFRKELEYQANNQYIPKPKPARIKKGRTRHS

SEQ ID NO: 217813 - protein, 185 aa, Artificial Sequence
  derived and/or modified sequence
MVSKALLRLVSAVNRRRMKLLLGIALLAYVAWLAKRVGARLLLASTSEVYGDPEVHPQSEDYWGHVNPIGPRACYDEGKRVAETMCYAYMKQEGVEVRVARIFNTFGPRMHMNDGRVVSNFILQALQGEPLTVYGSGSQTRAFQYVSDLVNGLVALMNSNVSSPVNLVSAPLPPLCRTAQTFVHL

SEQ ID NO: 217814 - DNA, 1263 bp, Artificial Sequence
  derived and/or modified sequence
atggtgagcaaggccctgctgagactggtgagcgccgtgaacagaagaagaatgaagctgctgctgggcatcgccctgctggcctacgtggccagcgtgtggggcaacttcgtgaacatgagaagcatccaggagaacggcgagctgaagatcgagagcaagatcgaggagatggtggagcccctgagagagaagatcagagacctggagaagagcttcacccagaagtacccccccgtgaagttcctgagcgagaaggacagaaagagaatcctgatcaccggcggcgccggcttcgtgggcagccacctgaccgacaagctgatgatggacggccacgaggtgaccgtggtggacaacttcttcaccggcagaaagagaaacgtggagcactggatcggccacgagaacttcgagctgatcaaccacgacgtggtggagcccctgtacatcgaggtggaccagatctaccacctggccagccccgccagcccccccaactacatgtacaaccccatcaagaccctgaagaccaacaccatcggcaccctgaacatgctgggcctggccaagagagtgggcgccagactgctgctggccagcaccagcgaggtgtacggcgaccccgaggtgcacccccagagcgaggactactggggccacgtgaaccccatcggccccagagcctgctacgacgagggcaagagagtggccgagaccatgtgctacgcctacatgaagcaggagggcgtggaggtgagagtggccagaatcttcaacaccttcggccccagaatgcacatgaacgacggcagagtggtgagcaacttcatcctgcaggccctgcagggcgagcccctgaccgtgtacggcagcggcagccagaccagagccttccagtacgtgagcgacctggtgaacggcctggtggccctgatgaacagcaacgtgagcagccccgtgaacctgggcaaccccgaggagcacaccatcctggagttcgcccagctgatcaagaacctggtgggcagcggcagcgagatccagttcctgagcgaggcccaggacgacccccagaagagaaagcccgacatcaagaaggccaagctgatgctgggctgggagcccgtggtgcccctggaggagggcctgaacaaggccatccactacttcagaaaggagctggagtaccaggccaacaaccagtacatccccaagcccaagcccgccagaatcaagaagggcagaaccagacacagctag

SEQ ID NO: 217815 - DNA, 1263 bp, Artificial Sequence
  derived and/or modified sequence
atggtgtctaaggcactgttacgacttgtgagcgctgttaacagacggcgaatgaaattgctgctgggcatcgctcttctggcgtatgtggcgtctgtctggggtaattttgtgaatatgcggagtatacaggaaaacggcgagttgaaaatcgaatcgaagattgaggagatggtggagccgctgcgcgagaaaataagggatcttgagaaaagtttcactcagaagtacccgcctgtcaagttcctgtcggaaaaagaccgcaagcgtatcctgattacaggaggtgccggattcgtggggtcccatctcaccgacaaactaatgatggacgggcacgaggtgacagtagtggacaacttctttacaggaaggaaacgcaacgtggaacactggatcgggcatgaaaatttcgaattgatcaatcacgatgtggtcgagcctctctatattgaagtagaccagatctaccatctcgcctcacccgctagcccgcctaattacatgtacaaccctattaaaactctgaagaccaatactatcgggaccctgaacatgctaggactcgctaagagggtaggagcgcgcctcctccttgcgagtactagcgaggtgtatggtgatccagaggtgcatccacagagtgaggattactggggacacgtaaacccaattgggcctcgcgcctgttacgacgaggggaaacgggtggccgaaactatgtgctacgcatacatgaagcaggagggagttgaggtcagggtggccagaatttttaatacattcggtcctcggatgcacatgaatgatggtagagttgtctccaactttatccttcaggccctgcaaggtgaaccacttaccgtgtacggctccggttcacaaacacgggccttccagtacgtttctgatttggttaacggcctcgtagcccttatgaacagcaatgtgtcatcgcccgtaaatctcgggaacccggaggaacatactattcttgagtttgcgcagctgattaagaatctggttggcagtggtagcgagattcaatttctgtcagaggcccaggatgacccacaaaagcggaaaccagatattaagaaagcaaagttgatgttgggttgggagccagtggtcccactcgaggaaggccttaataaggccatacattattttcgaaaagagctggagtatcaagccaataaccaatatatccctaaacccaagcccgcccgtatcaaaaaaggtagaacacgccacagttag

SEQ ID NO: 217816 - DNA, 1263 bp, Artificial Sequence
  derived and/or modified sequence
atggtgtccaaggccctgctgcggctggtgtctgctgtgaacagaagaaggatgaagctgctgctgggcatcgccctgctggcctacgtggcctctgtgtggggcaactttgtgaacatgaggagcatccaggagaatggagagctgaagattgagagcaagattgaggagatggtggagcccctgcgggagaagatccgggacctggagaagagcttcacccagaagtacccacctgtgaagttcctgtctgagaaggacaggaagaggatcctgatcaccggcggggccggctttgtgggcagccacctgacagacaagctgatgatggatggccacgaggtgacagtggtggacaacttcttcaccggcaggaagagaaatgtggagcactggattggacatgagaactttgagctgatcaaccatgatgtggtggagcccctgtacatcgaggtggaccagatctaccacctggccagccctgccagcccccccaactacatgtacaaccccatcaagaccctgaagaccaacaccatcggcaccctgaacatgctgggcctggccaagagggtgggcgcccggctgctgctggccagcaccagcgaggtgtatggagaccctgaggtgcacccccagagcgaggactactggggccacgtgaaccccatcggcccccgggcctgctatgatgagggcaagagggtggccgagaccatgtgctacgcctacatgaagcaggagggcgtggaggtgcgggtggcccgcatcttcaacaccttcggccccaggatgcacatgaatgatggccgggtggtgagcaacttcatcctgcaggccctgcagggcgagcccctgactgtgtatggcagcggcagccagacccgggccttccagtatgtgtctgacctggtgaatggcctggtggccctgatgaacagcaatgtgagcagccctgtgaacctgggcaaccctgaggagcacaccatcctggagtttgcccagctgatcaagaacctggtgggcagcggcagcgagatccagttcctgtctgaggcccaggatgacccccagaagaggaagccagacatcaagaaggccaagctgatgctgggctgggagcctgtggtgcccctggaggagggcctgaacaaggccatccactacttcaggaaggagctggagtaccaggccaacaaccagtacatccccaagcccaagccagcccgcatcaagaagggccgcaccaggcacagctag

SEQ ID NO: 217817 - DNA, 1263 bp, Artificial Sequence
  derived and/or modified sequence
atggtgagcaaggccctgctgcggctggtgagcgccgtgaaccggaggagaatgaagttgcttctgggaattgcactgttggcctacgtcgcttctgtctggggaaacttcgtgaatatgcgctccatacaagaaaatggggagctgaagatcgagagcaagattgaagaaatggtggagcctctcagagagaaaattcgagaccttgagaagtccttcacccagaagtacccccccgtgaaatttctgagtgaaaaggaccggaagaggattctgattaccgggggtgctggcttcgttgggagccacctcactgataaactgatgatggatgggcacgaggtgaccgtggtggataatttttttactgggcggaaacgcaacgtggaacattggatcggccacgagaacttcgaactcatcaatcacgatgtggtcgagcctctgtatattgaagtggatcaaatatatcatctcgctagtccagcatcccctccaaattatatgtacaatccaattaaaaccctgaaaacgaatacaataggtactttgaacatgcttggattggcgaagcgcgttggcgctcgtcttctgttagccagcacttctgaagtgtatggcgacccagaagtacatccccaatcagaggattactggggacacgttaaccctattgggcctagagcctgttatgacgagggaaagcgagttgccgaaactatgtgttacgcttacatgaaacaggagggcgtggaagtgagagttgctcggatcttcaacacgttcgggcccaggatgcacatgaatgatggaagagttgtttccaatttcatcctgcaggcactccagggagagccattgactgtctacggctctggatcacagactcgggccttccagtatgtctcagacctggttaacggactggtagctctgatgaacagcaatgtgagcagtcctgtgaatcttggaaaccctgaggagcataccatacttgagtttgcgcagcttatcaagaatcttgttggcagcggatctgagatccagttcctgagcgaggcccaggatgacccccagaaacggaagcctgatatcaagaaagctaagctaatgcttggctgggagcccgtggtgcctctagaggaagggctaaataaggccattcactatttccgaaaagaactggagtaccaggctaacaaccagtatattcccaagcccaagcctgctcgaataaagaaaggcaggacgcgccatagctag

SEQ ID NO: 217818 - DNA, 1263 bp, Artificial Sequence
  derived and/or modified sequence
atggtgagcaaggccctcctgcgactggtaagcgcagtcaacagaagacggatgaagttgcttctcggcatagccctgttggcctacgttgctagtgtctggggcaatttcgtaaatatgagatcaattcaggaaaatggagaattgaagattgagtcaaaaatcgaagagatggtcgaaccactgcgtgaaaaaatccgcgatctggagaagtccttcactcagaagtatcccccagtgaagtttctgtcagaaaaagacagaaaaagaattctcatcacagggggtgctgggttcgtgggttcgcacctgactgacaagctgatgatggatggtcatgaggtgaccgtcgtggacaacttcttcacaggcaggaagcgcaatgtggagcactggatcggacacgagaacttcgaattaataaaccatgacgtcgtggaacccctctatatcgaggtggaccagatctaccacctagcatcaccagcaagccctcctaactatatgtataatccaatcaagacactcaagactaacactattggcacactgaacatgctgggattggctaagagggtgggcgcaaggctcctgttagccagcacttccgaagtatatggggacccagaggtccacccccagtcggaagattattggggacacgtcaatccaatcggtccgagggcctgctacgatgaaggcaaacgcgtggctgaaacaatgtgttatgcctatatgaaacaagagggggtggaggtgcgcgtggcccgtatctttaacacatttgggccacgtatgcacatgaatgatggcagggtggtgtccaactttatcctgcaggctctgcagggcgagccattgacggtgtatggatctggaagccagacgcgcgcttttcagtacgtctccgatctcgtgaacgggctggttgcccttatgaatagtaatgtgtcatcaccggtgaacctgggcaacccggaagaacacaccattctggagttcgcccagctaataaagaatctcgtgggatccggcagtgagattcaatttctgagtgaggcacaggatgacccccagaaaaggaaacctgatataaaaaaggccaagcttatgctagggtgggagccggtggtaccactagaggagggtctgaacaaggccattcactattttcggaaagaactcgagtaccaggccaacaaccagtatattcccaagcctaagcccgcaaggattaagaagggccgaactcgccattcgtag

SEQ ID NO: 217819 - DNA, 1839 bp, Artificial Sequence
  derived and/or modified sequence
attgtgcagcaggcgggcccccgcgcggtagggccctggacccgcgcggctcccggggatggtgagcaaggcgctgctgcgcctcgtgtctgccgtcaaccgcaggaggatgaagctgctgctgggcatcgccttgctggcctacgtcgcctctgtttggggcaacttcgttaatatgaggtctatccaggaaaatggtgaactaaaaattgaaagcaagattgaagagatggttgaaccactaagagagaaaatcagagatttagaaaaaagctttacccagaaatacccaccagtaaagtttttatcagaaaaggatcggaaaagaattttgataacaggaggcgcagggttcgtgggctcccatctaactgacaaactcatgatggacggccacgaggtgaccgtggtggacaatttcttcacgggcaggaagagaaacgtggagcactggatcggacatgagaacttcgagttgattaaccacgacgtggtggagcccctctacatcgaggttgaccagatataccatctggcatctccagcctcccctccaaactacatgtataatcctatcaagacattaaagaccaatacgattgggacattaaacatgttggggctggcaaaacgagtcggtgcccgtctgctcctggcctccacatcggaggtgtatggagatcctgaagtccaccctcaaagtgaggattactggggccacgtgaatccaataggacctcgggcctgctacgatgaaggcaaacgtgttgcagagaccatgtgctatgcctacatgaagcaggaaggcgtggaagtgcgagtggccagaatcttcaacacctttgggccacgcatgcacatgaacgatgggcgagtagtcagcaacttcatcctgcaggcgctccagggggagccactcacggtatacggatccgggtctcagacaagggcgttccagtacgtcagcgatctagtgaatggcctcgtggctctcatgaacagcaacgtcagcagcccggtcaacctggggaacccagaagaacacacaatcctagaatttgctcagttaattaaaaaccttgttggtagcggaagtgaaattcagtttctctccgaagcccaggatgacccacagaaaagaaaaccagacatcaaaaaagcaaagctgatgctggggtgggagcccgtggtcccgctggaggaaggtttaaacaaagcaattcactacttccgtaaagaactcgagtaccaggcaaataatcagtacatccccaaaccaaagcctgccagaataaagaaaggacggactcgccacagctgaactcctcacttttaggacacaagactaccattgtacacttgatgggatgtatttttggcttttttttgttgtcgtttaaagaaagactttaacaggtgtcatgaagaacaaactggaatttcattctgaagcttgctttaatgaaatggatgtgcctaaaagctcccctcaaaaaactgcagattttgccttgcactttttgaatctctctttttatgtaaaatagcgtagatgcatctctgcgtattttcaagtttttttatcttgctgtgagagcatatgttgtgactgtcgttgacagttttatttactggtttctttgtgaagctgaaaaggaacattaagcgggacaaaaaatgccgattttatttatgaaagtgggtacttaataaatgagtcgttatactatgcataaagaaaaatcctagcagtattgtcaggtggtggtgcgccggcattgattttagggcagataaaagaattctgtgtgagagctttatgtttctcttttaattcag

SEQ ID NO: 217820 - protein, 699 aa, Artificial Sequence
  derived and/or modified sequence
MPSLWREILLESLLGCVSWSLYHDLGPMIYYFPLQTLELTGLEGFSIAFLSPIFLTITPFWKLVNKKWMLTLLRIITIGSIASFQAPNAKLRLMVLALGVSSSLIVQAVTWWSGSHLQRYLRIWGFILGQIVLVVLRIWYTSLNPIWSYQMSNKVILTLSAIATLDRIGTDGDCSKPEEKKTGEVATGMASRPNWLLAGAAFGSLVFLTHWVFGEVSLVSRWAVSGHPHPGPDPNPFGGAVLLCLASGLMLPSCLWFRGTGLIWWVTGTASAAGLLYLHTWAAAVSGCVFAIFTASMWPQTLGHLINSGTNPGKTMTIAMIFYLLEIFFCAWCTAFKFVPGGVYARERSDVLLGTMMLIIGLNMLFGPKKNLDLLLQTKNSSKVLFRKSEKYMKLFLWLLVGVGLLGLGLRHKAYERKLGKVAPTKEVSAAIWPFRFGYDNEGWSSLERSAHLLNETGADFITILESDASKPYMGNNDLTMWLGEKLGFYTDFGPSTRYHTWGIMALSRYPIVKSEHHLLPSPEGEIAPAITLTVNISGKLVDFVVTHFGNHEDDLDRKLQAIAVSKLLKSSSNQVIFLGYITSAPGSRDYLQLTEHGNVKDIDSTDHDRWCEYIMYRGLIRLGYARISHAELSDSEIQMAKFRIPDDPTNYRDNQKVVIDHREVSEKIHFNPRFGSYKEGHNYENNHHFHMNTPKYFL

SEQ ID NO: 217821 - DNA, 2472 bp, Artificial Sequence
  derived and/or modified sequence
cacactgcctcggttcggcaagtgggtcagttggctggggctcacttggcaacgggacgcgggaacgaggggcgcggacgcaggcccgggaggacgcggcggcgggaacctgggggcgcagggctagggcagcgggcccgacccgcacggctttcctggaaagcgctgcccctcgccgcggcgatgccctcgctgtggagagaaatcctcttggagtcgctgctgggatgtgtttcttggtctctctaccatgacctgggaccgatgatctattactttcctttgcaaacactagaactcactgggcttgaaggttttagtatagcatttctttctccaatattcctaacaattactcctttctggaaattggttaacaagaagtggatgctaaccctgctgaggataatcactattggcagcatagcctccttccaggctccaaatgccaaacttcgactgatggttcttgcgcttggggtgtcttcctcactgatagtgcaagctgtgacttggtggtcaggaagtcatttgcaaaggtacctcagaatttggggattcattttaggacagattgttcttgttgttctacgcatatggtatacttcactaaacccaatctggagttatcagatgtccaacaaagtgatactgacattaagtgccatagccacacttgatcgtattggcacagatggtgactgcagtaaacctgaagaaaagaagactggtgaggtagccacggggatggcctctagacccaactggctgctggcaggggctgcttttggtagccttgtgttcctcacccactgggtttttggagaagtctctcttgtttccagatgggcagtgagtgggcatccacatccagggccagatcctaacccatttggaggtgcagtactgctgtgcttggcaagtggattgatgcttccatcttgtttgtggtttcgtggtactggtttgatctggtgggttacaggaacagcttcagctgcggggctcctttacctgcacacatgggcagctgctgtgtctggctgtgtcttcgccatctttactgcatccatgtggccccaaacacttggacaccttattaactcagggacaaaccctgggaaaaccatgaccattgccatgatattttatcttctagaaatatttttctgtgcctggtgcacagcttttaagtttgtcccaggaggtgtctacgctagagaaagatcagatgtgcttttggggacaatgatgttaattatcgggctgaatatgctatttggtcctaagaaaaaccttgacttgcttcttcaaacaaaaaacagttctaaagtgcttttcagaaagagtgaaaaatacatgaaactttttctgtggctgcttgttggtgtgggattgttgggattaggactacggcataaagcctatgagagaaaactgggcaaagtggcaccaaccaaagaggtctctgctgccatctggcctttcaggtttggatatgacaatgaagggtggtctagtctagaaagatcagctcacctgctcaatgaaacaggtgcagatttcataacaattttggagagtgatgcttctaagccctatatggggaacaatgacttaaccatgtggctaggggaaaagttgggtttctatacagactttggtccaagcacaaggtatcacacttgggggattatggctttgtcaagatacccaattgtgaaatctgagcatcaccttcttccgtcaccagagggcgagatcgcaccagccatcacattgaccgttaacatttcgggcaagctggtggattttgtcgtgacacactttgggaaccacgaagatgacctcgacaggaaactgcaggctattgctgtttcaaaactactgaaaagtagctctaatcaagtgatatttctgggatatatcacttcagcacctggctccagagattatctacagctcactgaacatggcaatgtgaaggatatcgacagcactgatcatgacagatggtgtgaatacattatgtatcgagggctgatcaggttgggttatgcaagaatctcccatgctgaactgagtgattcagaaattcagatggcaaaatttaggatccctgatgaccccactaattatagagacaaccagaaagtggtcatagaccacagagaagtttctgagaaaattcattttaatcccagatttggatcctacaaagaaggacacaattatgaaaacaaccatcattttcatatgaatactcccaaatactttttatgaaacatttaaaacaagaagttattggctgggaaaatctaagaaaaaaagtatgtaagataaaaagaagagattaatgaaagtgggaaaatacacatgaagaacctcaacttaaaaaacacatggtatctatgcagtgggaaattacctccatttgtaaactatgttgcttaataaaaacatttctctaaa

SEQ ID NO: 217822 - DNA, 2100 bp, Artificial Sequence
  derived and/or modified sequence
atgccaagtctgtggcgcgagattttactggagagcttactgggctgtgttagttggtcactttaccacgacttggggcctatgatttattattttcccctccagacccttgaactaactgggctcgaaggtttttccattgcctttctctccccgatttttttgacaatcacaccgttctggaaactggtcaataaaaagtggatgctgacgttgctgagaattattaccatcggttcaatagcgtccttccaagccccaaacgctaaactgcgactgatggtgctcgccttaggcgtgtcaagctccctcatagtacaggccgtgacctggtggtcaggatcacatttgcaacggtatctgaggatttggggcttcatcttgggtcagatcgtcctcgtagtgctgagaatctggtacactagcttaaatccaatttggtcataccagatgtccaacaaagtgatcctgaccctcagtgcaatcgcgactctggaccggatcggaacagacggcgactgtagcaagcctgaagaaaaaaagactggagaggtggcaacgggaatggcttctcgtccgaattggctgctcgctggcgccgctttcggctctctggtgttcctcacccactgggtcttcggagaggtgtccctggtgtcgcggtgggcggtgagcggacatcctcaccccggccctgaccctaatccatttggcggagctgtgctgctgtgtctggccagtggcctcatgctgccttcctgtctgtggtttcggggcaccgggctcatttggtgggtgaccggcacggctagcgccgccgggctgctgtatctccacacatgggcggctgccgtgtccggatgcgttttcgcaatcttcacagccagtatgtggcctcagaccttggggcacctgataaactctggaacgaatccaggaaaaaccatgactatagcgatgatcttctacctcttagagatcttcttctgtgcgtggtgcacagcattcaagtttgtgcccggcggtgtgtacgcacgcgagagatctgacgtactgttaggcacaatgatgctgattatcggcctcaatatgctgttcggacctaaaaagaatctcgatctactgctgcagaccaagaactccagtaaggtcctgttccgcaaatctgagaagtatatgaagctgtttctgtggctgctggtgggagtaggtctgttgggtctcggcctgcgacacaaagcctatgagagaaaactcggaaaagtcgccccaacaaaggaggtctctgctgctatctggccattcagattcggatatgataacgagggttggtcatccttagagagaagcgcccatcttctgaatgaaacgggcgcggactttattaccatcctggaaagcgatgccagcaaaccatacatgggcaacaatgatctcactatgtggctcggagaaaaattaggattctataccgactttggtccctctacaagataccacacctggggaatcatggctctgagtcgttatcctattgtaaagtctgagcatcacctcttaccttcaccagagggagagatcgctcctgctattacactgacagttaatatttcaggtaagctagttgatttcgtggtgactcactttggcaatcatgaagatgatctggacaggaaattgcaggccatcgcagtaagtaaactgcttaaatcatcttccaatcaggtgatttttctcggttacataacttctgcccccggtagccgggattacctccagttaaccgagcacgggaacgtcaaggacatcgacagtaccgaccacgaccggtggtgcgaatacatcatgtatcggggcctgattcgcctcgggtatgctaggatttcacatgcagagctctcagattctgaaattcagatggccaaatttcggatacccgacgatcccacgaactaccgcgacaatcagaaggttgtaatcgatcaccgcgaggtctctgagaagatccattttaatcctagattcggaagctacaaggagggacacaactacgagaataaccatcacttccacatgaatacccccaagtatttcttgtag

SEQ ID NO: 217823 - DNA, 2100 bp, Artificial Sequence
  derived and/or modified sequence
atgcccagcctgtggagggagatcctgctggagagcctgctgggctgtgtgtcctggagcctgtaccatgacctgggccccatgatctactacttccccctgcagaccctggagctgaccggcctggagggcttcagcatcgccttcctgagccccatcttcctgaccatcacccccttctggaagctggtgaacaagaagtggatgctgaccctgctgcgcatcatcaccatcggcagcatcgccagcttccaggccccaaatgccaagctgcggctgatggtgctggccctgggcgtgagcagcagcctgattgtgcaggccgtgacctggtggagcggcagccacctgcagcgctacctgcgcatctggggcttcatcctgggccagatcgtgctggtggtgctgcgcatctggtacaccagcctgaaccccatctggagctaccagatgagcaacaaggtgatcctgaccctgagcgccatcgccaccctggaccgcatcggcacagatggagactgcagcaagccagaggagaagaagacaggagaggtggccaccggcatggccagccggcccaactggctgctggccggggccgccttcggcagcctggtgttcctgacccactgggtgtttggagaggtgtccctggtgagccgctgggccgtgtctggccacccccaccctggccctgaccccaacccctttggaggagctgtgctgctgtgcctggccagcggcctgatgctgcccagctgcctgtggttccggggcaccggcctcatctggtgggtgactggaacagccagcgctgctggcctgctgtacctgcacacctgggccgctgctgtgtctggctgtgtgtttgccatcttcaccgcctccatgtggccccagaccctgggccacctgatcaacagcggcaccaaccctgggaagaccatgaccatcgccatgatcttctacctgctggagatcttcttctgtgcctggtgcacagccttcaagtttgtgcctgggggcgtgtatgcccgggagaggagtgatgtgctgctgggcaccatgatgctgatcatcggcctgaacatgctgtttggccccaagaagaacctggacctgctgctgcagaccaagaacagcagcaaggtgctcttcaggaagtctgagaagtacatgaagctgttcctgtggctgctggtgggcgtgggcctgctgggcctgggcctgcggcacaaggcctatgaaaggaagctgggcaaggtggcccccaccaaggaggtgtctgctgccatctggcccttccgcttcggctatgacaatgaaggctggagcagcctggagaggtctgcccacctgctgaatgaaacaggagctgacttcatcaccatcctggagagtgatgccagcaagccctacatgggcaacaatgacctgaccatgtggctgggggagaagctgggcttctacacagactttggccccagcacccgctaccacacctggggcatcatggccctgagccgctaccccatcgtgaagtctgagcaccacctgctgcccagccctgagggggagatcgccccagccatcaccctgactgtgaacatcagcggcaagctggtggactttgtggtgacccactttggaaatcatgaagatgacctggacaggaagctgcaggccatcgctgtgtccaagctgctgaagagcagcagcaaccaggtgatcttcctgggctacatcaccagcgcccctggcagccgggactacctgcagctgacagaacatggaaatgtgaaggacatcgacagcacagaccatgaccgctggtgtgagtacatcatgtaccggggcctcatccggctgggctacgcccgcatcagccatgctgagctgagtgacagcgagatccagatggccaagttccgcatcccagatgaccccaccaactacagagacaaccagaaggtggtgattgaccaccgggaggtgtctgagaagatccacttcaaccccaggtttggcagctacaaggagggccacaactatgagaacaaccaccacttccacatgaacacccccaagtacttcctgtag

SEQ ID NO: 217824 - DNA, 2100 bp, Artificial Sequence
  derived and/or modified sequence
atgcccagcctgtggcgggagatcctgctggagagcctgctgggctgtgtgtcgtggagcctgtatcacgacctgggccccatgatttactacttcccactgcaaactcttgaactcacaggtcttgagggtttttcgattgcctttctgagtccaatattcctcacaattacacctttctggaagctcgtaaataagaagtggatgttgacactgctcagaattatcactataggcagcatcgcatcctttcaagctcccaatgccaaactgcgtctgatggttctcgccttaggagtgtcaagctccctcattgtgcaggcggtgacatggtggtctggatctcacctacagcgctacttacggatctggggcttcatactcggccagattgtgctggttgtcctgaggatatggtatacctccttgaatcctatttggtcataccagatgagcaataaagtgattttgaccctcagtgcgatcgcgactctggaccggatcggcacggatggggattgttccaagccggaagaaaagaaaaccggagaggtagcaaccgggatggcctctcgacccaactggcttctcgctggggccgccttcgggagccttgtgttcctgacacattgggtgttcggcgaggttagcctggtcagccgttgggctgtcagcggacaccctcaccccggtccggatccaaatccatttggcggcgcagtactcttgtgtctcgcgtcagggttgatgctgccatcctgcctttggttcaggggaacaggactgatctggtgggtgaccggtaccgccagtgcagcaggcctgctgtacctgcacacatgggctgcagccgtaagtgggtgtgtgtttgcaatctttaccgcatccatgtggccccaaactcttggacacttaatcaacagcggaactaaccccgggaaaaccatgacaatcgccatgattttctaccttctcgaaatcttcttttgcgcctggtgcacagcttttaaatttgtgcccgggggcgtgtacgcccgagagaggtcggatgtgctgcttgggacaatgatgctcatcatcggtctgaacatgctcttcggtccgaagaagaacctggatctgttgttgcagaccaaaaactcatctaaggtgctgttcagaaagtcggagaagtatatgaagcttttcctctggcttcttgtgggtgtaggactgctgggcctggggctgcggcacaaggcgtacgagaggaaacttggtaaggtagcacccactaaagaggtgagtgccgccatttggcctttccggttcggttacgacaatgaggggtggagtagcctcgagcggtcagctcaccttctcaatgaaacaggcgccgactttatcacaatactcgagtcagatgcgagcaagccttacatggggaacaatgacctgacaatgtggttgggcgagaagctagggttctacactgactttggaccaagcactagatatcacacctggggcataatggctctatcacgctacccaattgttaaaagcgagcaccaccttttgccttcaccagagggcgagattgctccagccataacactgaccgtcaatatatctgggaagctggttgacttcgttgttacacactttgggaatcatgaagatgacctggacaggaaactgcaggctatcgctgtgagcaaactgctgaaatcctcttccaaccaggtcattttcctgggatatatcacgagcgctcctgggtctcgcgattacctgcagctcacagagcacgggaacgtgaaagacatcgattccactgaccatgatcgatggtgcgagtacatcatgtacagaggcctgatcaggctaggatatgcgcgcatcagccacgctgagcttagcgactctgaaatacagatggcaaagttccggatacccgacgacccaactaattacagggacaatcaaaaggtggtgattgatcatcgggaagtatcagagaagattcacttcaaccccaggtttggcagttacaaggaggggcataattacgagaacaatcatcacttccacatgaatacgcccaaatacttcctgtag

SEQ ID NO: 217825 - DNA, 2100 bp, Artificial Sequence
  derived and/or modified sequence
atgccttcactgtggcgggaaattctgctagaaagcctgctggggtgtgtcagctggtctctctaccatgacctaggacccatgatatattattttcccctgcagacactggagctgacaggattggaggggttttctattgcgtttctgagcccaatctttctcactattaccccgttctggaagctggtgaataagaagtggatgctcaccctgctcagaataattaccattggctctatcgctagtttccaggctccaaacgctaaactgaggctgatggtgctggctcttggagtctcaagttccctcatcgtgcaagccgttacctggtggtcagggagccacttacagagatacttgagaatatggggtttcatcttaggccagatagttctggttgttctgcggatctggtacacaagtctgaatccaatttggagttatcagatgagcaacaaagtgattctgactctgtctgccattgcaactttggatcggataggaaccgatggtgattgtagtaagccggaggaaaagaaaaccggcgaggtagccacaggcatggcgtccaggcccaactggctgctcgctggagccgcttttggaagtcttgtgttcctcacacactgggtcttcggcgaagtgtctttggtgagccgatgggccgtctctggacatccccacccaggacccgaccccaacccctttggcggagcagtgctcctttgcctggcatcaggtctgatgctgccaagctgcctttggttccggggtacaggtctgatttggtgggtgaccggaacggctagtgccgctgggttgctgtatttacacacttgggctgcggctgtttcaggctgtgtcttcgcaatctttacagccagtatgtggccccagacactgggacatttaatcaatagcgggaccaaccccggtaaaacaatgactatagcaatgattttctatttgttggagatcttcttctgtgcttggtgcactgccttcaagttcgttcccggaggcgtctatgctcgtgagcggagcgacgtgctgctcggtactatgatgcttatcatcggactcaacatgctgttcggccctaagaaaaacctcgatttgttgttgcagacaaaaaactcaagcaaagtgctgtttcgcaagtccgagaagtacatgaaacttttcttgtggctgctcgtaggagtgggtctgctggggctgggcctgaggcataaagcttatgaaagaaagctcgggaaggtcgccccaactaaagaggtgagcgcagcaatctggccattccgatttggctatgataacgaaggatggtcgtcactggagagaagtgcacaccttctcaacgagacaggggcagattttatcacaatcctggagagtgacgcgtccaagccctatatgggtaacaacgacctgaccatgtggcttggcgagaaacttgggttctacaccgacttcggcccttctactcgctaccacacctgggggatcatggcgctgtcccgatacccaatcgtgaagagcgaacaccacttgctgcctagccctgagggagagattgctcctgccattacactgactgtgaacattagcggaaaactcgtggacttcgtagtgacacactttgggaatcacgaggatgacctggatcggaaactgcaagctatcgccgtgagtaagctgttaaagtcctcaagcaaccaggtgatttttctgggatacattacctctgccccaggctcccgcgactacctgcagctgacagagcatggtaatgtcaaggacattgactctacagatcacgaccggtggtgtgaatacatcatgtaccgcggacttatcagactcgggtacgcaaggatttcacatgccgagttgagtgattccgagattcagatggctaaattcagaattcctgatgatccgactaattatagagataaccagaaggtcgtcatcgaccacagggaagtgagcgaaaagattcactttaatccaagattcggctcttataaagagggccataactacgaaaataatcaccatttccacatgaatacacccaaatacttcttgtag

SEQ ID NO: 217826 - DNA, 2100 bp, Artificial Sequence
  derived and/or modified sequence
atgcccagcctgtggagagagatcctgctggagagcctgctgggctgcgtgagctggagcctgtaccacgacctgggccccatgatctactacttccccctgcagaccctggagctgaccggcctggagggcttcagcatcgccttcctgagccccatcttcctgaccatcacccccttctggaagctggtgaacaagaagtggatgctgaccctgctgagaatcatcaccatcggcagcatcgccagcttccaggcccccaacgccaagctgagactgatggtgctggccctgggcgtgagcagcagcctgatcgtgcaggccgtgacctggtggagcggcagccacctgcagagatacctgagaatctggggcttcatcctgggccagatcgtgctggtggtgctgagaatctggtacaccagcctgaaccccatctggagctaccagatgagcaacaaggtgatcctgaccctgagcgccatcgccaccctggacagaatcggcaccgacggcgactgcagcaagcccgaggagaagaagaccggcgaggtggccaccggcatggccagcagacccaactggctgctggccggcgccgccttcggcagcctggtgttcctgacccactgggtgttcggcgaggtgagcctggtgagcagatgggccgtgagcggccacccccaccccggccccgaccccaaccccttcggcggcgccgtgctgctgtgcctggccagcggcctgatgctgcccagctgcctgtggttcagaggcaccggcctgatctggtgggtgaccggcaccgccagcgccgccggcctgctgtacctgcacacctgggccgccgccgtgagcggctgcgtgttcgccatcttcaccgccagcatgtggccccagaccctgggccacctgatcaacagcggcaccaaccccggcaagaccatgaccatcgccatgatcttctacctgctggagatcttcttctgcgcctggtgcaccgccttcaagttcgtgcccggcggcgtgtacgccagagagagaagcgacgtgctgctgggcaccatgatgctgatcatcggcctgaacatgctgttcggccccaagaagaacctggacctgctgctgcagaccaagaacagcagcaaggtgctgttcagaaagagcgagaagtacatgaagctgttcctgtggctgctggtgggcgtgggcctgctgggcctgggcctgagacacaaggcctacgagagaaagctgggcaaggtggcccccaccaaggaggtgagcgccgccatctggcccttcagattcggctacgacaacgagggctggagcagcctggagagaagcgcccacctgctgaacgagaccggcgccgacttcatcaccatcctggagagcgacgccagcaagccctacatgggcaacaacgacctgaccatgtggctgggcgagaagctgggcttctacaccgacttcggccccagcaccagataccacacctggggcatcatggccctgagcagataccccatcgtgaagagcgagcaccacctgctgcccagccccgagggcgagatcgcccccgccatcaccctgaccgtgaacatcagcggcaagctggtggacttcgtggtgacccacttcggcaaccacgaggacgacctggacagaaagctgcaggccatcgccgtgagcaagctgctgaagagcagcagcaaccaggtgatcttcctgggctacatcaccagcgcccccggcagcagagactacctgcagctgaccgagcacggcaacgtgaaggacatcgacagcaccgaccacgacagatggtgcgagtacatcatgtacagaggcctgatcagactgggctacgccagaatcagccacgccgagctgagcgacagcgagatccagatggccaagttcagaatccccgacgaccccaccaactacagagacaaccagaaggtggtgatcgaccacagagaggtgagcgagaagatccacttcaaccccagattcggcagctacaaggagggccacaactacgagaacaaccaccacttccacatgaacacccccaagtacttcctgtag

SEQ ID NO: 217827 - protein, 334 aa, Artificial Sequence
  derived and/or modified sequence
MVEFAPLFMPWERRLQTLAVLQFVFSFLALAEICTVGFIALLFTRFWLLTVLYAAWWYLDRDKPRQGGRHIQAIRCWTIWKYMKDYFPISLVKTAELDPSRNYIAGFHPHGVLAVGAFANLCTESTGFSSIFPGIRPHLMMLTLWFRAPFFRDYIMSAGLVTSEKESAAHILNRKGGGNLLGIIVGGAQEALDARPGSFTLLLRNRKGFVRLALTHGAPLVPIFSFGENDLFDQIPNSSGSWLRYIQNRLQKIMGISLPLFHGRGVFQYSFGLIPYRRPITTVVGKPIEVQKTLHPSEEEVNQLHQRYIKELCNLFEAHKLKFNIPADQHLEFC

SEQ ID NO: 217828 - protein, 252 aa, Artificial Sequence
  derived and/or modified sequence
MKDYFPISLVKTAELDPSRNYIAGFHPHGVLAVGAFANLCTESTGFSSIFPGIRPHLMMLTLWFRAPFFRDYIMSAGLVTSEKESAAHILNRKGGGNLLGIIVGGAQEALDARPGSFTLLLRNRKGFVRLALTHGAPLVPIFSFGENDLFDQIPNSSGSWLRYIQNRLQKIMGISLPLFHGRGVFQYSFGLIPYRRPITTVVGKPIEVQKTLHPSEEEVNQLHQRYIKELCNLFEAHKLKFNIPADQHLEFC

SEQ ID NO: 217829 - protein, 242 aa, Artificial Sequence
  derived and/or modified sequence
LVKTAKLGTSWNYLFDFHPHRVLVVGAFANFCTEPTGCSCLFPKLPPHLLMLPCWFHLLFFQDYIMSGASALPPGLVSFVKAPLPQWWPGGCPGVGGPLQALEAKPGQLSLPIRNQKRLVKSALELGENELFQQFPNPQSSWVQRTQEALRPLLSVALQLFLGRRGLPLPFRAPIRTVVGSAIPVQQSPPPSPAQVDTLQARYVGRLTQLFEEHQARYGVPADRHLVLTEARPTAWPRLSAG

SEQ ID NO: 217830 - DNA, 1005 bp, Artificial Sequence
  derived and/or modified sequence
atggtggagttcgcccccctgttcatgccctgggagagaagactgcagaccctggccgtgctgcagttcgtgttcagcttcctggccctggccgagatctgcaccgtgggcttcatcgccctgctgttcaccagattctggctgctgaccgtgctgtacgccgcctggtggtacctggacagagacaagcccagacagggcggcagacacatccaggccatcagatgctggaccatctggaagtacatgaaggactacttccccatcagcctggtgaagaccgccgagctggaccccagcagaaactacatcgccggcttccacccccacggcgtgctggccgtgggcgccttcgccaacctgtgcaccgagagcaccggcttcagcagcatcttccccggcatcagaccccacctgatgatgctgaccctgtggttcagagcccccttcttcagagactacatcatgagcgccggcctggtgaccagcgagaaggagagcgccgcccacatcctgaacagaaagggcggcggcaacctgctgggcatcatcgtgggcggcgcccaggaggccctggacgccagacccggcagcttcaccctgctgctgagaaacagaaagggcttcgtgagactggccctgacccacggcgcccccctggtgcccatcttcagcttcggcgagaacgacctgttcgaccagatccccaacagcagcggcagctggctgagatacatccagaacagactgcagaagatcatgggcatcagcctgcccctgttccacggcagaggcgtgttccagtacagcttcggcctgatcccctacagaagacccatcaccaccgtggtgggcaagcccatcgaggtgcagaagaccctgcaccccagcgaggaggaggtgaaccagctgcaccagagatacatcaaggagctgtgcaacctgttcgaggcccacaagctgaagttcaacatccccgccgaccagcacctggagttctgctag

SEQ ID NO: 217831 - DNA, 759 bp, Artificial Sequence
  derived and/or modified sequence
atgaaggactacttccccatcagcctggtgaagaccgccgagctggaccccagcagaaactacatcgccggcttccacccccacggcgtgctggccgtgggcgccttcgccaacctgtgcaccgagagcaccggcttcagcagcatcttccccggcatcagaccccacctgatgatgctgaccctgtggttcagagcccccttcttcagagactacatcatgagcgccggcctggtgaccagcgagaaggagagcgccgcccacatcctgaacagaaagggcggcggcaacctgctgggcatcatcgtgggcggcgcccaggaggccctggacgccagacccggcagcttcaccctgctgctgagaaacagaaagggcttcgtgagactggccctgacccacggcgcccccctggtgcccatcttcagcttcggcgagaacgacctgttcgaccagatccccaacagcagcggcagctggctgagatacatccagaacagactgcagaagatcatgggcatcagcctgcccctgttccacggcagaggcgtgttccagtacagcttcggcctgatcccctacagaagacccatcaccaccgtggtgggcaagcccatcgaggtgcagaagaccctgcaccccagcgaggaggaggtgaaccagctgcaccagagatacatcaaggagctgtgcaacctgttcgaggcccacaagctgaagttcaacatccccgccgaccagcacctggagttctgctag

SEQ ID NO: 217832 - DNA, 1005 bp, Artificial Sequence
  derived and/or modified sequence
atggttgagtttgccccactctttatgccatgggagaggcggctccagactctggctgtacttcagtttgtgtttagtttcctggccctggctgagatctgtacggttggcttcatcgcactgctgttcacccgtttttggctgctcacagtcttatacgcggcgtggtggtatctcgaccgcgacaaaccacggcagggcgggcggcacatacaggcgatccggtgctggactatctggaaatatatgaaggattacttccccatctctctggtgaagacagcggagctggatcccagcagaaactacatcgccgggttccacccacacggagtccttgccgtgggggccttcgctaatctttgcaccgaatctactggctttagcagcatttttccgggcattagaccccatctcatgatgctaacactctggttccgagccccatttttccgggattacattatgtctgccggtctagtgacatcagagaaagaaagtgccgcacacattcttaatcggaaaggaggcggcaatctgttgggcataatagtgggtggagcacaggaagctctagatgctaggcctggtagcttcaccttgctcctgagaaatcggaagggcttcgtccgactcgctctcacacacggggctcctttagtcccaatcttcagctttggtgaaaatgacctcttcgatcaaattcccaattcctcgggtagctggctcagatatatccaaaatagattgcaaaagatcatgggcatctcactgccgctatttcacggcaggggcgtattccagtacagcttcggtttgataccctatagaagacctataacgactgtcgtaggtaagcccatcgaggtgcagaaaacactgcatcctagcgaagaagaagtcaaccagctccaccaacggtacattaaggagctgtgtaacctctttgaagcgcacaagctgaaatttaatatcccggccgatcagcaccttgagttctgttag

SEQ ID NO: 217833 - DNA, 759 bp, Artificial Sequence
  derived and/or modified sequence
atgaaagactattttcctatttctctcgtgaaaaccgcagaactggacccttctcgaaattacatcgcggggttccacccacacggcgtgctagcagtgggagcctttgccaacctatgcacagagagtaccggcttttcaagcatctttccgggtattcggccacatctgatgatgctcactttgtggtttagagccccgtttttccgcgattatataatgtcagccgggttggtgaccagcgaaaaagagagtgctgcccacattcttaacagaaagggtggcggcaacttgttaggtattatcgtaggtggagctcaagaggccctggacgcgcgccctggctccttcactttgctgctccgcaacaggaaggggttcgtccgactggcactgacacacggggccccccttgtcccaatcttctccttcggcgaaaacgatctttttgaccagatcccgaattcctcaggatcatggcttcgatacattcaaaaccgcctccagaaaattatgggaatctctcttccactgttccacgggcggggggtgttccagtatagcttcggactaatcccataccgccgcccgattacaacagttgttggtaagcctatagaggtccagaagaccctgcaccccagtgaagaggaagtgaaccaacttcaccaacggtacattaaagagctatgtaacttgttcgaggcacataaactgaagttcaacattccagccgatcagcatttggagttttgttag

SEQ ID NO: 217834 - DNA, 1005 bp, Artificial Sequence
  derived and/or modified sequence
atggtggagtttgcccccctcttcatgccctgggagcggcggctgcagaccctggccgtgctgcagtttgtgttctccttcctggccctggccgagatctgcaccgtgggcttcatcgccctgctcttcacccgcttctggctgctgactgtgctgtatgctgcctggtggtacctggaccgggacaagccccggcagggcggccgccacatccaggccatccgctgctggaccatctggaagtacatgaaggactacttccccatcagcctggtgaagacagctgagctggaccccagcaggaactacatcgccggcttccacccccacggcgtgctggccgtgggcgcctttgccaacctgtgcacagagagcacaggcttcagcagcatcttccctggcatccggccccacctgatgatgctgaccctgtggttccgggcccccttcttccgggactacatcatgtctgctggcctggtgaccagcgagaaggagagcgctgcccacatcctgaacagaaaaggaggcggcaacctgctgggcatcatcgtgggcggggcccaggaggccctggatgcccggcccggcagcttcaccctgctgctgaggaacagaaaaggatttgtgcggctggccctgacccacggggcccccctggtgcccatcttctcctttggagaaaatgacctgtttgaccagatccccaacagcagcggctcctggctgcgctacatccagaaccggctgcagaagatcatgggcatcagcctgcccctcttccacggccggggcgtcttccagtacagctttggcctcatcccctacagaagacccatcaccaccgtggtgggcaagcccatcgaggtgcagaagaccctgcaccccagcgaggaggaggtgaaccagctgcaccagcgctacatcaaggagctgtgcaacctgtttgaggcccacaagctgaagttcaacatcccagctgaccagcacctggagttctgctag

SEQ ID NO: 217835 - DNA, 759 bp, Artificial Sequence
  derived and/or modified sequence
atgaaggactacttccccatcagcctggtgaagacagctgagctggaccccagcaggaactacatcgccggcttccacccccacggcgtgctggccgtgggcgcctttgccaacctgtgcacagagagcacaggcttcagcagcatcttccctggcatccggccccacctgatgatgctgaccctgtggttccgggcccccttcttccgggactacatcatgtctgctggcctggtgaccagcgagaaggagagcgctgcccacatcctgaacagaaaaggaggcggcaacctgctgggcatcatcgtgggcggggcccaggaggccctggatgcccggcccggcagcttcaccctgctgctgaggaacagaaaaggatttgtgcggctggccctgacccacggggcccccctggtgcccatcttctcctttggagaaaatgacctgtttgaccagatccccaacagcagcggctcctggctgcgctacatccagaaccggctgcagaagatcatgggcatcagcctgcccctcttccacggccggggcgtcttccagtacagctttggcctcatcccctacagaagacccatcaccaccgtggtgggcaagcccatcgaggtgcagaagaccctgcaccccagcgaggaggaggtgaaccagctgcaccagcgctacatcaaggagctgtgcaacctgtttgaggcccacaagctgaagttcaacatcccagctgaccagcacctggagttctgctag

SEQ ID NO: 217836 - DNA, 1404 bp, Artificial Sequence
  derived and/or modified sequence
aaaaacctgtgggtgcctcagaccacagcagagctcacagaacctgcgggagccaggctgacccgccagcatggtagagttcgcgcccttgtttatgccgtgggagcgcaggctgcagacacttgctgtcctacagtttgtcttctccttcttggcactggccgagatctgcactgtgggcttcatagccctcctgtttacaagattctggctcctcactgtcctgtatgcggcctggtggtatctggaccgagacaagccacggcaggggggccggcacatccaggccatcaggtgctggactatatggaagtacatgaaggactatttccccatctcgctggtcaagactgctgagctggacccctctcggaactacattgcgggcttccacccccatggagtcctggcagtcggagcctttgccaacctgtgcactgagagcacaggcttctcttcgatcttccccggtatccgcccccatctgatgatgctgaccttgtggttccgggcccccttcttcagagattacatcatgtctgcagggttggtcacatcagaaaaggagagtgctgctcacattctgaacaggaagggtggcggaaacttgctgggcatcattgtagggggtgcccaggaggccctggatgccaggcctggatccttcacgctgttactgcggaaccgaaagggcttcgtcaggctcgccctgacacacggggcacccctggtgccaatcttctccttcggggagaatgacctatttgaccagattcccaactcttctggctcctggttacgctatatccagaatcggttgcagaagatcatgggcatctccctcccactctttcatggccgtggtgtcttccagtacagctttggtttaataccctaccgccggcccatcaccactgtggtggggaagcccatcgaggtacagaagacgctgcatccctcggaggaggaggtgaaccagctgcaccagcgttatatcaaagagctgtgcaacctcttcgaggcccacaaacttaagttcaacatccctgctgaccagcacttggagttctgctgagcccaaagggcagggccaacattagggagcccagcaggaggtgctgtgctgagaagacttcctggaggtgtttgttgaacatatctgcagagccttcccagactcctgcaaatccaacccatatcaggctgtaagtcagagcaggcaatgcagaagaggagaccagaccaaggggtcagctggggctaggacagtgagggctgctagaggggctgggcctctctttgcacatggacactgggcccctctctatattgagtggtctgttaacattcattggtggctgattccaaaagatgagagccaaagctgcacggactcgagtccta

SEQ ID NO: 217837 - DNA, 3204 bp, Artificial Sequence
  derived and/or modified sequence
actgtgtagttcagagtggccacagacaagaggcaggagcgggagggacagggccagctctggggctcctggaggccaggctgagctacttggactgtgcccaaagttatggggaagtcatgaagggcttgaataaggggaggcacctggctggatttatctctgggaaaatggggcagaggatgaacagaaagagagcaggaaagggtctccctttgctctgagatcccaaaagatggaaactagaacagtttatccaaccagttgtccccattgattgagcacttaatgagtacaaacaactctcctggggagaaggaggacaggcaggggatggagtgaattaggcggcctggtgcagtgggagaaagtgagctttggagttaggcctacctaggctcaacgcgtgctcccagtgacactgggctggccgtagtccctctcagggactttgtctcctctttgaatgccccggaagctgctgtcttcctcctgggcccgaggattggacaggacagtgctgctagtgccaggcctatgggcagagttcagtctgagcaatctcacctgccttcctctcagacccctgtccctgacagctccttcttccctccccagccgagatctgcactgtgggcttcatagccctcctgtttacaagattctggctcctcactgtcctgtatgcggcctggtggtatctggaccgagacaagccacggcaggggggccggcacatccaggccatcaggtgctggactatatggaagtacatgaaggactatttccccatctcgctggtcaagactgctgagctggacccctctcggaactacattgcgggcttccacccccatggagtcctggcagtcggagcctttgccaacctgtgcactgagagcacaggcttctcttcgatcttccccggtatccgcccccatctgatgatgctgaccttgtggttccgggcccccttcttcagagattacatcatgtctgcagggttggtcacatcagaaaaggagagtgctgctcacattctgaacaggaagggtggcggaaacttgctgggcatcattgtagggggtgcccaggaggccctggatgccaggcctggatccttcacgctgttactgcggaaccgaaagggcttcgtcaggctcgccctgacacacggggcacccctggtgccaatcttctccttcggggagaatgacctatttgaccagattcccaactcttctggctcctggttacgctatatccagaatcggttgcagaagatcatgggcatctccctcccactctttcatggccgtggtgtcttccagtacagctttggtttaataccctaccgccggcccatcaccactgtggtggggaagcccatcgaggtacagaagacgctgcatccctcggaggaggaggtgaaccagctgcaccagcgttatatcaaagagctgtgcaacctcttcgaggcccacaaacttaagttcaacatccctgctgaccagcacttggagttctgctgagcccaaagggcagggccaacattagggagcccagcaggaggtgctgtgctgagaagacttcctggaggtgtttgttgaacatatctgcagagccttcccagactcctgcaaatccaacccatatcaggctgtaagtcagagcaggcaatgcagaagaggagaccagaccaaggggtcagctggggctaggacagtgagggctgctagaggggctgggcctctctttgcacatggacactgggcccctctctatattgagtggtctgttaacattcattggtggctgattccaaaagatgagagccaaagctgcacggactcgagtcctaggctgcacacctcacaagcatctcttctactgcattctgttggtcgaagcaagtcacaacccagcagattcaaggagtaaggaataggatccccctctggatgggaggagcagcaatgtcatattacaaaagggtgtggacacatgcagggattcttactgccgtctttgcaaacaatccaccaaaacttaaaaactaaaagcctgaagcacaagcactctccaccccaggcacacacaccctggaattccctgtgtgaccatggtaccaccactgtgtgtcccgaggatcccagctcagctttgcatcgctgccctatctccctctcgctctcccctgttgatccctcatgcacagccacagcgagctgtctaaaacacaaagctgaccgcgccatttcctactcagcatccttccatgaccctccattgctcctaggatagggtttggaccagtctgaatccagaggatcaggatccagcaggaaccagaggataatttgaggagggtttaaaaaggaaccattttttgaggtgtgtgcactgtttccaccctgaggcctggaaggatgaatggaagcagcagttcctgaaccaggaagactcatgtgtgggggccattgctggtcaaggggcacgaacaggtctggtgaccctgcaagggaggagccaggagcaagcattcccacttcaccttcctccattcagtctgctgccaagttccccactgcctgagcccaactagaagctggagggaaggagggcctgtggctgcagtccaggcatgtaggcctcctgggaaagggagaatggcaaagacaggcagagtggatctggaggggtcaacggaagacggaacatgtccacttccaggcccgagcttctcagcctgccgtttgccactctccagcatctggcccagcctgtccatcctcatctctcttcctcccttactccgtgctcccatcactcggaaccatttgcatttctttgtctcagctatattgtctcacctctgagtttttgcccatgatgttggatgccatggaatgccatatcctccccattatctcccccttgtctggataattcctactcatcctacaatactgattttatctgtgcaaagaagtcttccccagtgcctctggttgacaggggtttcctctggcttctccagactttctgttcctccaccacagcccttagcaccctggggaggaggtgttgctgtccaggtaaatgctgcgccaatgcccctgcctctagtgcactccctccagcctacccacaaacaggacctgcatcctgtctcacaaataaaactgaactcttgaaatggtg

SEQ ID NO: 217838 - DNA, 1005 bp, Artificial Sequence
  derived and/or modified sequence
atggtggagttcgcccccctgttcatgccctgggagcggcggctgcagacgctggccgtgctgcaattcgtgttttcctttttggccctcgccgaaatatgtaccgtgggcttcatcgccttgctgttcacccgcttctggctgttgaccgtgctgtacgctgcctggtggtacctcgaccgcgacaagccgcggcaggggggtcgccatatccaagccatccgttgttggacaatttggaagtatatgaaagattattttccaatcagtctagttaaaacagctgagcttgatccaagtagaaactacatcgccgggttccaccctcacggggtcctggcggtgggcgcgtttgccaacctctgtaccgagagcaccgggtttagttcgatcttccctggcattagaccccatttgatgatgttgaccttatggtttcgcgctcctttttttagggactatatcatgtctgccggcctcgtgaccagcgaaaaggagtccgcagcccacattctgaatcgtaaagggggcggcaacctcctgggaattatcgtgggtggagcgcaggaggcattagacgcccggccaggcagcttcacccttctgcttagaaataggaagggtttcgtgagactggccctcacccatggagcaccactcgttccgatcttcagcttcggcgaaaacgatctatttgaccagataccaaatagctctggtagctggctgaggtacatccagaataggctgcagaagatcatgggaatttcgctgcctctattccacgggaggggcgtcttccaatattcgtttgggttaattccataccgacggccgatcaccacagtcgttggtaaacccatcgaagtccagaagacacttcatccctcagaagaggaggtgaaccaacttcaccagagatatattaaagagttatgtaatctctttgaggcacataagttgaagtttaatatacctgccgaccagcatctggaattctgctag

SEQ ID NO: 217839 - DNA, 759 bp, Artificial Sequence
  derived and/or modified sequence
atgaaggactacttccccatcagcctggtgaagaccgccgagctggacccttcaaggaactacatcgctggttttcacccacacggtgtgcttgcagtgggcgcctttgcgaatttgtgtaccgaaagcactggtttcagcagtatctttcctgggatccgaccacaccttatgatgctcactctttggttcagggcacctttttttcgcgactatattatgtctgccggcctcgtgacctccgaaaaggaaagcgcagcacatattctgaatcggaagggggggggtaatctgctgggaataattgtcggaggagctcaggaggccctggacgcccgccctggctcatttacactcttgcttcgcaatagaaagggctttgtgagacttgccttaacccatggcgctcccttagtacccatcttttcttttggtgagaacgacctgttcgaccagattcccaattctagcggatcctggctccggtatattcagaaccgtctgcaaaaaattatggggatttcccttcctctcttccacggtagaggagtgtttcagtactctttcggactcattccctatagacggcccatcactacggtcgtgggaaaaccaatcgaggtgcaaaaaaccctccacccttctgaggaagaggtcaaccagcttcaccagcggtacatcaaagagctatgcaacctgttcgaggcccataagctcaagttcaatattcccgccgatcaacacctcgaattttgctag

SEQ ID NO: 217840 - DNA, 1005 bp, Artificial Sequence
  derived and/or modified sequence
atggtggagttcgcccctctgtttatgccgtgggaaaggcgcctgcagacactcgcagtcttgcagtttgtgttcagtttcctggcactggctgaaatctgcacggtggggtttatcgctctgctttttacgagattctggttgctcaccgtgctgtatgctgcctggtggtatctggaccgcgacaagcccaggcagggcggacgccacattcaggccatccgctgctggaccatttggaaatatatgaaggattacttcccaatctccctcgtgaaaacagctgaattggacccgagtagaaattatatagccggttttcatcctcacggtgtactcgccgtcggtgcgttcgccaacttgtgtacagagagtactggcttctctagtatattccccggaatcaggccacatctcatgatgctgactctttggtttcgagctccattctttagagattatattatgagtgctggactggtcacctccgagaaagaaagtgcagctcacatcctcaacaggaagggtggtgggaatctcctaggcatcatcgtgggcggtgcccaagaggcccttgacgcacggccaggtagcttcactctgttactgaggaatcgcaagggatttgtgaggttggcgttgacacacggtgctccactcgtaccaatcttctcctttggggagaacgacctgtttgaccagatccccaacagcagtggttcctggctgcgctatattcagaatcgcctgcagaagattatgggcatttccctgccactattccatggacgaggtgtgtttcaatacagctttggtttgattccttatcgccgacccatcactaccgtggtggggaagcctattgaagtgcagaagacactccacccatctgaagaagaggtgaatcagctacaccaaaggtacatcaaagagctgtgtaacctgttcgaggcccacaaactgaaattcaatatccctgctgatcagcacctggaattctgctag

SEQ ID NO: 217841 - DNA, 759 bp, Artificial Sequence
  derived and/or modified sequence
atgaaagattattttcccatcagcctagtaaagacggccgagctggacccaagtcgaaattatatcgctggctttcatccgcatggggttctcgccgtcggcgctttcgctaatctgtgtaccgaaagtaccggttttagctcaatattccccggtatcaggccacaccttatgatgttgacactctggttccgggctccattcttccgggactatatcatgtcagccggacttgtcacctcagaaaaggagtcggcagcacatatcttgaatcgtaagggcggagggaacttacttgggataatcgtaggcggagcccaggaggcccttgatgccagacccggtagctttactttattgcttagaaatcgaaaaggattcgtgcgacttgcgctgacccatggagccccactggtacccattttttccttcggagagaacgatctattcgaccagataccaaattccagtgggtcttggctgcggtacatccaaaacaggctgcaaaagattatgggcataagcctccccctgtttcatggcaggggtgttttccaatactcattcggtctcattccctaccggaggcctatcaccaccgtggtaggaaagccgatcgaggtccagaagaccctccaccctagcgaggaagaagtgaatcagctccaccagaggtatatcaaagagctctgcaacctattcgaagcacacaaactgaagttcaatatccccgctgatcagcacctggagttttgctag

SEQ ID NO: 217842 - DNA, 729 bp, Artificial Sequence
  derived and/or modified sequence
ctggtgaagaccgccaagctgggcaccagctggaactacctgttcgacttccacccccacagagtgctggtggtgggcgccttcgccaacttctgcaccgagcccaccggctgcagctgcctgttccccaagctgcccccccacctgctgatgctgccctgctggttccacctgctgttcttccaggactacatcatgagcggcgccagcgccctgccccccggcctggtgagcttcgtgaaggcccccctgccccagtggtggcccggcggctgccccggcgtgggcggccccctgcaggccctggaggccaagcccggccagctgagcctgcccatcagaaaccagaagagactggtgaagagcgccctggagctgggcgagaacgagctgttccagcagttccccaacccccagagcagctgggtgcagagaacccaggaggccctgagacccctgctgagcgtggccctgcagctgttcctgggcagaagaggcctgcccctgcccttcagagcccccatcagaaccgtggtgggcagcgccatccccgtgcagcagagccccccccccagccccgcccaggtggacaccctgcaggccagatacgtgggcagactgacccagctgttcgaggagcaccaggccagatacggcgtgcccgccgacagacacctggtgctgaccgaggccagacccaccgcctggcccagactgagcgccggctag

SEQ ID NO: 217843 - DNA, 729 bp, Artificial Sequence
  derived and/or modified sequence
ctggtcaaaacagcaaaactcgggacaagttggaattatctatttgattttcacccacaccgcgttcttgtggtgggcgcgtttgctaacttctgtacggaacccacaggctgctcctgcctgttcccaaagctccccccccatcttcttatgctcccatgctggtttcatctgctcttctttcaggattatatcatgtctggagcttccgcactccccccaggattagtgtcctttgttaaggcccctctgccccagtggtggcctggtggatgtccaggcgtcggcgggccgctgcaagctctggaggcgaagcctggccaactgtctctaccgatacggaatcagaagcgcctcgtgaaatctgcgctggagttaggggaaaacgagctctttcaacaatttcccaacccacagagctcatgggttcagagaactcaggaggcactccgacctctgctatctgtagccctgcagctattcctcggtaggaggggcctcccactgccattccgtgcccccattcgtaccgtcgtgggttctgctattcctgtgcagcagtctcccccccccagtccagcccaggtcgacacccttcaggcccgctatgtaggtagactgacacagctgttcgaagaacatcaggctcgatacggggtgcccgcagacaggcatctggtgctgacggaggcacgcccaacagcttggccacgtctgagcgcaggttag

SEQ ID NO: 217844 - DNA, 729 bp, Artificial Sequence
  derived and/or modified sequence
ctggtgaagacagccaagctgggcacctcctggaactacctgtttgacttccacccccaccgggtgctggtggtgggcgcctttgccaacttctgcacagagcccaccggctgcagctgcctcttccccaagctgcccccccacctgctgatgctgccctgctggttccacctgctcttcttccaggactacatcatgtctggggccagcgccctgcccccaggcctggtgtcctttgtgaaggcccccctgccccagtggtggccaggcggctgccctggggtgggcggccccctgcaggccctggaggccaagccaggccagctgagcctgcccatccggaaccagaagaggctggtgaagagcgccctggagctgggggagaatgaactcttccagcagttccccaacccccagagctcctgggtgcagaggacccaggaggccctgcggcccctgctgtctgtggccctgcagctgttcctgggccggcggggcctgcccctgcccttccgggcccccatcagaacagtggtgggcagcgccatccctgtgcagcagagccccccacccagccctgcccaggtggacaccctgcaggcccgctacgtgggccgcctgacccagctgtttgaggagcaccaggcccgctatggagtgcctgctgacagacacctggtgctgacagaggcccggcccacagcctggccccggctgtctgctggatag

SEQ ID NO: 217845 - DNA, 729 bp, Artificial Sequence
  derived and/or modified sequence
ctggtgaagaccgccaagctgggcaccagctggaactacctgttcgacttccaccctcatcgcgtcttagtggtgggggctttcgcgaacttttgtaccgagcctactgggtgtagctgcctgttccctaagctccccccccatttactcatgctcccctgctggttccatcttctgtttttccaggactacatcatgtctggagccagcgccctccctcctggactggtgagtttcgtgaaggccccactgccccagtggtggccaggagggtgtccgggagtgggaggtcctttacaagcattggaagccaaacctgggcagttgagtctgccaataagaaatcaaaagaggctggtgaaatccgcgcttgagctcggggagaacgagctattccagcagttcccgaaccctcaatctagttgggttcagaggactcaggaggccttacgccctctactatctgtcgccctgcaactttttctgggtagaagaggcctacccctacccttccgtgccccaatccgcacagtggttggctccgcgattccagtgcagcagagcccaccccctagcccagcccaggtggataccctccaggcccggtacgtcggacggctgacccaactctttgaagagcaccaagctcgatacggtgttccggcagacaggcatcttgtgctgaccgaggcaaggcccaccgcctggccaagactgtctgcgggctag

SEQ ID NO: 217846 - DNA, 729 bp, Artificial Sequence
  derived and/or modified sequence
ttggtgaaaaccgccaagctgggaacctcatggaattacctattcgatttccatccacatcgtgttctggtagttggggcttttgccaatttctgtaccgagcccactggctgctcttgcttgttccccaagcttccccctcacctgctcatgctaccatgttggttccaccttttattctttcaggattatatcatgtccggagcttcagcgttacctcctggcttagtgtcattcgtcaaggcacccctcccacagtggtggccaggcggttgtcccggagtgggaggtcctctgcaggcactggaggcaaaaccgggacagctgtccctgcccatccgaaatcagaagagactcgtgaagtcggctcttgagctgggggaaaatgagctgttccaacagtttccaaatccgcaatcctcctgggtccagcgtacgcaagaagctctccgcccactgttgagcgtcgcacttcaacttttcctggggcgacgcggtctgcctctgccctttcgggctcccattaggactgtcgtggggagcgcgatacccgtgcagcagtcacctcctccaagtccagcccaggtagacactctgcaggcacggtatgtcgggagactgacgcaattgttcgaggagcatcaggccaggtacggcgtgccagccgaccggcacctggtccttactgaggccagacccaccgcgtggccccgattatctgcgggatag

SEQ ID NO: 217847 - DNA, 729 bp, Artificial Sequence
  derived and/or modified sequence
ctagttaaaactgcaaagttgggcacctcctggaactacctctttgacttccaccctcacagggtcctggtcgtgggagccttcgccaacttctgcacagagcccacgggctgctcctgcctcttccccaaactcccgccacacctgctcatgctgccttgttggttccatctcctcttcttccaggactacatcatgtcaggtgcttctgccctccccccaggtttggtctcctttgtcaaggccccgctgcctcagtggtggccaggtggctgtcctggcgtgggagggcccctgcaggcgctggaggcaaaacccggacaactgagcttgccgattcggaatcagaagagattggttaagtcagctctggaactcggggagaatgagctcttccagcagttcccgaacccgcagagctcgtgggtgcagaggacgcaggaggctctgcgtccgctgctaagcgtggccctgcagctgttcctgggccgccggggcctcccgctgcccttccgcgcgcccatccgcaccgtagtggggtcggcgattcccgtgcagcagagccccccgcccagtccggcccaggtggacacgctgcaagcgcgctacgtggggcgactcacgcagctcttcgaggagcaccaggcgcgctatggtgtccccgccgacagacacctggtcctcacggaggcgcgccccaccgcctggcctcgcctgtccgctgggtga

SEQ ID NO: 217848 - protein, 1217 aa, Artificial Sequence
  derived and/or modified sequence
MAAGRAQVPSSEQAWLEDAQVFIQKTLCPAVKEPNVQLTPLVIDCVKTVWLSQGRNQGSTLPLSYSFVSVQDLKTHQRLPCCSHLSWSSSAYQAWAQEAGPNGNPLPREQLLLLGTLTDLSADLEQECRNGSLYVRDNTGVLSCELIDLDLSWLGHLFLFPRWSYLPPARWNSSGEGHLELWDAPVPVFPLTISPGPVTPIPVLYPESASCLLRLRNKLRGVQRNLAGSLVRLSALVKSKQKAYFILSLGRSHPAVTHVSIIVQVPAQLVWHRALRPGTAYVLTELRVSKIRGQRQHVWMTSQSSRLLLLKPECVQELELELEGPLLEADPKPLPMPSNSEDKKDPESLVRYSRLLSYSGAVTGVLNEPAGLYELDGQLGLCLAYQQFRGLRRVMRPGVCLQLQDVHLLQSVGGGTRRPVLAPCLRGAVLLQSFSRQKPGAHSSRQAYGASLYEQLVWERQLGLPLYLWATKALEELACKLCPHVLRHHQFLQHSSPGSPSLGLQLLAPTLDLLAPPGSPVRNAHNEILEEPHHCPLQKYTRLQTPSSFPTLATLKEEGQRKAWASFDPKALLPLPEASYLPSCQLNRRLAWSWLCLLPSAFCPAQVLLGVLVASSHKGCLQLRDQSGSLPCLLLAKHSQPLSDPRLIGCLVRAERFQLIVERDVRSSFPSWKELSMPGFIQKQQARVYVQFFLADALILPVPRPCLHSATPSTPQTDPTGPEGPHLGQSRLFLLCHKEALMKRNFCVPPGASPEVPKPALSFYVLGSWLGGTQRKEGTGWGLPEPQGNDDNDQKVHLIFFGSSVRWFEFLHPGQVYRLIAPGPATPMLFEKDGSSCISRRPLELAGCASCLTVQDNWTLELESSQDIQDVLDANKSLPESSLTDLLSDNFTDSLVSFSAEILSRTLCEPLVASLWMKLGNTGAMRRCVKLTVALETAECEFPPHLDVYIEDPHLPPSLGLLPGARVHFSQLEKRVSRSHNVYCCFRSSTYVQVLSFPPETTISIPLPHIYLAELLQGGQSPFQATASCHIVSVFSLQLFWVCAYCTSICRQGKCTRLGSTCPTQTAISQAIIRLLVEDGTAEAVVTCRNHHVAAALGLCPREWASLLDFVQVPGRVVLQFAGPGAQLESSARVDEPMTMFLWTLCTSPSVLRPIVLSFELERKPSKIVPLEPPRLQRFQCGELPFLTHVNPRLRLSCLSIRESEYSSSLGILASSC

SEQ ID NO: 217849 - DNA, 3654 bp, Artificial Sequence
  derived and/or modified sequence
atggcagctggcagggcacaagtgccgagttccgaacaggcatggctggaagacgcgcaggtgttcatccaaaaaactctctgcccagctgttaaggagccgaacgttcagttaacccccctggtgatcgactgtgtcaagactgtttggttgagccaggggaggaaccagggctcaacactgcccctgtcttactcatttgtgagcgttcaagatctgaagacacaccagagacttccatgctgttcccatcttagctggagctctagcgcctatcaggcttgggcacaggaggcaggaccaaacggcaatcctctgccacgcgagcaattgctgctactgggcaccctcacggacctttccgccgaccttgagcaggagtgtaggaacggatctttgtatgtgcgcgataacacgggcgttctcagttgcgagttaatcgatctggacctgagttggcttggtcacctatttcttttcccaagatggagctacctgccaccggcccgctggaatagcagcggggaaggccacctggaactgtgggatgccccagtgccagtgttccctctgactatttcccctggtcccgtgacgccaatacccgtcctctaccccgagtccgcatcatgtctgcttcgactgcgcaacaaacttagaggcgtccagcggaaccttgctggcagcctcgtaaggctgtctgctttggtgaaatccaagcagaaagcttacttcattctaagcctgggtagatcccacccggccgtaacacatgtgtcaatcatcgtgcaggtgcctgcgcagctggtatggcacagggccctacgcccaggtactgcatatgtgcttacagagcttcgcgtgtctaagatccgaggtcagaggcagcacgtttggatgactagccagagcagtagattgctgctgctgaagcctgaatgtgtacaggagctcgagctggagttagaaggtcctctgctggaggcggaccccaaaccgctgcctatgccctccaattccgaagataaaaaggatcctgaatcccttgtgcgttactctagactgttatcctactctggcgctgttacaggcgtgctcaatgaacctgctgggctctacgagctagacggtcaactcggactgtgtcttgcctaccagcagttcagagggctacggagagtgatgaggccaggggtgtgtctgcaactccaagacgtgcacctgttgcaatctgtgggggggggtaccaggcgccccgtcctggctccctgtctcagaggggcagtgctcctgcagtcatttagccggcagaaacccggagctcactcaagcagacaggcatatggtgcatctctgtatgagcagctcgtgtgggagaggcagttgggtctcccattgtatttatgggcaacaaaggctttggaggaactggcctgtaagttatgccctcacgtccttaggcatcaccagtttctgcagcattctagcccaggatccccatctctgggcctccaacttctagcaccaacactcgacctgctggccccccctgggtcccctgtccgaaacgcccataacgaaattttggaggagcctcaccattgtccattgcagaagtatacacgccttcagacaccctcttcttttccaacacttgccacactaaaggaggagggacagagaaaagcttgggcgtcattcgatccaaaagcgctcctccctctgccggaagcctcctaccttccttcatgtcaactgaaccgtcggttggcttggtcatggctgtgcctgctccccagtgccttctgccctgcacaagttctcctgggagtgctagtggcaagttcccacaagggttgtttgcagcttagggaccaatccgggtccctgccctgccttctgcttgcgaaacactcccagccactctcagaccctagattaatcggatgcctcgtccgcgcagaaagattccaactgattgttgagagggacgtgagaagcagttttccctcttggaaagagctttctatgcccgggtttattcagaaacagcaagcacgtgtgtacgtccagttttttctcgccgatgccctgatcttaccagttcccaggccatgccttcatagcgccacccctagcacaccacagacagatcccacaggacctgaagggccacatttgggccagtcaaggttatttttgctatgccacaaagaagcgctgatgaaacgaaacttttgtgttccccccggggctagtccagaagtcccgaagcctgcattatctttttatgtgctgggttcttggcttggggggacacagcggaaggagggtacgggctggggcctcccagaaccacaaggaaacgatgataatgatcaaaaggtgcacctgattttctttggctcttcagtcaggtggttcgagttcttgcatcccggacaggtgtaccgcctgattgcacccgggcctgccactcccatgctgttcgaaaaggatggttccagttgcatcagcagaagaccactagagctggctggctgcgcttcatgcctgactgtccaggacaattggacactggaactcgagtcctcccaagacatccaggacgtactggacgccaacaagagcttgcctgaaagctccttgacggacttgctgagcgacaactttacagatagccttgtgagtttctccgccgagatactgtcccgcacactctgcgagccattggtcgcgtccctctggatgaaactgggcaatactggggcgatgcgccgatgcgtaaagctgactgttgcccttgaaaccgccgaatgcgagtttccaccccacctggacgtgtatatcgaggaccctcaccttccccctagtctcggcctgttacccggagctcgagtgcatttttctcagctggaaaaaagagtctcccgcagtcataatgtttactgttgcttcaggagttccacctatgtccaggtgctgtcattccctccggaaaccaccatcagtatccctcttcctcacatatatctcgcagagctcttgcagggggggcagtcacctttccaggccacagcatcctgtcacattgtgagcgtgttctccctccaattgttctgggtctgtgcctattgcactagcatttgtaggcagggcaagtgtacacggctgggctctacttgtccaacacagactgctattagtcaagccataatccgattgcttgtagaggacggaacggcagaggcagttgtgacatgccggaatcatcacgtagcagctgctttgggcttatgccccagagaatgggccagtctgctggatttcgttcaggttccaggccgggtggtcctgcagttcgccgggccgggagcacagttagagagctccgctcgagtagacgagcccatgacaatgtttctgtggactctttgtacatccccgagcgtgctgcggccaatcgtcctcagttttgagttggaaaggaagcctagtaaaatcgtaccattggagccgcccaggctacaaaggtttcaatgtggcgagttacctttcctcacacatgttaaccctaggctgcggctctcctgcctctctattcgtgagagcgagtatagctctagccttggcattctggcatccagctgctag

SEQ ID NO: 217850 - DNA, 3654 bp, Artificial Sequence
  derived and/or modified sequence
atggctgctggccgggcccaggtgcccagcagcgagcaggcctggctggaggatgcccaggtgttcatccagaagaccctgtgcccagctgtgaaggagcccaacgtgcagctgacccccctggtgattgactgtgtgaagacagtgtggctgagccagggcaggaaccagggcagcaccctgcccctgagctacagctttgtgtctgtgcaggacctgaagacccaccagaggctgccctgctgcagccacctgtcctggagcagcagcgcctaccaggcctgggcccaggaggccggccccaacggcaaccccctgccccgggagcagctgctgctgctgggcaccctgacagacctgtctgctgacctggagcaggagtgcagaaatggcagcctgtatgtgcgggacaacacaggagtgctgagctgtgagctgattgacctggacctgtcctggctgggccacctgttcctgttcccccgctggagctacctgcccccagcccgctggaacagcagcggggagggccacctggagctgtgggatgcccctgtgcctgtgttccccctgaccatcagccctggccctgtgacccccatccctgtgctgtacccagagagcgccagctgcctgctgcggctgaggaacaagctgcggggcgtgcagaggaacctggccggcagcctggtgcggctgagcgccctggtgaagagcaagcagaaggcctacttcatcctgagcctgggccgcagccaccctgctgtgacccacgtgtccatcatcgtgcaggtgcctgcccagctggtgtggcaccgggccctgcggcctggaacagcctacgtgctgacagagctgcgggtgtccaagatccggggccagaggcagcacgtgtggatgaccagccagagcagccggctgctgctgctgaagccagaatgtgtgcaggagctggagctggagctggagggccccctgctggaggccgaccccaagcccctgcccatgcccagcaacagcgaggacaagaaggaccctgagagcctggtgcgctacagccggctgctgagctacagcggggctgtgactggagtgctgaatgaacctgctggcctgtatgagctggatggccagctgggcctgtgcctggcctaccagcagttccggggcctgcggcgggtgatgaggcctggggtgtgcctgcagctgcaggatgtgcacctgctgcagagcgtgggcggcggcaccaggaggcctgtgctggccccctgcctgcggggagctgtgctgctgcagagcttcagccggcagaagccaggggcccacagcagccggcaggcctacggggccagcctgtatgagcagctggtgtgggagcggcagctgggcctgcccctgtacctgtgggccaccaaggccctggaggagctggcctgcaagctgtgcccccacgtgctgcggcaccaccagttcctgcagcacagcagccctggcagccccagcctgggcctgcagctgctggcccccaccctggacctgctggcccctcctggcagccctgtgagaaatgcccacaatgagatcctggaggagccccaccactgccccctgcagaagtacacccggctgcagacccccagcagcttccccaccctggccaccctgaaggaggagggccagaggaaggcctgggccagctttgaccccaaggccctgctgcccctgcctgaggccagctacctgcccagctgccagctgaacagaaggctggcctggagctggctgtgcctgctgcccagcgccttctgcccagcccaggtgctgctgggcgtgctggtggccagcagccacaagggctgcctgcagctgcgggaccagagcggcagcctgccctgcctgctgctggccaagcacagccagcccctgagtgaccccaggctcatcggctgcctggtgcgggcagagcgcttccagctgattgtggagagagatgtgcgcagcagcttccccagctggaaggagctgtccatgcctggcttcatccagaagcagcaggcccgggtgtatgtgcagttcttcctggctgatgccctgatcctgcctgtgccccggccctgcctgcacagcgccacccccagcaccccccagacagaccccaccggccctgagggcccccacctgggccagagccgcctcttcctgctgtgccacaaggaggccctgatgaagaggaacttctgtgtgcccccaggggccagccctgaggtgcccaagccagccctgtccttctacgtgctgggctcctggctgggcggcacccagaggaaggagggcaccggctggggcctgcctgagccccagggcaatgatgacaatgaccagaaggtgcacctgatcttcttcggcagctctgtgcgctggtttgagttcctgcaccctggccaggtgtaccgcctcatcgcccctggccctgccacccccatgctgtttgagaaggatggcagcagctgcatcagccggcggcccctggagctggccggctgtgccagctgcctgactgtgcaggacaactggaccctggagctggagagcagccaggacatccaggatgtgctggatgccaacaagagcctgcctgagagcagcctgacagacctgctgagtgacaacttcacagacagcctggtgtccttctctgctgagatcctgagcaggaccctgtgtgagcccctggtggccagcctgtggatgaagctgggcaacacaggagccatgaggcgctgtgtgaagctgactgtggccctggagacagcagaatgtgagttccccccccacctggatgtgtacatcgaggacccccacctgccccccagcctgggcctgctgcccggggcccgggtgcacttcagccagctggagaagagggtgagccgcagccacaacgtgtactgctgcttccgcagcagcacctacgtgcaggtgctgtccttccccccagagaccaccatcagcatccccctgccccacatctacctggccgagctgctgcagggcggccagagccccttccaggccacagccagctgccacatcgtgtctgtgttcagcctgcagctgttctgggtgtgtgcctactgcaccagcatctgccggcagggcaagtgcacccggctgggcagcacctgccccacccagacagccatcagccaggccatcatccggctgctggtggaggatggaacagctgaggccgtggtgacctgcaggaaccaccacgtggccgccgccctgggcctgtgcccccgggagtgggccagcctgctggactttgtgcaggtgcccggccgggtggtgctgcagtttgctggccctggggcccagctggagagcagcgcccgggtggatgagcccatgaccatgttcctgtggaccctgtgcaccagccccagcgtgctgcggcccatcgtgctgagctttgagctggagaggaagcccagcaagatcgtgcccctggagcccccccggctgcagcgcttccagtgtggggagctgcccttcctgacccacgtgaacccccggctgcggctgagctgcctgagcatccgggagagcgagtacagcagcagcctgggcatcctggccagcagctgctag

SEQ ID NO: 217851 - DNA, 3654 bp, Artificial Sequence
  derived and/or modified sequence
atggccgccggccgggcccaggtgcccagcagcgagcaggcctggctcgaagatgcacaggtgtttatccagaagacattatgccctgccgtgaaagagcccaacgttcagctgacccctctggttatagattgtgtgaagactgtgtggctttcccagggtcgaaatcagggatctaccctacccctgagctatagcttcgtgagtgtgcaggatctcaaaacccaccagaggttgccctgctgcagccacctcagttggtcttcctctgcctaccaggcttgggcccaagaagctggcccaaatggcaatccgctgccccgggagcaactgttactcttgggcaccctgactgacctctcagccgatcttgaacaagagtgccgaaatggttctttatacgtccgtgacaataccggggtgttgagttgcgaactgatagatctggacctgagttggcttgggcatctgtttctctttccgcgctggagctacttgccgcctgcccggtggaactcctccggagaagggcacctggagttatgggatgccccggtgccagtgtttcccctcaccatctccccaggtcccgtgacccctataccagtgctgtaccctgaatctgcgagttgcttgcttagactgaggaataaattaaggggagtccagcgcaatctcgcggggtcactcgtaagactgagtgcccttgtcaagagtaagcagaaggcatactttatactcagtctcggccggagtcatccggcagtgacccatgtgagcataattgtgcaggtccctgctcagttagtgtggcacagagcccttagaccaggaaccgcttatgtgcttaccgagctaagagtgtcaaaaattcggggtcagagacaacacgtgtggatgacttcccagtctagcaggctgttgctgttaaagcccgaatgtgtgcaggaattagagctggagctggaggggcctctcttagaagccgatcctaaacctctcccgatgccttctaatagcgaggacaaaaaggaccctgagtccctggtgagatactcaagacttctctcctactctggtgccgtgacaggagtcctgaacgagccagccgggttgtacgaactcgacgggcagctaggattatgtctagcctaccaacagtttaggggcttgcgtcgggtgatgagaccaggggtttgcctgcagctgcaagacgtccatcttctccaatctgtgggcggggggacccgccgtccggtcctggctccgtgtctgagaggagccgttctcttacaatccttctcccggcagaagcccggtgctcattcatccaggcaggcctatggtgcatccctgtacgaacagctggtctgggagaggcagttaggcctgcctctttacctgtgggctactaaggccctagaggaactggcctgcaaactttgcccgcacgtccttagacaccatcagtttctacagcattccagcccgggatctccatccttaggcctacagctcctggcccccacattagatctgttagccccccctggttcgcctgtacggaatgcgcacaacgaaatcctcgaagagccgcaccactgcccccttcagaaatataccaggctgcagacaccttccagtttccctacactggcaactctcaaagaagagggtcagcgcaaggcttgggccagcttcgatcccaaggctctccttcctctgcccgaagctagctatctgccaagctgccagctcaataggagacttgcatggagttggttgtgtctgctcccctcagccttctgccctgctcaggttctgctgggagtgctggttgctagttctcacaagggctgtctgcagctcagagatcagagcgggagtctcccctgtctgctgctggccaaacactcccaacccttgagtgatcctaggctgatcggctgcttggtgagagcagaaaggtttcagcttatcgtggagcgtgacgtgaggagctccttccctagttggaaagagttatccatgcccggattcatccaaaagcagcaagcccgggtttacgtacagttcttccttgcggatgcgttgattttgcccgtccctagaccatgtctgcatagcgccaccccgtcaacaccccagactgacccgacaggccccgaaggcccccatctgggccagtctcgcctgttcttgctctgtcataaagaagcgctgatgaaacgcaatttctgtgttccaccgggagcatcacccgaagtgcctaaacccgctctgagtttttatgtgcttggcagctggttaggagggacccagcgcaaggagggcaccggttggggcttaccagagccccagggtaatgatgacaatgaccagaaagtgcaccttattttcttcggaagttccgtgcgctggtttgagttcctgcacccaggccaggtgtatcggctgatcgcgcccggccctgccacccctatgttgttcgaaaaggacggaagcagctgcatttcccggcgcccccttgaactggctgggtgtgccagttgtttgacagttcaggataactggaccttggagctggagagcagtcaggatatacaggatgtgctggatgcaaataagtcccttcctgaaagttctctgacagatcttttgtctgacaatttcacagatagtctagtgagcttttccgcagagattttgagccgcaccctttgtgagcctctcgtagctagtctgtggatgaaactggggaataccggagcaatgagacgctgcgtgaaacttaccgtagccctggagacagcagagtgcgagtttcctcctcatttggatgtttatatagaagatccccacctgccgccctctttggggctgctgcctggcgctcgggtacatttcagccagctggaaaaacgggtgtctcgttctcataacgtttactgttgttttcggagtagtacatacgtgcaagtgctctcctttccccccgagacaaccatctcaatccccttgccccatatttatctggccgagctgctacagggggggcagtcaccatttcaggctaccgcatcgtgccatatcgtttcagtgttcagcttgcagctcttttgggtgtgcgcttactgtacctccatctgtcggcagggcaaatgcactcgacttggttctacatgccctactcagacagccatatctcaggccataatcaggctcttagtggaggacggaaccgccgaagctgttgtcacctgtagaaaccatcacgtggcggccgcgttgggactctgtccaagggaatgggcttctctcctggattttgtgcaggtcccgggccgggtggtgctgcaattcgccggtccaggcgcccagcttgaatcgagtgctagagtggacgaacccatgaccatgtttctgtggaccttgtgtactagtcctagcgtgctgcgcccgatcgtcctcagcttcgagctggaacgcaagcccagtaagattgtgcccctggagcccccacgactgcaaaggttccagtgcggagagctcccttttcttactcacgtgaatcctcggctacgactgtcctgcctcagcatcagggagtccgagtacagctcaagcctaggtatccttgcctcaagctgctag

SEQ ID NO: 217852 - DNA, 3654 bp, Artificial Sequence
  derived and/or modified sequence
atggccgcaggcagggctcaggtgccctcaagcgaacaggcttggctggaagacgcccaggtcttcattcaaaagacactgtgtcctgcggtcaaggagcctaatgtgcagttaacacccctagtaattgactgtgtgaagacagtttggctgtcccagggtagaaaccagggaagcacccttccgttgtcctactccttcgtatcagtgcaggatctgaagacgcaccagagattgccttgctgttcccatctgtcttggtcttccagcgcctaccaggcttgggctcaggaggctgggcctaacgggaaccccctacccagggagcagctgcttcttctgggcacactgaccgatcttagtgcagacctcgaacaagagtgtcggaacggatctttatatgtgcgagacaacaccggagtgctaagctgcgaattgatcgacctggatctctcatggctcgggcatctcttcttattcccacgatggtcctacctgcctcctgctagatggaattcatctggagagggccacctcgaactgtgggacgctccagtgcccgttttccctctgactatttcacctggcccagtgacacccattccagttctctacccggagagtgcttcgtgcctgctgcggctgcgaaataagctgaggggtgttcagaggaatctggccggatcgttggttagactgtcagcactcgtaaaaagcaagcagaaagcatacttcattctgagccttgggcgttctcacccagcggtgacacacgtgtccatcatcgtgcaggtccccgcacagctggtgtggcatagggctctgagaccgggaaccgcatatgtgttaactgaattgcgcgtttctaaaataagaggacagcgccagcacgtgtggatgacctctcagagcagtcgtctgctgcttctcaaaccagagtgcgtgcaggaactagaactggagctggagggtcctctgctggaagcagatccgaagccactccccatgccttccaattcagaggacaaaaaagatccggagagcctcgtgcgttattcacgcttactgagctactccggcgctgtgaccggagtgttaaatgagcctgcaggtctgtatgagcttgacggtcaattggggttatgtttggcttaccagcagttccggggactgcgcagggtgatgcgcccaggggtgtgtctgcagctgcaggatgtccatttgcttcaatccgttgggggtggaaccaggaggccagtcttggccccatgtctgagaggggcagtgctcctccagagctttagccggcagaagcccggtgcacacagctctcgccaagcctacggagcttccttatacgagcagctcgtgtgggagcgtcagctcggtctgcctctgtatctttgggcaaccaaagccctggaggaattagcttgcaagctctgtccgcatgtacttagacaccaccaattcttgcagcattcttcaccgggaagcccatctcttggcttgcagcttctggcccctactctggatctcttggcccctccaggatcaccagttaggaacgcccacaacgaaatattggaagagcctcatcattgcccactccagaagtacacccggctgcaaaccccgagcagcttccccactctggcaaccctcaaggaagagggacagaggaaggcgtgggcgtctttcgatcctaaggcacttctccctctgcctgaagcgtcctatctaccctcctgccagcttaatcgacgcctcgcttggtcctggctctgcctgctcccaagcgctttctgccctgcacaagtgctcctcggtgtcctggtcgcatcctcccataaaggctgtctgcagttgagagaccaaagtggctccctaccctgtttactgttggcaaagcattcccaaccactttccgacccgaggctaatcgggtgcctggtgagggctgagcgcttccagcttatcgtcgaaagagacgtcaggtcgtccttcccttcatggaaggagttgtccatgcccggattcatccagaaacagcaggcccgagtgtacgtacagttctttctagctgacgccttaatccttcccgtgcctagaccctgcctgcactctgccactccatccacaccccagacagaccctaccggcccagaaggaccacacctcgggcaatcaaggctttttcttttatgtcataaggaagcattaatgaaacgcaacttttgtgtccccccaggggcaagtcccgaagtgcctaagccagcactgtctttctacgttcttggcagctggctgggcggaactcaaagaaaggaaggcacaggctggggcctgcccgagccacaggggaacgacgacaacgaccagaaggtccacctgattttcttcgggtcatccgtgaggtggtttgagtttttacaccccggacaggtgtaccggttaattgcccctggcccagctacgcctatgcttttcgaaaaggacggaagttcgtgcatctcaagaaggccattggagttagcaggctgcgccagttgtctcactgtccaggataattggaccttagaactcgagagctcacaagatatacaggacgtactggatgctaataaaagcctgcctgaatcctcgctgacagaccttctctccgataatttcacagatagtctggtgagcttttctgccgagatcctatcccgcacattgtgcgaacctctggttgcaagtctgtggatgaagttaggcaatacaggcgctatgagaagatgcgtcaaactcactgtggctctcgagaccgccgaatgcgaatttccgccacacctggatgtctacatcgaagatccacacctgcctccctccctggggctgctacctggagctagagtccatttctcacaactcgagaaaagagtgtctaggagtcataatgtttattgctgttttcggtcatccacctacgtccaagtcctgtctttccccccagaaacaacaattagcattccactaccacatatttacttagccgagttgctgcagggtggacaatccccttttcaggcaaccgccagctgtcacattgtgtccgtttttagcctgcaattgttttgggtgtgcgcatattgcaccagcatatgtagacaggggaaatgtacacggctcggaagcacctgcccgacccaaaccgccataagccaggcgattatccgactcctggtcgaggatgggaccgccgaggctgtggtgacatgccggaaccatcacgtggccgctgctttggggctgtgccccagggaatgggccagcctgctagacttcgtgcaggtcccgggtcgcgtggttctccagtttgctgggccaggcgctcaattggagtcttctgcacgggtagacgagcctatgaccatgtttctgtggactctttgtactagtccctccgtgctgcgacctattgtgctgtcctttgagctggagcgaaaaccatctaagatagttcccttggaaccacctcgtctgcagcgttttcagtgcggagagctgccgttcctcactcatgtgaatccaaggctaagactatcctgcttgtctatccgggagagtgagtactcctcctctttagggatcctggctagttcttgctag

SEQ ID NO: 217853 - DNA, 7071 bp, Artificial Sequence
  derived and/or modified sequence
ccccatccccacccccaagcgagcacctgcccctcccgggggcggagctccggcgcatcatggcggctggccgggcccaggtcccttcctccgaacaagcctggcttgaggatgctcaggtcttcatccaaaagaccctgtgtccagctgtcaaggagcctaatgtccagttgactccattggtaattgattgtgtgaagactgtctggttgtcccagggaaggaaccaaggttctacactgcccctcagctatagcttcgtctcagtacaggacctcaagactcaccagcgtctcccatgctgcagccacctgtcgtggagcagtagtgcataccaggcctgggcccaagaggctggaccaaatgggaaccccctgccccgagagcagctgttacttttagggacactaacagacctatcggcagacttggaacaagagtgcaggaacggaagcctctatgtgagagataacactggcgtcctgagctgtgagctcatagacctggacctttcttggttgggccatctttttctgttcccccgttggagttacctccctcctgccaggtggaattcctcaggggaagggcacttggagctgtgggatgcccctgtgccagtgtttcctttgaccatcagtcctggccccgtcacgcctatccctgtcctctacccagagagtgcttcctgcctgctcaggctcagaaacaagctcagaggtgtgcagcgaaacctggctgggagtctagttcgattgagtgctctggtgaaaagtaaacagaaagcttacttcatcctgtctcttggtagatcacacccagctgtcacccacgtgtccatcatcgtgcaggtccctgcccagctggtgtggcacagagcccttcggcctggtacagcctatgtgctgacagaactgcgagtgtccaagatccgtggtcagcgccagcatgtttggatgaccagtcagtcctcccgtctgttgctgctgaaaccagaatgtgtgcaggagctggaactggagctggaaggacccctcttagaggctgaccccaagccactccccatgcccagcaactcggaggacaagaaggatccagaaagtcttgtccggtattctagactcctatcctattcgggagcagtcactggcgtgttgaatgagcccgctggcctctatgagctggatgggcagctggggctctgccttgcctaccagcagttccgtggccttaggcgggtgatgcgacctggagtgtgtctgcagctccaggatgttcacctgctccagtcagtgggaggggggacaagaaggccagtgctcgccccctgcctccgtggcgccgttctgcttcaaagcttctctcgtcagaagcctggggctcactcatcccgtcaagcctacggggcctccctgtacgagcagctggtgtgggaacgtcagttaggacttcccctctacctgtgggctaccaaggccctggaggagctggcctgcaagctgtgtccccatgtgctgagacaccaccagttcctgcaacattcctctcctgggagccccagcctgggactgcaactcctggctcctaccctggatcttctagctccgccaggcagccctgttcggaatgcacacaatgagatccttgaagagccacatcactgtcccctccagaaatacactcggctgcagactccctcctccttccccactctggccaccctgaaagaagaaggacagcgtaaggcctgggcctcctttgaccctaaggcccttctgcccctcccggaggcctcctacctgcccagctgccaactcaatcgccgcctggcttggtcctggctctgtctgctgccctctgccttctgcccagcccaggttttacttggggttctggtggcttcatctcataaaggttgtctgcaacttcgggaccaaagtggttccctgccctgcctgctcctggccaagcactctcaacccctcagtgacccacggctgataggctgcctggtgcgggcagagaggtttcagttgatcgtagagagggacgtgagaagcagcttcccttcctggaaggagctgagcatgccaggcttcatccagaagcagcaggccagagtctatgtccagttctttctggctgatgccctgatcctgcctgtgcccagaccctgccttcattcagcaacaccctcaacacctcagacagatcccaccggcccagagggaccccacctaggacagagccggctcttcttgctctgccacaaggaggccctcatgaagcgtaatttttgtgtccccccaggagcaagtccagaggtgcccaagcccgccctcagtttctatgtgttggggagctggcttgggggcacccagaggaaggagggtactggatgggggctgcccgagccccagggaaatgacgacaatgatcagaaggttcacctcattttctttggctcttcagtccgctggtttgagttcttgcacccgggacaggtgtaccgactcatagctcctggccccgctacaccaatgttgtttgaaaaggatggttcatcctgcatatctcggcgtcctctggagttggctggctgtgcatcctgcctcactgtccaggacaactggactctggagcttgaaagctcccaggatatccaagatgtgctggatgcaaacaagtcattgcctgaatcctcactgaccgacctgctcagtgacaatttcacagattccttggtgtctttctccgctgagattttgtcacggacactatgtgaaccccttgtggcgtctctctggatgaaactggggaacacgggggccatgagaaggtgtgtgaagctaacagtcgctcttgagactgctgaatgtgaattcccccctcacctggatgtatatatagaagacccacacttgcctccctcactaggactacttccaggagcccgggtccacttcagccagttggagaaaagggtttccagatctcacaatgtttattgttgtttccggtcatccacttatgtgcaggtcctgagttttccccctgagaccaccatcagcattcccctgccccacatctacctggctgaacttctgcagggtggtcagtccccattccaggccactgcctcttgccatatcgtctctgtcttcagccttcagctcttctgggtgtgtgcttattgtaccagcatctgccggcagggaaagtgcactcgcctgggctccacttgccctacgcagacagctataagccaggccatcatcaggctcctggtggaggatgggactgccgaagccgtggtgacctgtaggaatcaccatgtggcagcagcactagggctgtgtcctagagagtgggcctccctcctagatttcgtccaagtgccaggcagagtggtcttgcagtttgcagggcctggagcccaacttgagtcttcagccagggttgacgagcccatgaccatgttcctctggacactttgtactagcccctctgtcctccgtcctattgtgctttcttttgagctggaaaggaaaccgtcgaagatcgtcccattagaacctcctcggctacagcgattccagtgtggagagctccctttcctgactcacgtgaaccccaggctccgattgtcctgcctttctatccgagagtcagagtactccagctctctggggatccttgcttcctcctgttaactgaactgcaaggatggcctgagagtccttccttgctgaaaacctgaaggcctaggtcctggctcctctccctacttgttctgtgattgaaccaaggactccagattcacaaactgctactccactataatttcccttctttggtgttctggtgccagcctgccttggcaaaattgtggcaacaggaaatcatggccctattaatatgtcctctgattgggacaaggcacctgcattcacaggcggccctgagcacctgggttctgactttgtcgcaggagctgagggaacaaaagacttgctcgctgtggggtgatggtgacaggcctattgacctgcaatgaagccctctggtgtcatttctcactggtactcatctctggggtcccaggcctcctgactcctagttgtccacctcctaggaactcctagtcgttcatcatcatttcagccctttgccgccagggccaaaggtggaaagtgatttggaagagaagagcttttcgtccagcagaagaaatggtaccaaaatcagtctgtaaaggaagtaaattggggagttggcggcaaggcagagagcatagctatgatggtctcagtcagtaaggctgggccctgcaggaagtcaaatatgaatgcctagaggtgttcacaagcacaaagaaggtgtagggggaggcaagtgccaggcacaagcaggggcaggtgaggactctgggtgactgtgctatagggccccaggctacggttagccctgtaggtttcccaagggcctggcctaaggcagatccttgatcgatataccttgagaccagaaggtgctccgaaatcacaaccgtacaattaggggatctaggaacaattctttggagataccaatgcctttggctggtgttgctgcatttctttactggggactgatagatggagaggtggaaagatgagctgaggcacatctttcagagctactgggaggccatttcttcctggctgttaggatttgttcgtgtttgggagacctttagagcgtggttaaacccatatgttgggatttatgctgcttttatggtagcaataccctatattaagatttgaagtagacccggaaagttagtggccggttagctcagttggttagagcgtggtgctaataacgccaaggtcgcgggttcgaaccccgtacgggccagtgggtggcttttttttgtgtgtgttttgttttctgaccctctgctgttatccggaagtttctacccggagccagttgccttctggtaacagaattatattgcacctactgcttcctattccctgaatcactagcgctcccgaaggcttggagggaggagtctctgggcacccgggtgaaaggaaggttcacgtgcaaccgccgcgtctttttttccctgaagcgctttcatggaggcagatgtttgtcagtcaagggaagtaagaaaggcattggatgaaaacgaagccctaagcctcgtagtcgtggccgagtggttaaggcgatggactagaaatccattggggtctccccgcgcaggttcgaatcctgccgactacgtcatatttttttcttcagcatactgaccatatttctctccaggatgggatgatccagtcggcaccctccaaacctctcatctaggaactctagaatcgagaatttgatttagagtctatgattttggtttgaaatctatgattaacgtctttggacattgaaggaaatccgaggaatggacaagtgatgcaagagccagttgagttaccaaattagttctagaaagatctgaaaaagctcggtccgggttcctagctctatattcttgtagatgaatttcaggaacctttatggcagcttcggcgccgtggcttagttggttaaagcgcctgtctagtaaacaggagatcctgggttcgaatcccagcggtgcctttattcaattgaaacagcgtgattttgcggctaaatccacatcctttcatgtattgtttttatatcagaacgcgtaagagtttctgttctgcactcatagcacccacatttcctgcagagtcaagctgccactcccatgagatcgccactctaaaaggtggttctctaacttaggggcagaaatgttgcataggcctaagggtcctttgcttaactgatgccacaccccactggtgcaggtggactgggtcaggcggccgccccaccctcgatggaaggggctgcccaccttccaggcctctttctccaccctaggacgtcccctagaacctgagccactttgttttgtttggctcttcattatagttctttgggtttggtggctcataatgttatatatatagtatataatataaaaatatatatttaaatatacagtatttaaaatttggcacagcttccagatgcggtcctctaactggtctttcacttgcagttacctccatccctctccaccagcgggatgtcagggtaaggagtaagcagggatccggctggcctggcctggcctggcaccaggtttcgtgcagcagggtgcagaagggctgaggccatgtgaacagagtccaagaaagcatcattcgggagtcgctagggatcctggtgtggaagggcagggcacttttctggagcactgaagctaggctggttaaggaagaaataaatgccagagataaggcaagaaataggatctgtgagctcttggcaggacctaaacctccttggaagataggcagaaagctctcgacaccattccatggcccacgaaccaatgtaagatgagcaaatggcttgaaggaattgctacctccaggtcaagccagggatgcagcactgccgagaccacgtttgtgccaagcactgggctggaccctgtgcagaaccaaatgaacaaggcacgttcccctttcagcactaacggcactgtaagaacagggagaagtggaatctaatctggcctgagggtagagggtgatcagctaagtctgaaacaccatgtagaaacttgccatgtatggccgggcgcggtggctcacgcctgtaatcccagcgctttgggaggccaaggtgggcggatcacgaggtcaggagttccagaccagcagcctggccaacatagtgaaacctggtaacatagtgaaacctcgtctctactaaaaatgcaaaaaattagccaggcgtggtggcaggcgcctgcagtcctagctacttgggaggctgaggcaagagaatcgcttcaaccttggaggggggaggaggtgttgtcagccgagatcgcgccactgcatcccagcctgggcaacaagagtgaaactccgtctcaaaaaaatgaaataaaataaacgaatgatc

SEQ ID NO: 217854 - DNA, 3654 bp, Artificial Sequence
  derived and/or modified sequence
atggccgccggcagagcccaggtgcccagcagcgagcaggcctggctggaggacgcccaggtgttcatccagaagaccctgtgccccgccgtgaaggagcccaacgtgcagctgacccccctggtgatcgactgcgtgaagaccgtgtggctgagccagggcagaaaccagggcagcaccctgcccctgagctacagcttcgtgagcgtgcaggacctgaagacccaccagagactgccctgctgcagccacctgagctggagcagcagcgcctaccaggcctgggcccaggaggccggccccaacggcaaccccctgcccagagagcagctgctgctgctgggcaccctgaccgacctgagcgccgacctggagcaggagtgcagaaacggcagcctgtacgtgagagacaacaccggcgtgctgagctgcgagctgatcgacctggacctgagctggctgggccacctgttcctgttccccagatggagctacctgccccccgccagatggaacagcagcggcgagggccacctggagctgtgggacgcccccgtgcccgtgttccccctgaccatcagccccggccccgtgacccccatccccgtgctgtaccccgagagcgccagctgcctgctgagactgagaaacaagctgagaggcgtgcagagaaacctggccggcagcctggtgagactgagcgccctggtgaagagcaagcagaaggcctacttcatcctgagcctgggcagaagccaccccgccgtgacccacgtgagcatcatcgtgcaggtgcccgcccagctggtgtggcacagagccctgagacccggcaccgcctacgtgctgaccgagctgagagtgagcaagatcagaggccagagacagcacgtgtggatgaccagccagagcagcagactgctgctgctgaagcccgagtgcgtgcaggagctggagctggagctggagggccccctgctggaggccgaccccaagcccctgcccatgcccagcaacagcgaggacaagaaggaccccgagagcctggtgagatacagcagactgctgagctacagcggcgccgtgaccggcgtgctgaacgagcccgccggcctgtacgagctggacggccagctgggcctgtgcctggcctaccagcagttcagaggcctgagaagagtgatgagacccggcgtgtgcctgcagctgcaggacgtgcacctgctgcagagcgtgggcggcggcaccagaagacccgtgctggccccctgcctgagaggcgccgtgctgctgcagagcttcagcagacagaagcccggcgcccacagcagcagacaggcctacggcgccagcctgtacgagcagctggtgtgggagagacagctgggcctgcccctgtacctgtgggccaccaaggccctggaggagctggcctgcaagctgtgcccccacgtgctgagacaccaccagttcctgcagcacagcagccccggcagccccagcctgggcctgcagctgctggcccccaccctggacctgctggccccccccggcagccccgtgagaaacgcccacaacgagatcctggaggagccccaccactgccccctgcagaagtacaccagactgcagacccccagcagcttccccaccctggccaccctgaaggaggagggccagagaaaggcctgggccagcttcgaccccaaggccctgctgcccctgcccgaggccagctacctgcccagctgccagctgaacagaagactggcctggagctggctgtgcctgctgcccagcgccttctgccccgcccaggtgctgctgggcgtgctggtggccagcagccacaagggctgcctgcagctgagagaccagagcggcagcctgccctgcctgctgctggccaagcacagccagcccctgagcgaccccagactgatcggctgcctggtgagagccgagagattccagctgatcgtggagagagacgtgagaagcagcttccccagctggaaggagctgagcatgcccggcttcatccagaagcagcaggccagagtgtacgtgcagttcttcctggccgacgccctgatcctgcccgtgcccagaccctgcctgcacagcgccacccccagcaccccccagaccgaccccaccggccccgagggcccccacctgggccagagcagactgttcctgctgtgccacaaggaggccctgatgaagagaaacttctgcgtgccccccggcgccagccccgaggtgcccaagcccgccctgagcttctacgtgctgggcagctggctgggcggcacccagagaaaggagggcaccggctggggcctgcccgagccccagggcaacgacgacaacgaccagaaggtgcacctgatcttcttcggcagcagcgtgagatggttcgagttcctgcaccccggccaggtgtacagactgatcgcccccggccccgccacccccatgctgttcgagaaggacggcagcagctgcatcagcagaagacccctggagctggccggctgcgccagctgcctgaccgtgcaggacaactggaccctggagctggagagcagccaggacatccaggacgtgctggacgccaacaagagcctgcccgagagcagcctgaccgacctgctgagcgacaacttcaccgacagcctggtgagcttcagcgccgagatcctgagcagaaccctgtgcgagcccctggtggccagcctgtggatgaagctgggcaacaccggcgccatgagaagatgcgtgaagctgaccgtggccctggagaccgccgagtgcgagttccccccccacctggacgtgtacatcgaggacccccacctgccccccagcctgggcctgctgcccggcgccagagtgcacttcagccagctggagaagagagtgagcagaagccacaacgtgtactgctgcttcagaagcagcacctacgtgcaggtgctgagcttcccccccgagaccaccatcagcatccccctgccccacatctacctggccgagctgctgcagggcggccagagccccttccaggccaccgccagctgccacatcgtgagcgtgttcagcctgcagctgttctgggtgtgcgcctactgcaccagcatctgcagacagggcaagtgcaccagactgggcagcacctgccccacccagaccgccatcagccaggccatcatcagactgctggtggaggacggcaccgccgaggccgtggtgacctgcagaaaccaccacgtggccgccgccctgggcctgtgccccagagagtgggccagcctgctggacttcgtgcaggtgcccggcagagtggtgctgcagttcgccggccccggcgcccagctggagagcagcgccagagtggacgagcccatgaccatgttcctgtggaccctgtgcaccagccccagcgtgctgagacccatcgtgctgagcttcgagctggagagaaagcccagcaagatcgtgcccctggagccccccagactgcagagattccagtgcggcgagctgcccttcctgacccacgtgaaccccagactgagactgagctgcctgagcatcagagagagcgagtacagcagcagcctgggcatcctggccagcagctgctag

SEQ ID NO: 217855 - protein, 235 aa, Artificial Sequence
  derived and/or modified sequence
MRTQVYEGLCKNYFSLAVLQRDRIKLLFFDILVFLSVFLLFLLFLVDIMANNTTSLGSPWPENFWEDLIMSFTVSMAIGLVLGGFIWAVFICLSRRRRASAPISQWSSSRRSRSSYTHGLNRTGFYRHSGCERRSNLSLASLTFQRQASLEQANSFPRKSSFRASTFHPFLQCPPLPVETESQLVTLPSSNISPTISTSHSLSRPDYWSSNSLRVGLSTPPPPAYESIIKAFPDS

SEQ ID NO: 217856 - protein, 216 aa, Artificial Sequence
  derived and/or modified sequence
  misc_feature (1)..(1): Xaa can be any naturally occurring amino acid
XRDRIKLLFFDILVFLSVFLLFLLFLVDIMANNTTSLGSPWPENFWEDLIMSFTVSMAIGLVLGGFIWAVFICLSRRRRASAPISQWSSSRRSRSSYTHGLNRTGFYRHSGCERRSNLSLASLTFQRQASLEQANSFPRKSSFRASTFHPFLQCPPLPVETESQLVTLPSSNISPTISTSHSLSRPDYWSSNSLRVGLSTPPPPAYESIIKAFPDS

SEQ ID NO: 217857 - DNA, 708 bp, Artificial Sequence
  derived and/or modified sequence
atgaggacgcaggtctacgagggcctgtgtaagaattatttctcacttgctgtgctgcagcgtgaccggattaagttgctcttctttgatattcttgtatttcttagcgtgttcttgctgttcttgctctttctggtggatatcatggccaacaacacaacttcgttaggttctccatggccagaaaatttctgggaagacctgatcatgtccttcaccgtctccatggctattggtctagtactcggcggcttcatctgggccgtctttatatgcctgagccgcagacggagagctagcgctcctatctcccagtggagctccagcaggcggagccgctcaagctatacgcatggactgaatcgcactggcttctatcgacacagtggatgcgagcgacgtagtaacttgagcctagcgtcccttacttttcaacgtcaagcctctctggagcaagcaaattctttcccccgaaagtcatctttccgggcgtccacttttcacccattcctccagtgtccaccactcccagtagagactgagtcccagctggtcacactgccctctagcaacatctcaccgactatcagcacgtcccacagcctgtctaggccggattactggtcctctaattcactccgagtaggcctctctacaccaccccctcctgcctacgaatccatcataaaggcttttccagacagctag

SEQ ID NO: 217858 - DNA, 651 bp, Artificial Sequence
  derived and/or modified sequence
tagcgggacaggatcaagcttctgttttttgatatcctggtgttccttagcgtctttctcttgtttctgctgttcttagtggatatcatggcaaacaacaccacctccctgggaagcccttggcctgagaacttttgggaggacctgattatgtcgtttaccgtgagtatggcaatcggcctcgtactgggaggcttcatttgggcagtgttcatctgcttgtcacggcgccggcgtgcgtcagcacccatctcacaatggtcctcatccaggagaagtagaagcagctatacacacggactaaatcggactggattctataggcatagtggatgtgaacggagaagcaatttatccctggcttccctcaccttccagagacaagcctctctcgagcaagctaattcattcccacgcaaaagctctttccgggcctcgaccttccatccgttcctgcagtgccctccccttcccgttgaaactgaatcccaacttgtgacactcccatcctctaatatctcccctacaattagtacttcccacagcttaagtaggcccgattactggtcatccaattccctgcgggttggtctgagtaccccaccaccgcccgcatatgaatccatcattaaggcattccccgattcctag

SEQ ID NO: 217859 - DNA, 3030 bp, Artificial Sequence
  derived and/or modified sequence
ttccttttatgcgaacacaagtatatgaggggttgtgtaaaaattatttttctcttgctgtactacaaagagatagaatcaaactgctttttttcgacatactggtttttctttctgtttttcttctctttcttctatttcttgtggatattatggctaataacacaacaagtttagggagtccatggccagaaaacttttgggaggaccttatcatgtccttcactgtatccatggcaatcgggctggtacttggaggatttatttgggctgtgttcatttgtctgtctcgaagaagaagagccagtgctcccatctcacagtggagttcaagcaggagatctaggtcttcttacacccacggcctcaacagaactggattttaccgccacagtggctgtgaacgtcgaagcaacctcagcctggccagtctcaccttccagcgacaagcttccctggaacaagcaaattcctttccaagaaaatcaagtttcagagcttctactttccatccctttctgcaatgtccaccacttcctgtggaaactgagagtcagctggtgactctcccttcttccaatatctctcccaccatcagcacttcccacagtctgagccgtcctgactactggtccagtaacagtcttcgagtgggcctttcaacaccgcccccacctgcctatgagtccatcatcaaggcattcccagattcctgagtagggtggcttttggtttttgtttctttcttgtcttgtcttttattgaaaggaaatcaaaaataggctaaacagaattttgagggcatggcccaaataactcatgagttccaagttgaaacatggttgtgcaagttggacattacaatgtaaaacacattttcttcaaacacgttttcccttttgtttcaaaaaatgtaatattttcccccaagcgttttatatttatgtattttgtattcaatgtgaggcttattaaaaatagtgattctaatgtaagaatcagctaagatgcattatatatattttaattaaaattaaaacttcagatatttgtggattacaatcctcatttacttccaatgtgactaaaaagagaaaaaaaatcactgtgtcactttaaagaaaaatcttctaagggatttggattttactttctttagaatgacaagtgaatcatattgacattttacaatcttagatttttctttttttttcttttgagacagggtcttgatccgtcgcccaggcgggagttgcagtagcatgatcaggactcactgcagcctctatctcccaggctcaagtaatcctcccatcttagtgccccaagtagctgggactacaggggtgcactaccacaccgggttgaatttttttttaattttagtagagatgaagtgtcactatgttaccaaggctggtctcaaactcctaaactcagatgatcctcctgcctcggcctcccaaagtgctggaattagcctggccaatcttggatttttaatggaatatgtgggcacaaaatgacagaacataggacattctaaagttccttgatttgatcattataagaagtgtgggactcaagcacaggaaactgaactcttttggtgtcattggatgtttcatttttgacactaattttttctggacaaactctttatgtgtttttcccaagaatagttatctacttcctggaggcaaaatccttggatttactaacatgatgatttaccttttcttcaccgttgtcgttacattgttagaaaagcaacaggaaaaaatccaattcatttgacctaaaaacaagcctcaagtttaaaaccaagctcacgtttttcttaagggaaaaattttctttcttaaacttacatctagcaacttggaaagcactttctctggggatcttcttttgtaactttgcagacaaataagtatgagtcactggggagagagtttgttattgaaatagatgttgcccatgaagaattctccttcctggattgactcttaatcatcaggcatcattcctggtttgcttctctacgaatctcaattccaacttctctgcagagtctgtacagtgattaagccatgccagatggtctttggtgcacacagttatttaagaatccacttccacaggtggctgcccttgtaaggaagaatgcatccctaaatgtggccaccagagagttccagtgggcagatgtctgtggctgcccttctcatttaaggacatgagttcactggagtattactcaaaaagtctgtggttcatttccagtattgtgaatatttagtttatgtggccgtttctttgtttctttgaacagtgggattttcagtgaaaaagtaccctctttttcatttcctattgcagtggtcacagctaatagtgtctgaacatggttcaagaataagagattccatgtagcattttctttattattttcatttcccttatattatccatcattccttaaggacaattattcttaataatgcttatagaaaatgttctctaattaaacatgccaaaaggaaaaagtaagagaaagagggagcaagaagaaaatggaagaaaaagggaaaaaagctaaccggataaccaatttgttataagttggttttcaacaaagaaatttagcagccaagtaaggtttcaagggaatattaacttggtatcagggctacttttttttttttttttttacttgcatgtcatccttaatgtctaacatgaaaaatcagcaaagagtatggtttttatcaagaatttgtgttgggagtaaaaactgctttatagctcccaaattaggaagagaagagcagaaatcctctggggcatttaaccatctggcagaattgttgctgcacccttatcccagttataagacagtcaaaatgactatttcctaaatattgtgagtgtatgaaatgtgaaattaaagcaaaaactggagacttttaatgtatttctttaatttgaaatgttttgtggattgtgaaataaaaataaatttatgtc

SEQ ID NO: 217860 - DNA, 2389 bp, Artificial Sequence
  derived and/or modified sequence
aaagagatagaatcaaactgctttttttcgacatactggtttttctttctgtttttcttctctttcttctatttcttgtggatattatggctaataacacaacaagtttagggagtccatggccagaaaacttttgggaggaccttatcatgtccttcactgtatccatggcaatcgggctggtacttggaggatttatttgggctgtgttcatttgtctgtctcgaagaagaagagccagtgctcccatctcacagtggagttcaagcaggagatctaggtcttcttacacccacggcctcaacagaactggattttaccgccacagtggctgtgaacgtcgaagcaacctcagcctggccagtctcaccttccagcgacaagcttccctggaacaagcaaattcctttccaagaaaatcaagtttcagagcttctactttccatccctttctgcaatgtccaccacttcctgtggaaactgagagtcagctggtgactctcccttcttccaatatctctcccaccatcagcacttcccacagtctgagccgtcctgactactggtccagtaacagtcttcgagtgggcctttcaacaccgcccccacctgcctatgagtccatcatcaaggcattcccagattcctgaggtcttgatccgtcgcccaggcgggagttgcagtagcatgatcaggactcactgcagcctctatctcccaggctcaagtaatcctcccatcttagtgccccaagtagctgggactacaggggtgcactaccacaccgggttgaatttttttttaattttagtagagatgaagtgtcactatgttaccaaggctggtctcaaactcctaaactcagatgatcctcctgcctcggcctcccaaagtgctggaattagcctggccaatcttggatttttaatggaatatgtgggcacaaaatgacagaacataggacattctaaagttccttgatttgatcattataagaagtgtgggactcaagcacaggaaactgaactcttttggtgtcattggatgtttcatttttgacactaattttttctggacaaactctttatgtgtttttcccaagaatagttatctacttcctggaggcaaaatccttggatttactaacatgatgatttaccttttcttcaccgttgtcgttacattgttagaaaagcaacaggaaaaaatccaattcatttgacctaaaaacaagcctcaagtttaaaaccaagctcacgtttttcttaagggaaaaattttctttcttaaacttacatctagcaacttggaaagcactttctctggggatcttcttttgtaactttgcagacaaataagtatgagtcactggggagagagtttgttattgaaatagatgttgcccatgaagaattctccttcctggattgactcttaatcatcaggcatcattcctggtttgcttctctacgaatctcaattccaacttctctgcagagtctgtacagtgattaagccatgccagatggtctttggtgcacacagttatttaagaatccacttccacaggtggctgcccttgtaaggaagaatgcatccctaaatgtggccaccagagagttccagtgggcagatgtctgtggctgcccttctcatttaaggacatgagttcactggagtattactcaaaaagtctgtggttcatttccagtattgtgaatatttagtttatgtggccgtttctttgtttctttgaacagtgggattttcagtgaaaaagtaccctctttttcatttcctattgcagtggtcacagctaatagtgtctgaacatggttcaagaataagagattccatgtagcattttctttattattttcatttcccttatattatccatcattccttaaggacaattattcttaataatgcttatagaaaatgttctctaattaaacatgccaaaaggaaaaagtaagagaaagagggagcaagaagaaaatggaagaaaaagggaaaaaagctaaccggataaccaatttgttataagttggttttcaacaaagaaatttagcagccaagtaaggtttcaagggaatattaacttggtatcagggctacttttttttttttttttttacttgcatgtcatccttaatgtctaacatgaaaaatcagcaaagagtatggtttttatcaagaatttgtgttgggagtaaaaactgctttatagctcccaaattaggaagagaagagcagaaatcctctggggcatttaaccatctggcagaattgttgctgcacccttatcccagttataagacagtcaaaatgactatttcctaaatattgtgagtgtatgaaatgtgaaattaaagcaaaaactgga

SEQ ID NO: 217861 - DNA, 708 bp, Artificial Sequence
  derived and/or modified sequence
atgaggacccaggtgtatgagggcctgtgcaagaactacttcagcctggccgtgctgcagagggaccgcatcaagctgctcttctttgacatcctggtgttcctgagcgtcttcctgctcttcctgctcttcctggtggacatcatggccaacaacaccaccagcctgggcagcccctggccagagaacttctgggaggacctgatcatgtccttcaccgtgtccatggccatcggcctggtgctgggcggcttcatctgggccgtgttcatctgcctgagcagaagaagaagagccagcgcccccatcagccagtggagcagcagccgccgcagccgcagcagctacacccacggcctgaacagaacaggcttctaccgccacagcggctgtgaaagaagaagcaacctgagcctggccagcctgaccttccagaggcaggccagcctggagcaggccaacagcttccccaggaagagcagcttccgggccagcaccttccaccccttcctgcagtgcccccccctgcctgtggagacagagagccagctggtgaccctgcccagcagcaacatcagccccaccatcagcaccagccacagcctgagcaggccagactactggagcagcaacagcctgcgggtgggcctgagcaccccacctcctccagcctatgagagcatcatcaaggccttcccagacagctag

SEQ ID NO: 217862 - DNA, 651 bp, Artificial Sequence
  derived and/or modified sequence
tgaagagaccgcatcaagctgctcttctttgacatcctggtgttcctgtctgtgttcctgctcttcctgctcttcctggtggacatcatggccaacaacaccaccagcctgggcagcccctggccagagaacttctgggaggacctgatcatgtccttcaccgtgtccatggccatcggcctggtgctgggcggcttcatctgggccgtgttcatctgcctgagcagaagaagaagagccagcgcccccatcagccagtggagcagcagcagaagaagccgcagcagctacacccacggcctgaacagaacaggcttctaccgccacagcggctgtgagcggcgcagcaacctgagcctggccagcctgaccttccagaggcaggccagcctggagcaggccaacagcttccccaggaagagcagcttccgggccagcaccttccaccccttcctgcagtgcccccccctgcctgtggagacagagagccagctggtgaccctgcccagcagcaacatcagccccaccatcagcaccagccacagcctgagcaggccagactactggagcagcaacagcctgcgggtgggcctgagcaccccacctcctccagcctatgagagcatcatcaaggccttcccagacagctag

SEQ ID NO: 217863 - DNA, 708 bp, Artificial Sequence
  derived and/or modified sequence
atgcggacccaggtgtacgagggcctgtgcaagaactacttcagcttagccgtcctccaacgagacagaattaaactgctttttttcgatatcctggtattcttgtcagtgtttttgctgttcttgctgtttcttgtggatattatggccaacaacacaacttctctcggcagcccttggcccgaaaacttctgggaggatctgatcatgtcctttacagtctccatggcaatcggtctcgttttgggtggcttcatatgggctgtgttcatatgtctctcgcggagaagacgagctagcgctccaatatctcagtggtcctccagccggcgctctcggagcagctatactcacgggctcaacaggaccggattttaccgacactctggctgcgaacggcgatccaacctgtctctggcatcgctaacattccaaaggcaagccagtctggagcaggccaactccttcccccggaagtccagcttccgggcctcaacgttccaccccttccttcaatgccccccacttcccgtagagacagagagtcaactggttacactgccgagttccaatataagcccaactatttccaccagtcattctttgtctcgccccgattactggagtagtaactcacttagagttggcctctcaaccccgccaccccccgcctacgaaagtatcattaaagcattcccagactcctag

SEQ ID NO: 217864 - DNA, 651 bp, Artificial Sequence
  derived and/or modified sequence
tgacgggaccggatcaagctgctgttcttcgacatcctggtgttcctgagcgtattcctcttgttccttctgtttctcgttgatataatggctaataacacaacatcactgggttccccatggcctgagaatttctgggaggacctgatcatgtccttcactgtgtctatggctattggcctggtcctgggaggcttcatatgggccgtctttatctgtctctcacgaagacggagagcttccgctcctatctctcaatggtcatctagccgaaggtcccggtcctcttacacccacggccttaacagaacgggattctaccgccattcagggtgtgagcgaaggtccaatcttagccttgcgagtctaacattccagagacaggcttcattggaacaggccaacagcttcccaaggaagtcgtcgttcagagcaagcactttccaccccttcctccagtgtcctcccctgcctgtcgagactgagtcgcagctggttacgctgcccagctcaaatatatcccccaccatttcgaccagtcacagtctgagtaggccagactactggtcatcgaattcactgcgggtagggctgtccacacctcctccgcctgcctatgaatctatcattaaggcattccctgattcatag

SEQ ID NO: 217865 - DNA, 708 bp, Artificial Sequence
  derived and/or modified sequence
atgcgaacacaggtgtacgaaggcctctgtaagaactatttttcccttgcagtcttgcagcgcgacaggataaagcttctattcttcgacatcctagtctttctgtcggtgttcctcctgtttttactgttcttggtggatattatggccaacaacactacctctctcggctccccctggcctgaaaatttttgggaggacctgattatgtcttttactgtgagtatggctattggcctggtactgggcggattcatttgggctgtgttcatctgcctgtcgcgtaggcgcagggcaagtgcccctatatcgcagtggagcagctcacgacgatcccggagctcgtatacccatgggctgaaccgcactggcttttaccgccattcaggctgcgaacggaggagcaatcttagcctcgcatcactgacatttcagcggcaggcctccctggaacaagccaattcgtttccaagaaagtccagctttagagcctccacattccatccatttttgcaatgtcctccattgccggtggagaccgaaagccagttagtgacactgccctctagcaacatttcacctacaatctctacttcgcacagtcttagtcgcccagattactggagctccaatagtctgcgtgtaggcctgagtacacctcccccaccagcctatgaaagcataatcaaagccttcccagattcctag

SEQ ID NO: 217866 - DNA, 651 bp, Artificial Sequence
  derived and/or modified sequence
tgaagagacagaattaagctgctgtttttcgacattctggtgttcttaagtgtgttccttctgttcctcctgtttcttgtagacatcatggcaaacaacaccacttctctgggaagcccctggcctgagaacttctgggaagacctcataatgagtttcacagtctccatggctatcgggctggtcttgggcggattcatttgggcggtgttcatttgcttgagtaggcggagacgggcttccgcacccatctctcagtggtcttctagccgccgaagccgctcctcttatacacacggcctgaaccgcacgggcttttaccgacacagcggctgtgagcgaaggtcgaatttgagcctggcctctctcacgtttcagcgccaggcgagccttgagcaggcaaactcgttccctcggaaaagtagctttcgtgcttcaacgttccatccctttcttcaatgcccgcctctgccggttgaaactgagtcccagttggtgaccctacctagtagcaacatcagcccaacaatctcgacgtctcacagtttaagcaggccagattactggagttcaaattctctgcgggtggggttatctactcccccaccccctgcgtacgagagcattattaaagcctttccggactcctag

SEQ ID NO: 217867 - DNA, 708 bp, Artificial Sequence
  derived and/or modified sequence
atgagaacccaggtgtacgagggcctgtgcaagaactacttcagcctggccgtgctgcagagagacagaatcaagctgctgttcttcgacatcctggtgttcctgagcgtgttcctgctgttcctgctgttcctggtggacatcatggccaacaacaccaccagcctgggcagcccctggcccgagaacttctgggaggacctgatcatgagcttcaccgtgagcatggccatcggcctggtgctgggcggcttcatctgggccgtgttcatctgcctgagcagaagaagaagagccagcgcccccatcagccagtggagcagcagcagaagaagcagaagcagctacacccacggcctgaacagaaccggcttctacagacacagcggctgcgagagaagaagcaacctgagcctggccagcctgaccttccagagacaggccagcctggagcaggccaacagcttccccagaaagagcagcttcagagccagcaccttccaccccttcctgcagtgcccccccctgcccgtggagaccgagagccagctggtgaccctgcccagcagcaacatcagccccaccatcagcaccagccacagcctgagcagacccgactactggagcagcaacagcctgagagtgggcctgagcaccccccccccccccgcctacgagagcatcatcaaggccttccccgacagctag

SEQ ID NO: 217868 - DNA, 651 bp, Artificial Sequence
  derived and/or modified sequence
tgaagagacagaatcaagctgctgttcttcgacatcctggtgttcctgagcgtgttcctgctgttcctgctgttcctggtggacatcatggccaacaacaccaccagcctgggcagcccctggcccgagaacttctgggaggacctgatcatgagcttcaccgtgagcatggccatcggcctggtgctgggcggcttcatctgggccgtgttcatctgcctgagcagaagaagaagagccagcgcccccatcagccagtggagcagcagcagaagaagcagaagcagctacacccacggcctgaacagaaccggcttctacagacacagcggctgcgagagaagaagcaacctgagcctggccagcctgaccttccagagacaggccagcctggagcaggccaacagcttccccagaaagagcagcttcagagccagcaccttccaccccttcctgcagtgcccccccctgcccgtggagaccgagagccagctggtgaccctgcccagcagcaacatcagccccaccatcagcaccagccacagcctgagcagacccgactactggagcagcaacagcctgagagtgggcctgagcaccccccccccccccgcctacgagagcatcatcaaggccttccccgacagctag

SEQ ID NO: 217869 - protein, 321 aa, Artificial Sequence
  derived and/or modified sequence
MVSQSTVRQDSPVEPWEGISDHSGIIDGSPRLLNTDHPPCQLDIRLMRHKAVWINPQDVQQQPQDLQSQVPAAGNSGTHFVTDAASPSGPSPSCLGDSLAETTLSEDTTDSVGSASPHGSSEKSSSFSLSSTEVHMVRPGYSHRVSLPTSPGILATSPYPETDSAFFEPSHLTSAADEGAVQVSRRTISSNSFSPEVFVLPVDVEKENAHFYVADMIISAMEKMKCNILSQQQTESWSKEVSGLLGSDQPDSEMTFDTNIKQESGSSTSSYSGYEGCAVLQVSPVTETRTYHDVKEICKCDVDEFVILVSLMSQTSILQNY

SEQ ID NO: 217870 - protein, 662 aa, Artificial Sequence
  derived and/or modified sequence
MVSQSTVRQDSPVEPWEGISDHSGIIDGSPRLLNTDHPPCQLDIRLMRHKAVWINPQDVQQQPQDLQSQVPAAGNSGTHFVTDAASPSGPSPSCLGDSLAETTLSEDTTDSVGSASPHGSSEKSSSFSLSSTEVHMVRPGYSHRVSLPTSPGILATSPYPETDSAFFEPSHLTSAADEGAVQVSRRTISSNSFSPEVFVLPVDVEKENAHFYVADMIISAMEKMKCNILSQQQTESWSKEVSGLLGSDQPDSEMTFDTNIKQESGSSTSSYSGYEGCAVLQVSPVTETRTYHDVKEICKCDVDEFVILELGDFNDITETCSCSCSSSKSVTYEPDFNSAELLAKELYRVFQKCWILSVVNSQLAGSLSAAGSIVVNEECVRKDFESSMNVVQEIKFKSRIRGTEDWAPPRFQIIFNIHPPLKRDLVVAAQNFFCAGCGTPVEPKFVKRLRYCEYLGKYFCDCCHSYAESCIPARILMMWDFKKYYVSNFSKQLLDSIWHQPIFNLLSIGQSLYAKAKELDRVKEIQEQLFHIKKLLKTCRFANSALKEFEQVPGHLTDELHLFSLEDLVRIKKGLLAPLLKDILKASLAHVAGCELCQGKGFICEFCQNTTVIFPFQTATCRRCSACRACFHKQCFQSSECPRCARITARRKLLESVASAAT

SEQ ID NO: 217871 - protein, 178 aa, Artificial Sequence
  derived and/or modified sequence
MVSQSTVRQDSPVEPWEGISDHSGIIDGSPRLLNTDHPPCQLDIRLMRHKAVWINPQDVQQQPQDLQSQVPAAGNSGTHFVTDAASPSGPSPSCLGDSLAETTLSEDTTDSVGSASPHGSSEKSSSFSLSSTEVHMVRPGYSHRVSLPTSPGILATSPYPETDSAFFEPSHLTSAADE

SEQ ID NO: 217872 - protein, 527 aa, Artificial Sequence
  derived and/or modified sequence
MVRPGYSHRVSLPTSPGILATSPYPETDSAFFEPSHLTSAADEGAVQVSRRTISSNSFSPEVFVLPVDVEKENAHFYVADMIISAMEKMKCNILSQQQTESWSKEVSGLLGSDQPDSEMTFDTNIKQESGSSTSSYSGYEGCAVLQVSPVTETRTYHDVKEICKCDVDEFVILELGDFNDITETCSCSCSSSKSVTYEPDFNSAELLAKELYRVFQKCWILSVVNSQLAGSLSAAGSIVVNEECVRKDFESSMNVVQEIKFKSRIRGTEDWAPPRFQIIFNIHPPLKRDLVVAAQNFFCAGCGTPVEPKFVKRLRYCEYLGKYFCDCCHSYAESCIPARILMMWDFKKYYVSNFSKQLLDSIWHQPIFNLLSIGQSLYAKAKELDRVKEIQEQLFHIKKLLKTCRFANSALKEFEQVPGHLTDELHLFSLEDLVRIKKGLLAPLLKDILKASLAHVAGCELCQGKGFICEFCQNTTVIFPFQTATCRRCSACRACFHKQCFQSSECPRCARITARRKLLESVASAAT

SEQ ID NO: 217873 - DNA, 1989 bp, Artificial Sequence
  derived and/or modified sequence
atggtgagccagagcaccgtgagacaggacagccccgtggagccctgggagggcatcagcgaccacagcggcatcatcgacggcagccccagactgctgaacaccgaccaccccccctgccagctggacatcagactgatgagacacaaggccgtgtggatcaacccccaggacgtgcagcagcagccccaggacctgcagagccaggtgcccgccgccggcaacagcggcacccacttcgtgaccgacgccgccagccccagcggccccagccccagctgcctgggcgacagcctggccgagaccaccctgagcgaggacaccaccgacagcgtgggcagcgccagcccccacggcagcagcgagaagagcagcagcttcagcctgagcagcaccgaggtgcacatggtgagacccggctacagccacagagtgagcctgcccaccagccccggcatcctggccaccagcccctaccccgagaccgacagcgccttcttcgagcccagccacctgaccagcgccgccgacgagggcgccgtgcaggtgagcagaagaaccatcagcagcaacagcttcagccccgaggtgttcgtgctgcccgtggacgtggagaaggagaacgcccacttctacgtggccgacatgatcatcagcgccatggagaagatgaagtgcaacatcctgagccagcagcagaccgagagctggagcaaggaggtgagcggcctgctgggcagcgaccagcccgacagcgagatgaccttcgacaccaacatcaagcaggagagcggcagcagcaccagcagctacagcggctacgagggctgcgccgtgctgcaggtgagccccgtgaccgagaccagaacctaccacgacgtgaaggagatctgcaagtgcgacgtggacgagttcgtgatcctggagctgggcgacttcaacgacatcaccgagacctgcagctgcagctgcagcagcagcaagagcgtgacctacgagcccgacttcaacagcgccgagctgctggccaaggagctgtacagagtgttccagaagtgctggatcctgagcgtggtgaacagccagctggccggcagcctgagcgccgccggcagcatcgtggtgaacgaggagtgcgtgagaaaggacttcgagagcagcatgaacgtggtgcaggagatcaagttcaagagcagaatcagaggcaccgaggactgggccccccccagattccagatcatcttcaacatccacccccccctgaagagagacctggtggtggccgcccagaacttcttctgcgccggctgcggcacccccgtggagcccaagttcgtgaagagactgagatactgcgagtacctgggcaagtacttctgcgactgctgccacagctacgccgagagctgcatccccgccagaatcctgatgatgtgggacttcaagaagtactacgtgagcaacttcagcaagcagctgctggacagcatctggcaccagcccatcttcaacctgctgagcatcggccagagcctgtacgccaaggccaaggagctggacagagtgaaggagatccaggagcagctgttccacatcaagaagctgctgaagacctgcagattcgccaacagcgccctgaaggagttcgagcaggtgcccggccacctgaccgacgagctgcacctgttcagcctggaggacctggtgagaatcaagaagggcctgctggcccccctgctgaaggacatcctgaaggccagcctggcccacgtggccggctgcgagctgtgccagggcaagggcttcatctgcgagttctgccagaacaccaccgtgatcttccccttccagaccgccacctgcagaagatgcagcgcctgcagagcctgcttccacaagcagtgcttccagagcagcgagtgccccagatgcgccagaatcaccgccagaagaaagctgctggagagcgtggccagcgccgccacctag

SEQ ID NO: 217874 - DNA, 1989 bp, Artificial Sequence
  derived and/or modified sequence
atggtctcccagtcaacagtaaggcaagactctccagtggagccatgggaggggatttctgaccactcagggatcatagacggcagcccgcgcctgctgaatacggaccatcccccttgccagctggacatccggctaatgaggcacaaagctgtctggattaatcctcaggacgtacagcagcaacctcaggacctgcagagccaggttcccgcagcgggcaatagtgggactcatttcgtcactgatgctgccagccccagcggcccatcacctagctgcctcggagatagtctcgccgaaaccaccctgtccgaggatacaaccgacagcgtaggcagtgcgagcccccacgggtcaagcgaaaagtccagctccttttcgctcagctccacagaggtacatatggtgaggcccggttattctcatcgagtctctctacccacttcacctggcatccttgctacttccccataccccgaaaccgattctgctttttttgagcccagccacctcacctctgccgctgacgaaggcgccgttcaagtgagccgtagaaccataagctccaatagttttagccctgaggtgtttgtcctgccggtggacgttgagaaggaaaacgcacatttttacgtggccgatatgatcatttccgctatggagaaaatgaaatgtaacatcttaagccagcagcagaccgagtcatggtctaaagaagtgtccggactgctgggttccgaccaaccggacagcgagatgacttttgatacaaacataaaacaggaatccgggagctcaacgtccagctattcgggatacgaaggttgcgctgtgttgcaggtgagtccagttactgagacaaggacgtatcacgacgtcaaagagatttgcaaatgtgacgtggatgaattcgtcatcctcgaactcggagattttaacgatattaccgagacctgttcctgttcctgttcttcctctaagtccgtcacttatgaaccagacttcaatagcgcagagcttctggctaaagaattatatcgggtttttcagaaatgttggatcctcagtgtggtcaactcacagctcgccggaagcttgtcggctgccggaagtatcgttgtgaacgaggagtgcgttcggaaagattttgagtcctctatgaacgtggtccaggagatcaaattcaagagcagaatccgaggcacagaggactgggctccccctaggttccagatcatctttaatatacatcctcccctaaagcgtgacctggtcgtggctgcccagaattttttctgtgctgggtgcggtacacccgtggagcctaaattcgtgaaaagactaaggtattgtgagtatctcgggaagtacttttgtgactgttgccactcctacgctgaatcatgcattcccgctcgtattctcatgatgtgggacttcaaaaagtattacgtgtctaattttagcaagcaactgctggacagcatatggcatcagcccatttttaacctgttgtccatcgggcagtctctatatgccaaggccaaagaactcgatcgcgtcaaagaaatccaagagcagctcttccatatcaagaagctcctcaaaacctgtcgctttgccaattcagcattgaaagaattcgagcaggtgccgggccaccttacagacgaactccatctcttctctctggaagacctggtccggatcaagaaaggattgctggcacctcttctgaaagacatacttaaggctagcctcgcacacgttgccggatgtgaactgtgccagggtaaaggcttcatctgcgaattttgccaaaacactacagttatttttcctttccagaccgctacatgtcggcggtgctccgcatgcagggcttgctttcacaaacagtgcttccagtccagtgagtgccccagatgtgcaagaatcaccgcccgcagaaaattgctggaaagcgtcgcatcggccgccacttag

SEQ ID NO: 217875 - DNA, 1989 bp, Artificial Sequence
  derived and/or modified sequence
atggtgagtcagtcaactgtaagacaagattcccccgttgaaccttgggaaggcatttccgaccattcaggcattattgacgggtcgcccagactgttgaatactgatcaccccccatgccagctagacatcaggctgatgcgacacaaagccgtgtggatcaacccacaggacgtgcagcagcagccacaggacttgcaatctcaagtgccagcagccggtaactcgggcacacactttgtcactgacgcagctagcccatcgggaccctctccctcttgtctgggggattctctagctgagaccacactatctgaggacactacagatagcgttgggagtgcttcaccccacggctcttcagaaaagagcagtagtttttctctgtcttcaactgaggtgcatatggtccggcccggttactcccaccgggtcagccttccaacgagcccaggcatactcgccacaagtccatacccagagactgactcagcttttttcgaaccatcacacctcacgagcgcagccgatgaaggagccgtccaggtgagtaggcggacaatctcctccaactcttttagtcccgaagtcttcgtgctgccagtcgacgtcgaaaaggagaacgctcatttctacgttgccgacatgataattagtgccatggagaaaatgaagtgtaacatcctctcacagcagcaaactgaaagctggtctaaggaggtgagcggcctgctgggatctgatcagcctgattctgaaatgacatttgataccaacattaaacaggaaagcggctccagcacttcatcttattctggctatgaagggtgtgcggtgctccaggtaagtcctgtgaccgagacccggacatatcatgatgtgaaagagatctgcaagtgcgacgtcgatgaatttgtgatcctagagctgggcgacttcaatgatattaccgaaacatgctcgtgtagctgcagcagttcaaagtcagtaacttacgagcccgacttcaactctgcggagctgctcgcaaaagaactttatagagtttttcagaaatgttggatactgagcgttgtaaatagtcaactagctggctcactgtctgccgctgggtcaattgtggtaaatgaggagtgtgtcagaaaagactttgagtctagcatgaatgtcgtacaggaaattaagtttaagtcaaggatccggggaaccgaggactgggcgccccctcggtttcagatcatcttcaatatccacccccctctcaaaagggatctggtggtggcagcccaaaacttcttctgtgcaggatgcgggacgcccgtggaacccaaattcgttaagcgccttagatattgtgagtacttggggaaatatttttgcgattgctgtcacagctacgcggaatcctgcattcccgcccgtatcctgatgatgtgggactttaaaaagtattatgtgagcaatttctccaagcagcttctcgattctatctggcatcagcccatttttaacctgctcagcataggtcaatccctgtatgccaaggcaaaagagctcgaccgcgtgaaagaaatccaggagcagttgttccatatcaaaaagctgctgaagacttgtagattcgccaattctgcactgaaggaattcgaacaggttccagggcacctcaccgacgagctccatctttttagtctggaggatctcgtcaggattaagaaggggctgttggcccccttgctgaaagatattcttaaggcatcccttgctcacgtggcaggatgcgagctgtgtcagggcaaaggattcatatgtgagttctgccagaatactacagtaatatttccgtttcagaccgcaacttgtcgtcggtgcagtgcctgcagggcttgctttcacaaacagtgctttcagtctagtgaatgccctcgctgcgctagaataaccgctcggagaaagctactggaatccgtggcctcggcagccacttag

SEQ ID NO: 217876 - DNA, 1989 bp, Artificial Sequence
  derived and/or modified sequence
atggtgtcccagagcacagtgcggcaggacagccctgtggagccctgggagggcatcagtgaccacagcggcatcattgatggcagcccccggctgctgaacacagaccaccccccctgccagctggacatccggctgatgaggcacaaggctgtgtggatcaacccccaggatgtgcagcagcagccccaggacctgcagagccaggtgcctgctgctggcaacagcggcacccactttgtgacagatgctgccagccccagcggccccagccccagctgcctgggggacagcctggccgagaccaccctgtctgaggacaccacagattctgtgggcagcgccagcccccacggcagcagcgagaagagcagcagcttcagcctgagcagcacagaggtgcacatggtgcggcccggctacagccaccgggtgtccctgcccaccagccctggcatcctggccaccagcccctacccagagacagacagcgccttctttgagcccagccacctgaccagcgctgctgatgaaggagctgtgcaggtgtccaggaggaccatcagcagcaacagcttcagccctgaggtgtttgtgctgcctgtggatgtggagaaggaaaatgcccacttctacgtggccgacatgatcatcagcgccatggagaagatgaagtgcaacatcctgagccagcagcagacagagagctggagcaaggaggtgtctggcctgctgggcagtgaccagcctgacagcgagatgacctttgacaccaacatcaagcaggagagcggcagcagcaccagcagctacagcggctatgagggctgtgctgtgctgcaggtgtcccctgtgacagagaccaggacctaccatgatgtgaaggagatctgcaagtgtgatgtggatgaatttgtgatcctggagctgggggacttcaatgacatcacagagacctgcagctgcagctgcagcagcagcaagtctgtgacctatgagccagacttcaacagcgctgagctgctggccaaggagctgtacagagtcttccagaagtgctggatcctgtctgtggtgaacagccagctggccggcagcctgtctgctgctggcagcatcgtggtgaatgaggagtgtgtgaggaaggactttgagagctccatgaatgtggtgcaggagatcaagttcaagagccgcatccggggcacagaggactgggccccaccccgcttccagatcatcttcaacatccacccccccctgaagagggacctggtggtggccgcccagaacttcttctgtgccggctgcggcacccctgtggagcccaagtttgtgaagaggctgcgctactgtgagtacctgggcaagtacttctgtgactgctgccacagctatgcagagagctgcatcccagcccgcatcctgatgatgtgggacttcaagaagtactacgtgagcaacttcagcaagcagctgctggacagcatctggcaccagcccatcttcaacctgctgagcatcggccagagcctgtatgccaaggccaaggagctggacagagtgaaggagatccaggagcagctgttccacatcaagaagctgctgaagacctgccgctttgccaacagcgccctgaaggagtttgagcaggtgcccggccacctgacagatgagctgcacctgttcagcctggaggacctggtgcgcatcaagaagggcctgctggcccccctgctgaaggacatcctgaaggccagcctggcccacgtggccggctgtgagctgtgccagggcaagggcttcatctgtgagttctgccagaacaccaccgtcatcttccccttccagacagccacctgccgccgctgcagcgcctgccgggcctgcttccacaagcagtgcttccagagcagcgagtgcccccgctgtgcccgcatcacagcccggaggaagctgctggagagcgtggccagcgctgccacctag

SEQ ID NO: 217877 - DNA, 1989 bp, Artificial Sequence
  derived and/or modified sequence
atggtgagccagagcaccgtgcggcaggacagccccgtggagccctgggagggaataagcgaccactctggcatcatcgatgggtctcctaggctgctaaacaccgaccaccctccttgtcagcttgacatccgcctaatgcgacataaggcagtgtggataaacccccaagacgtacagcagcagccgcaggatctccaatcccaggtcccagctgcaggcaatagcggtacacattttgttacagatgctgcttcccctagcgggccgtcaccaagttgtctgggtgactcactggccgagactaccctgagcgaggacacaactgactctgtagggtcagcatcgccccatgggagttctgaaaaaagcagcagcttctccttaagtagcacagaagtccacatggtcaggccggggtactctcatcgcgtgtccctgcccacctctccagggatactcgcgaccagcccataccccgagactgattccgccttctttgagcccagtcacctgacctccgctgcagacgaaggtgcagtccaggtctcccgacggacaatctcttcgaattcctttagccccgaggtattcgtcttgcccgtcgacgtggaaaaagaaaacgcacatttctacgtcgctgatatgatcatcagcgccatggagaagatgaaatgtaatatattgtctcaacagcaaactgagtcgtggagcaaggaggtgagcgggctattgggatccgatcagcctgactctgagatgacgttcgataccaacattaaacaagagtccggctcgtccaccagctcttatagtgggtacgaagggtgtgctgttctgcaggtgtcgcccgtgactgaaacccggacgtaccatgatgtcaaagagatttgtaagtgcgatgtggatgagttcgttatcctggaactcggcgactttaatgacatcacagaaacatgctcatgtagttgctctagcagtaagagcgtcacctacgagccagatttcaattccgccgagctgttggccaaagagctgtatcgcgtatttcagaagtgctggattctgagcgtagttaactcgcaattggccgggtccctcagtgctgctggctctatcgtggtcaatgaagaatgcgtccgcaaggactttgagtcctctatgaatgtggttcaggaaattaagttcaaatctcgcattagagggacggaggattgggccccgccaaggtttcagattatcttcaacatccaccctcccctgaagagggacctggtggtcgctgcccagaattttttctgcgccggatgtggtacacccgtggaacccaaattcgtaaaacgcttacgctactgcgaatatctaggcaagtatttttgtgactgctgtcactcatatgctgagtcatgcattccagcaagaattctgatgatgtgggacttcaaaaaatactatgtgagcaactttagtaaacaacttcttgatagcatctggcatcagccaatttttaatctgctctcaatcggacaaagcttatatgcaaaagccaaagagttggacagagtgaaggaaatacaggaacagctgtttcacatcaagaagttacttaagacttgtaggttcgcaaattccgctctgaaggagttcgagcaggtcccaggccacctcaccgatgagctacacctattcagcctggaggacttggttcggatcaagaagggtcttctcgcccctctgttaaaggacattctgaaggcttcacttgcgcatgtggctggctgcgaattgtgccaggggaagggattcatctgcgagttctgtcagaacaccactgtaattttccccttccaaaccgccacttgccggcgctgtagtgcctgccgcgcatgttttcacaagcagtgctttcaatcctcagagtgcccccgttgcgccaggatcaccgcacgtcggaagctgctggagagcgtggccagtgctgccacatag

SEQ ID NO: 217878 - DNA, 1989 bp, Artificial Sequence
  derived and/or modified sequence
atggtgagccagagcaccgtgcggcaggacagccccgtggagccctgggagggcatcagcgaccattccgggataatagatgggtcgcccagacttttaaataccgatcatcctccatgccaactagacataaggctcatgaggcataaagctgtgtggataaacccccaggatgtgcagcagcaaccccaggaccttcagagccaggttccagcagcgggtaattctgggactcattttgtcaccgatgctgcttcaccctccgggccatcacccagttgcctgggtgatagtctggcagagaccacgctcagtgaggatactacagacagcgtcggcagtgcctctcctcacgggagcagcgaaaaatcaagttcattttctctgagcagcacagaagtgcacatggttaggcctgggtacagccacagagtgtccctgcccactagccccggcatattagcgacctccccctaccctgagaccgacagtgctttttttgagccgagccatctgactagtgccgccgacgagggagccgtgcaggtctcacgccggaccatcagcagtaatagcttctctcccgaggttttcgtcctccccgttgatgttgaaaaagagaacgcccatttttatgtagctgatatgatcatttcagctatggaaaaaatgaagtgtaacatactatctcagcagcagaccgagagttggagcaaagaggtgtctggactcctgggatccgaccagccggatagtgagatgactttcgacaccaacatcaagcaagaatctggatcctcaacaagttcttactctggatacgaagggtgtgctgtgctgcaggtatctccggtgactgaaactagaacttaccacgacgtgaaggaaatttgcaagtgtgatgtagacgagtttgtcattctcgagctcggagatttcaatgatataaccgagacttgttcctgtagctgttctagtagcaagtccgttacctatgagccggacttcaacagcgcagagctcctggcgaaggagttatatcgcgtgtttcaaaaatgctggattctgtccgtcgtaaattctcaactggccggctccttgtctgccgcaggaagcattgtcgtgaatgaagagtgtgtgcggaaggacttcgagagctcaatgaacgtggttcaggaaatcaagtttaaatcgcgcatacggggaactgaggactgggcaccccctcgctttcaaatcatttttaatattcatcctcctttgaaacgggacctcgttgttgcagcccagaattttttctgtgcggggtgcgggaccccagtcgaacctaagtttgttaagcgcttgagatattgtgagtatctcggaaagtatttttgtgactgttgccattcttatgccgagtcttgtatacccgccagaatcctgatgatgtgggactttaaaaaatattacgtgtctaattttagcaagcaactgctcgatagtatctggcaccagcctattttcaatctcctgtccattggccaaagcctgtatgcaaaagcgaaggaactggacagagtgaaggaaatccaggaacagttgtttcacattaagaaactcctaaaaacttgtagattcgccaactccgccctcaaggaatttgagcaggtgccgggtcatctgacagatgagctccaccttttcagcctggaggacctggttcggatcaagaaggggttgcttgccccgctgctgaaagacattctgaaggctagcttggcccacgtggcaggctgcgaactgtgccagggcaaggggttcatttgtgaattctgccagaatacaacggtgatattcccattccagacagcaacgtgtcggcgctgctcggcctgcagggcctgcttccacaagcagtgctttcagagtagcgagtgccccagatgcgccaggattaccgctcggaggaaattactcgaatctgtggccagcgccgccacttag

SEQ ID NO: 217879 - DNA, 1989 bp, Artificial Sequence
  derived and/or modified sequence
atggtaagccagtcaactgtgcgacaagacagccccgtcgaaccctgggaaggcataagcgaccattctgggattattgatggcagccccaggcttttgaacactgaccacccaccatgccaactcgatattcgcctgatgcgacacaaggcagtgtggattaatccccaggatgttcaacagcaaccacaagatctgcagagccaggtgcccgcagctgggaattcgggcacgcattttgtaacggatgcagccagcccttccgggccttctcccagctgcctgggagactctttggctgaaaccactcttagcgaggatacaacagattctgtggggtctgcttcgccacatggcagctctgaaaagtcttccagcttttccctgtcatccaccgaagtgcatatggtaagacctggctactcccatcgcgtttccctgccaaccagcccgggaatccttgcaacttccccatatcccgaaaccgattccgctttcttcgagccaagccacttgacttctgccgctgacgagggagctgtccaagtgagtcggcgtacaatcagcagcaatagcttctctcctgaagtgttcgtactccccgtcgatgttgaaaaggagaacgcacacttctatgtcgcagatatgataatcagtgctatggaaaagatgaagtgcaacatcctgagccagcagcagacggagtcttggtctaaggaggtgagcggcctgctgggttcggatcagcccgatagtgagatgacttttgatactaatatcaagcaggagagtggttcctctacctcgagctactccggctatgaagggtgcgcagtgctgcaggtttccccagttacagagaccagaacataccatgatgtcaaagagatatgcaagtgtgacgtggacgaatttgtgattctggagcttggagattttaacgatatcaccgagacatgctcctgctcctgcagttcatctaagtccgtgacctatgaacctgactttaattctgccgaacttctggctaaggagttataccgggtgtttcagaagtgttggatccttagtgtggtcaactcccagcttgcaggatcactgtcagccgctggaagtattgtggtaaacgaggagtgcgttcggaaagatttcgaatcctcaatgaatgtagtccaggagatcaagttcaaaagcaggattagaggcactgaggactgggctcccccacgatttcagataatctttaatattcacccacctctgaagagggatcttgtcgttgctgctcagaatttcttctgtgcaggctgcggcactcccgtcgagccaaaatttgtcaaacgcttacgatattgtgaatacctcgggaaatacttctgcgactgctgtcattcttacgctgaatcttgtatccctgcgagaattcttatgatgtgggatttcaagaagtactatgtcagcaatttttccaaacagttgctcgacagtatctggcaccaaccgatcttcaacctgctgtcaataggccaaagcctgtatgccaaagcaaaggagctggacagagtgaaggagatccaggagcagttattccacatcaagaagctgctcaagacctgtaggtttgcgaattccgcactcaaggaattcgagcaggtgccagggcacctgactgatgagcttcacctcttctccctggaggatctagtgagaattaagaagggtctgcttgcacccctactcaaagacattctgaaggcaagcttggcacacgttgcaggatgtgagctctgccaagggaaaggcttcatatgtgaattctgtcaaaacacaaccgtgatctttccgttccagacagcaacatgcagacgatgctccgcttgtagagcatgctttcacaaacaatgttttcagagcagcgagtgtcctcgctgtgctagaatcaccgctcgtcgcaaacttctggagtcagtcgcttcagccgctacttag

SEQ ID NO: 217880 - DNA, 1989 bp, Artificial Sequence
  derived and/or modified sequence
atggtgtcacaatctactgtgagacaggacagtcccgtggaaccttgggagggcatttccgaccactccggaatcatcgatggctccccccgacttctgaacactgaccacccaccgtgccagcttgacatcagattaatgcgacacaaggccgtctggattaatccccaggacgtccaacaacagccgcaagacctgcagtcacaggtgccagccgctggtaacagtgggactcactttgtcactgacgccgcaagcccctctggacctagtcctagctgtctcggcgacagcctggcagagacaacactttctgaggacacgacggatagcgtgggcagcgcttcccctcatggatcttcagaaaaatccagcagcttcagcctgtcctctaccgaagttcacatggttaggcccggatactcgcaccgcgtgagtctcccaactagcccaggaatcctggcaacgtcaccttatcccgagacagacagcgctttcttcgagcctagtcatctcacttccgcggctgacgagggggcagtccaggtgagccgtcgcactattagtagcaactctttctctcccgaagtgttcgtgctgcccgttgatgtggagaaggaaaacgctcacttctatgtcgcagatatgatcatcagtgctatggaaaaaatgaaatgcaatattctgtcccagcagcagacagagtcttggagcaaggaggtcagcgggctgttgggttcagaccaaccagacagtgagatgacttttgacacaaacattaaacaggagagtggcagcagcacctcgagctattcaggctacgagggctgtgctgttcttcaggttagccccgtcactgaaacacgcacctaccatgatgtgaaggagatctgcaaatgtgacgtcgatgaatttgtgatactggaattgggggacttcaacgacatcaccgagacctgctcatgttcctgttccagctccaagtcggtcacgtacgagccagattttaactcagccgagctgctggccaaagaactctatcgcgtttttcaaaagtgctggatcctgtccgtagtgaacagccagctagcaggatccctgagcgctgcaggctcgatcgttgtgaacgaggaatgcgtccgaaaggactttgagagctccatgaacgtggtgcaggagatcaaattcaagagcagaatcagggggacggaagactgggccccacctagatttcagatcatcttcaacattcaccccccactgaagagggatcttgtagtagccgcacagaactttttctgcgccggatgtggcacacctgtcgaacctaaatttgtgaagaggttacgctactgtgagtacttaggaaagtatttctgcgactgctgtcatagttatgcggagtcctgcatcccagccagaatcctcatgatgtgggactttaagaaatattacgtgtcaaacttttcaaagcagcttctggatagtatttggcaccagccaattttcaacctcctatcaattggccaaagtctgtacgccaaagccaaggagctggacagggtgaaggagatccaggagcagttgttccacatcaaaaagctgctgaagacctgccggtttgcgaattccgccctgaaagaatttgagcaggtaccagggcacttaaccgacgagctccatctgttctcgctggaagacctggtccggatcaagaaagggctgctagcacctctcctcaaagacattttgaaagcctctctggcccacgtcgcgggttgcgaactctgtcaaggcaaaggatttatatgtgagttttgccagaataccaccgtgatcttcccttttcaaaccgcaacatgtaggagatgtagcgcatgccgggcatgcttccacaagcaatgctttcagtcatccgaatgtcctcgatgcgccagaatcactgccaggaggaaactgcttgagtcagttgccagcgcagccacgtag

SEQ ID NO: 217881 - DNA, 3914 bp, Artificial Sequence
  derived and/or modified sequence
ggatttctaggaggaccggcagaggcgcgcataggtgcgtggtgctgggcccgggcgccgcggcaccggtgtaggagcgcgcatctccagagtttcttccatctgggcgacgtctcggtgcctgcggcgggaacggcgctttgcttccctgaggagcttctagagagctacggtggcccccgtgtgggaggcggggggcgtggcggcgtcggggcgtcgctgtcccctcctcggtagctctcctccctcccctttctgctgttaccgggagcgcggtggccacggaacgctgcccggagccgcgcgagggaggacccgacgcgcggcgtttacccagcgcagcgttccaccgctcgggtttggctggataaaataaaaaatggggatattgacctcctgtcactactgcatggactttgatggtttccaatcattactttctcctctgtgtcaatctgcctcttcgagaaattcatactcctgaatagctctccagacccccagctggccatgtggtgagttcagggcccaaatcaagtagtaccagcaatcagggaactcctatctgttttgaatggattcacaccagccacaagcctggaaagatggtgtcacaatctacagtcaggcaggattctcctgtggagccctgggaagggatcagcgatcactctggcattattgatggttcgcccagactcctgaacactgaccatcctccttgccaattagacatcaggctcatgaggcacaaagctgtctggattaacccccaggatgtgcagcaacagccgcaggacttgcaatctcaggtgccagcagcagggaacagtgggacccattttgtgacagatgctgcctctccctcaggcccttcaccttcgtgcctcggggactccctggcagagacaacgttgtctgaggataccacagactccgttggcagcgcttctccccatggctcgagtgaaaagagtagcagcttctctctgtcctcaacagaggtacacatggtccgcccaggatactctcatcgggtgtctctgcccacaagccctgggattttggccacctccccatatcctgagactgacagtgctttttttgagccttcccatctgacatctgctgctgatgaaggtgctgttcaagtcagtagaagaaccatttcttcgaattccttctcaccagaggtatttgtgctgcctgttgatgtagaaaaggaaaatgcccacttttatgttgcagatatgattatatcagcaatggagaaaatgaagtgtaacattctgagtcaacagcagacagagagctggagtaaagaagtcagtgggttacttgggagtgatcagcctgactctgaaatgacttttgataccaacataaagcaagagtctgggtcttctacttcttcatacagtggctatgaaggttgtgctgtgttacaggtcagcccagtgactgaaacacgtacttaccatgatgtgaaagagatttgcaaatgcgatgttgatgaatttgttattttagtgtcacttatgagccagacttcaattctgcagaactattagccaaagagctgtaccgcgtgttccagaagtgctggatactgtcagtagttaattctcagctggcaggttccctgagtgcagctggctcgatagtcgtaaatgaagagtgtgtccgaaaagactttgaatccagtatgaatgtagtacaggaaattaaatttaagtctaggatcagagggactgaagactgggctcctcctagatttcaaatcatatttaatattcatccaccactcaagagggaccttgtggtggcagcccagaattttttctgtgccggctgtggaactccagtagagcctaagtttgtgaagcggctccggtactgcgaatacctagggaagtatttctgtgactgctgccactcatatgcagagtcgtgcatccctgcccgaatcctgatgatgtgggacttcaagaagtactacgtcagcaatttctccaaacagctgctcgacagcatatggcaccagcccattttcaatttgctgagcatcggccaaagcctgtatgcgaaagccaaggagctggacagagtgaaggaaattcaggagcagctcttccatatcaagaagctgttgaagacctgtaggtttgctaacagtgcattaaaggagttcgagcaggtgccgggacacttgactgatgagctccacctgttctcccttgaggacctggtcaggatcaagaaagggctgctggcacccttactcaaggacattctgaaagcttcccttgcacatgtggctggctgtgagctgtgtcaaggaaagggctttatttgtgaattttgccagaatacgactgtcatcttcccatttcagacagcaacatgtagaagatgttcagcgtgcagggcttgctttcacaaacagtgcttccagtcctccgagtgcccccggtgtgcgaggatcacagcgaggagaaaacttctggaaagtgtggcctctgcagcaacatgatgcccctgagtactgtgaaaaagactgttcaacatgccttatgataacaccgatttgtgtctattattggtgacattgttttagatattgggtattgtatattaaggaaaaagatggtctatattctctttattgcatatacttaatgtttcaaaagaatgcagattctgtgtttaagcacagggctgatagttgtggttttgtttacaaatgttctgttttggctgctattggttttttaaagaggttttttatacttttgtatttgaatagttatgtttcactgatgctgagccagtttgtatgtgtgtgcatatatgtgaactgtaactgacaagatgaattactcagtttctctttctctaaagcttgtttgatgaaactggttggtcctttcagtgaacaaaaatatgaccccaaatctgtttgctctggcttttatttcttcaggaagcagacttccacttaaatgccattttgtgattgtgtcaatcatacacattttatttacttcagagtttgaatagagagtacacatttcttctgcagatttatttcatgatgagtttgagttgcttagcagggcgtgtgggtcccgttgaagtgcagtttgaagcaactgcttctagatggcactctttcaggtggcacaaattgaacctgtatttgtcatctctgttccacacactgcaatgtcaagggatgcagaagtgagtagaattccatccctgcccttgaggatcttgctttaacagatgtaaaactgaacataaggtatttgcagatttaaacgaactgggggaaataatgaacagtgtgattctagtaataacattaaaatcatagacattgactaataaggttaaatgaatcacaaaacctttatgaatttcttttttctaatagttcttatatgttttcctgaaacatgtgagcctattcttttttcttctactttctatatactttctcccacttgagaaaggggccttgaggctgggtcccttcatggtatacctttagactgaacggtttgcaacctagggcttgggcattacattccctgggattcacatgccctaactaaacctaccttgattttctcagacagcacaggcaggcaataaagcgtcacagattgtcccctaaccccatccagccatgtgtatgagtgtgttttattcaatgggatagtactgagcacatgaaagaaatgaatgacttctgtcaatctcttttcattcagtcttctcattctgtcaattgttttctcatccgcagtgcctctgccagaactgtgctcacatccattatttaagccagatcttttctaagtattatagaagtgtagaggcacatagaataaataaaaccagacttc

SEQ ID NO: 217882 - DNA, 2993 bp, Artificial Sequence
  derived and/or modified sequence
agctgacacagtgagttgtccctgacactcatgactttcaagccctgtgtcttggagggcactgtgatctggaagttcaccttccccatgaaaaaacccaaaccagcctctccttttcctgcatggtgatccgtctgtaatgatcagtgacattctcagaattaaccaatcaggaaattcttggaaagtccacgcctcagcatttagtgcttgggaaattctacttccagatcccagaggggacagagcagatttccagttctcctagcaccaccatgatctcaggactaaccactgcacacccgtgatgggattccaaaccttcgctgcaagaggacaaggtgacgagttgctgacagtgaaggctaaactaacgcggacagtgaagtgctacatgagtcggactcagactccaggtgaagcagccagcagaggtcagagagagacagctcacgttccggaatagctctccagacccccagctggccatgtggtgagttcagggcccaaatcaagtagtaccagcaatcagggaactcctatctgttttgaatggattcacaccagccacaagcctggaaagatggtgtcacaatctacagtcaggcaggattctcctgtggagccctgggaagggatcagcgatcactctggcattattgatggttcgcccagactcctgaacactgaccatcctccttgccaattagacatcaggctcatgaggcacaaagctgtctggattaacccccaggatgtgcagcaacagccgcaggacttgcaatctcaggtgccagcagcagggaacagtgggacccattttgtgacagatgctgcctctccctcaggcccttcaccttcgtgcctcggggactccctggcagagacaacgttgtctgaggataccacagactccgttggcagcgcttctccccatggctcgagtgaaaagagtagcagcttctctctgtcctcaacagaggtacacatggtccgcccaggatactctcatcgggtgtctctgcccacaagccctgggattttggccacctccccatatcctgagactgacagtgctttttttgagccttcccatctgacatctgctgctgatgaaggtgctgttcaagtcagtagaagaaccatttcttcgaattccttctcaccagaggtatttgtgctgcctgttgatgtagaaaaggaaaatgcccacttttatgttgcagatatgattatatcagcaatggagaaaatgaagtgtaacattctgagtcaacagcagacagagagctggagtaaagaagtcagtgggttacttgggagtgatcagcctgactctgaaatgacttttgataccaacataaagcaagagtctgggtcttctacttcttcatacagtggctatgaaggttgtgctgtgttacaggtcagcccagtgactgaaacacgtacttaccatgatgtgaaagagatttgcaaatgcgatgttgatgaatttgttattttagagcttggagattttaatgatatcacagaaacctgtagctgttcctgcagctcctctaagagtgtcacttatgagccagacttcaattctgcagaactattagccaaagagctgtaccgcgtgttccagaagtgctggatactgtcagtagttaattctcagctggcaggttccctgagtgcagctggctcgatagtcgtaaatgaagagtgtgtccgaaaagactttgaatccagtatgaatgtagtacaggaaattaaatttaagtctaggatcagagggactgaagactgggctcctcctagatttcaaatcatatttaatattcatccaccactcaagagggaccttgtggtggcagcccagaattttttctgtgccggctgtggaactccagtagagcctaagtttgtgaagcggctccggtactgcgaatacctagggaagtatttctgtgactgctgccactcatatgcagagtcgtgcatccctgcccgaatcctgatgatgtgggacttcaagaagtactacgtcagcaatttctccaaacagctgctcgacagcatatggcaccagcccattttcaatttgctgagcatcggccaaagcctgtatgcgaaagccaaggagctggacagagtgaaggaaattcaggagcagctcttccatatcaagaagctgttgaagacctgtaggtttgctaacagtgcattaaaggagttcgagcaggtgccgggacacttgactgatgagctccacctgttctcccttgaggacctggtcaggatcaagaaagggctgctggcacccttactcaaggacattctgaaagcttcccttgcacatgtggctggctgtgagctgtgtcaaggaaagggctttatttgtgaattttgccagaatacgactgtcatcttcccatttcagacagcaacatgtagaagatgttcagcgtgcagggcttgctttcacaaacagtgcttccagtcctccgagtgcccccggtgtgcgaggatcacagcgaggagaaaacttctggaaagtgtggcctctgcagcaacatgatgcccctgagtactgtgaaaaagactgttcaacatgccttatgataacaccgatttgtgtctattattggtgacattgttttagatattgggtattgtatattaaggaaaaagatggtctatattctctttattgcatatacttaatgtttcaaaagaatgcagattctgtgtttaagcacagggctgatagttgtggttttgtttacaaatgttctgttttggctgctattggttttttaaagaggttttttatacttttgtatttgaatagttatgtttcactgatgctgagccagtttgtatgtgtgtgcatatatgtgaactgtaactgacaagatgaattactcagtttctctttctctaaagcttgtttgatgaaactggttggtcctttcagtgaacaaaaatatgaccccaaa

SEQ ID NO: 217883 - DNA, 3975 bp, Artificial Sequence
  derived and/or modified sequence
ggatttctaggaggaccggcagaggcgcgcataggtgcgtggtgctgggcccgggcgccgcggcaccggtgtaggagcgcgcatctccagagtttcttccatctgggcgacgtctcggtgcctgcggcgggaacggcgctttgcttccctgaggagcttctagagagctacggtggcccccgtgtgggaggcggggggcgtggcggcgtcggggcgtcgctgtcccctcctcggtagctctcctccctcccctttctgctgttaccgggagcgcggtggccacggaacgctgcccggagccgcgcgagggaggacccgacgcgcggcgtttacccagcgcagcgttccaccgctcgggtttggctggataaaataaaaaatggggatattgacctcctgtcactactgcatggactttgatggtttccaatcattactttctcctctgtgtcaatctgcctcttcgagaaattcatactcctgaatagctctccagacccccagctggccatgtggtgagttcagggcccaaatcaagtagtaccagcaatcagggaactcctatctgttttgaatggattcacaccagccacaagcctggaaagatggtgtcacaatctacagtcaggcaggattctcctgtggagccctgggaagggatcagcgatcactctggcattattgatggttcgcccagactcctgaacactgaccatcctccttgccaattagacatcaggctcatgaggcacaaagctgtctggattaacccccaggatgtgcagcaacagccgcaggacttgcaatctcaggtgccagcagcagggaacagtgggacccattttgtgacagatgctgcctctccctcaggcccttcaccttcgtgcctcggggactccctggcagagacaacgttgtctgaggataccacagactccgttggcagcgcttctccccatggctcgagtgaaaagagtagcagcttctctctgtcctcaacagaggtacacatggtccgcccaggatactctcatcgggtgtctctgcccacaagccctgggattttggccacctccccatatcctgagactgacagtgctttttttgagccttcccatctgacatctgctgctgatgaaggtgctgttcaagtcagtagaagaaccatttcttcgaattccttctcaccagaggtatttgtgctgcctgttgatgtagaaaaggaaaatgcccacttttatgttgcagatatgattatatcagcaatggagaaaatgaagtgtaacattctgagtcaacagcagacagagagctggagtaaagaagtcagtgggttacttgggagtgatcagcctgactctgaaatgacttttgataccaacataaagcaagagtctgggtcttctacttcttcatacagtggctatgaaggttgtgctgtgttacaggtcagcccagtgactgaaacacgtacttaccatgatgtgaaagagatttgcaaatgcgatgttgatgaatttgttattttagagcttggagattttaatgatatcacagaaacctgtagctgttcctgcagctcctctaagagtgtcacttatgagccagacttcaattctgcagaactattagccaaagagctgtaccgcgtgttccagaagtgctggatactgtcagtagttaattctcagctggcaggttccctgagtgcagctggctcgatagtcgtaaatgaagagtgtgtccgaaaagactttgaatccagtatgaatgtagtacaggaaattaaatttaagtctaggatcagagggactgaagactgggctcctcctagatttcaaatcatatttaatattcatccaccactcaagagggaccttgtggtggcagcccagaattttttctgtgccggctgtggaactccagtagagcctaagtttgtgaagcggctccggtactgcgaatacctagggaagtatttctgtgactgctgccactcatatgcagagtcgtgcatccctgcccgaatcctgatgatgtgggacttcaagaagtactacgtcagcaatttctccaaacagctgctcgacagcatatggcaccagcccattttcaatttgctgagcatcggccaaagcctgtatgcgaaagccaaggagctggacagagtgaaggaaattcaggagcagctcttccatatcaagaagctgttgaagacctgtaggtttgctaacagtgcattaaaggagttcgagcaggtgccgggacacttgactgatgagctccacctgttctcccttgaggacctggtcaggatcaagaaagggctgctggcacccttactcaaggacattctgaaagcttcccttgcacatgtggctggctgtgagctgtgtcaaggaaagggctttatttgtgaattttgccagaatacgactgtcatcttcccatttcagacagcaacatgtagaagatgttcagcgtgcagggcttgctttcacaaacagtgcttccagtcctccgagtgcccccggtgtgcgaggatcacagcgaggagaaaacttctggaaagtgtggcctctgcagcaacatgatgcccctgagtactgtgaaaaagactgttcaacatgccttatgataacaccgatttgtgtctattattggtgacattgttttagatattgggtattgtatattaaggaaaaagatggtctatattctctttattgcatatacttaatgtttcaaaagaatgcagattctgtgtttaagcacagggctgatagttgtggttttgtttacaaatgttctgttttggctgctattggttttttaaagaggttttttatacttttgtatttgaatagttatgtttcactgatgctgagccagtttgtatgtgtgtgcatatatgtgaactgtaactgacaagatgaattactcagtttctctttctctaaagcttgtttgatgaaactggttggtcctttcagtgaacaaaaatatgaccccaaatctgtttgctctggcttttatttcttcaggaagcagacttccacttaaatgccattttgtgattgtgtcaatcatacacattttatttacttcagagtttgaatagagagtacacatttcttctgcagatttatttcatgatgagtttgagttgcttagcagggcgtgtgggtcccgttgaagtgcagtttgaagcaactgcttctagatggcactctttcaggtggcacaaattgaacctgtatttgtcatctctgttccacacactgcaatgtcaagggatgcagaagtgagtagaattccatccctgcccttgaggatcttgctttaacagatgtaaaactgaacataaggtatttgcagatttaaacgaactgggggaaataatgaacagtgtgattctagtaataacattaaaatcatagacattgactaataaggttaaatgaatcacaaaacctttatgaatttcttttttctaatagttcttatatgttttcctgaaacatgtgagcctattcttttttcttctactttctatatactttctcccacttgagaaaggggccttgaggctgggtcccttcatggtatacctttagactgaacggtttgcaacctagggcttgggcattacattccctgggattcacatgccctaactaaacctaccttgattttctcagacagcacaggcaggcaataaagcgtcacagattgtcccctaaccccatccagccatgtgtatgagtgtgttttattcaatgggatagtactgagcacatgaaagaaatgaatgacttctgtcaatctcttttcattcagtcttctcattctgtcaattgttttctcatccgcagtgcctctgccagaactgtgctcacatccattatttaagccagatcttttctaagtattatagaagtgtagaggcacatagaataaataaaaccagacttc

SEQ ID NO: 217884 - DNA, 1948 bp, Artificial Sequence
  derived and/or modified sequence
cccctttctgctgttaccgggagcgcggtggccacggaacgctgcccggagccgcgcgagggaggacccgacgcgcggcgtttacccagcgcagcgttccaccgctcgggtttggctgggcccttcaccttcgtgcctcggggactccctggcagagacaacgttgtctgaggataccacagactccgttggcagcgcttctccccatggctcgagtgaaaagagtagcagcttctctctgtcctcaacagaggtacacatggtccgcccaggatactctcatcgggtgtctctgcccacaagccctgggattttggccacctccccatatcctgagactgacagtgctttttttgagccttcccatctgacatctgctgctgatgaaggtgctgttcaagtcagtagaagaaccatttcttcgaattccttctcaccagaggtatttgtgctgcctgttgatgtagaaaaggaaaatgcccacttttatgttgcagatatgattatatcagcaatggagaaaatgaagtgtaacattctgagtcaacagcagacagagagctggagtaaagaagtcagtgggttacttgggagtgatcagcctgactctgaaatgacttttgataccaacataaagcaagagtctgggtcttctacttcttcatacagtggctatgaaggttgtgctgtgttacaggtcagcccagtgactgaaacacgtacttaccatgatgtgaaagagatttgcaaatgcgatgttgatgaatttgttattttagagcttggagattttaatgatatcacagaaacctgtagctgttcctgcagctcctctaagagtgtcacttatgagccagacttcaattctgcagaactattagccaaagagctgtaccgcgtgttccagaagtgctggatactgtcagtagttaattctcagctggcaggttccctgagtgcagctggctcgatagtcgtaaatgaagagtgtgtccgaaaagactttgaatccagtatgaatgtagtacaggaaattaaatttaagtctaggatcagagggactgaagactgggctcctcctagatttcaaatcatatttaatattcatccaccactcaagagggaccttgtggtggcagcccagaattttttctgtgccggctgtggaactccagtagagcctaagtttgtgaagcggctccggtactgcgaatacctagggaagtatttctgtgactgctgccactcatatgcagagtcgtgcatccctgcccgaatcctgatgatgtgggacttcaagaagtactacgtcagcaatttctccaaacagctgctcgacagcatatggcaccagcccattttcaatttgctgagcatcggccaaagcctgtatgcgaaagccaaggagctggacagagtgaaggaaattcaggagcagctcttccatatcaagaagctgttgaagacctgtaggtttgctaacagtgcattaaaggagttcgagcaggtgccgggacacttgactgatgagctccacctgttctcccttgaggacctggtcaggatcaagaaagggctgctggcacccttactcaaggacattctgaaagcttcccttgcacatgtggctggctgtgagctgtgtcaaggaaagggctttatttgtgaattttgccagaatacgactgtcatcttcccatttcagacagcaacatgtagaagatgttcagcgtgcagggcttgctttcacaaacagtgcttccagtcctccgagtgcccccggtgtgcgaggatcacagcgaggagaaaacttctggaaagtgtggcctctgcagcaacatgatgcccctgagtactgtgaaaaagactgttcaacatgccttatgataacaccgatttgtgtctattattggtgacattgttttagatattgggtattgtatattaa

SEQ ID NO: 217885 - protein, 2481 aa, Artificial Sequence
  derived and/or modified sequence
MPPNINWKEIMKVDPDDLPRQEELADNLLISLSKVEVNELKSEKQENVIHLFRITQSLMKMKAQEVELALEEVEKAGEEQAKFENQLKTKVMKLENELEMAQQSAGGRDTRFLRNEICQLEKQLEQKDRELEDMEKELEKEKKVNEQLALRNEEAENENSKLRRENKRLKKKNEQLCQDIIDYQKQIDSQKETLLSRRGEDSDYRSQLSKKNYELIQYLDEIQTLTEANEKIEVQNQEMRKNLEESVQEMEKMTDEYNRMKAIVHQTDNVIDQLKKENDHYQLQVQELTDLLKSKNEEDDPIMVAVNAKVEEWKLILSSKDDEIIEYQQMLHNLREKLKNAQLDADKSNVMALQQGIQERDSQIKMLTEQVEQYTKEMEKNTCIIEDLKNELQRNKGASTLSQQTHMKIQSTLDILKEKTKEAERTAELAEADAREKDKELVEALKRLKDYESGVYGLEDAVVEIKNCKNQIKIRDREIEILTKEINKLELKISDFLDENEALRERVGLEPKTMIDLTEFRNSKHLKQQQYRAENQILLKEASIESLEEERLDLKKKIRQMAQERGKRSATSGLTTEDLNLTENISQGDRISERKLDLLSLKNMSEAQSKNEFLSRELIEKERDLERSRTVIAKFQNKLKELVEENKQLEEGMKEILQAIKEMQKDPDVKGGETSLIIPSLERLVNAIESKNAEGIFDASLHLKAQVDQLTGRNEELRQELRESRKEAINYSQQLAKANLKIDHLEKETSLLRQSEGSNVVFKGIDLPDGIAPSSASIINSQNEYLIHLLQELENKEKKLKNLEDSLEDYNRKFAVIRHQQSLLYKEYLSEKETWKTESKTIKEEKRKLEDQVQQDAIKVKEYNNLLNALQMDSDEMKKILAENSRKITVLQVNEKSLIRQYTTLVELERQLRKENEKQKNELLSMEAEVCEKIGCLQRFKEMAIFKIAALQKVVDNSVSLSELELANKQYNELTAKYRDILQKDNMLVQRTSNLEHLECENISLKEQVESINKELEITKEKLHTIEQAWEQETKLGNESSMDKAKKSITNSDIVSISKKITMLEMKELNERQRAEHCQKMYEHLRTSLKQMEERNFELETKFAELTKINLDAQKVEQMLRDELADSVSKAVSDADRQRILELEKNEMELKVEVSKLREISDIARRQVEILNAQQQSRDKEVESLRMQLLDYQAQSDEKSLIAKLHQHNVSLQLSEATALGKLESITSKLQKMEAYNLRLEQKLDEKEQALYYARLEGRNRAKHLRQTIQSLRRQFSGALPLAQQEKFSKTMIQLQNDKLKIMQEMKNSQQEHRNMENKTLEMELKLKGLEELISTLKDTKGAQKVINWHMKIEELRLQELKLNRELVKDKEEIKYLNNIISEYERTISSLEEEIVQQNKFHEERQMAWDQREVDLERQLDIFDRQQNEILNAAQKFEEATGSIPDPSLPLPNQLEIALRKIKENIRIILETRATCKSLEEKLKEKESALRLAEQNILSRDKVINELRLRLPATAEREKLIAELGRKEMEPKSHHTLKIAHQTIANMQARLNQKEEVLKKYQRLLEKAREEQREIVKKHEEDLHILHHRLELQADSSLNKFKQTAWDLMKQSPTPVPTNKHFIRLAEMEQTVAEQDDSLSSLLVKLKKVSQDLERQREITELKVKEFENIKLQLQENHEDEVKKVKAEVEDLKYLLDQSQKESQCLKSELQAQKEANSRAPTTTMRNLVERLKSQLALKEKQQKALSRALLELRAEMTAAAEERIISATSQKEAHLNVQQIVDRHTRELKTQVEDLNENLLKLKEALKTSKNRENSLTDNLNDLNNELQKKQKAYNKILREKEEIDQENDELKRQIKRLTSGLQGKPLTDNKQSLIEELQRKVKKLENQLEGKVEEVDLKPMKEKNAKEELIRWEEGKKWQAKIEGIRNKLKEKEGEVFTLTKQLNTLKDLFAKADKEKLTLQRKLKTTGMTVDQVLGIRALESEKELEELKKRNLDLENDILYMRAHQALPRDSVVEDLHLQNRYLQEKLHALEKQFSKDTYSKPSISGIESDDHCQREQELQKENLKLSSENIELKFQLEQANKDLPRLKNQVRDLKEMCEFLKKEKAEVQRKLGHVRGSGRSGKTIPELEKTIGLMKKVVEKVQRENEQLKKASGILTSEKMANIEQENEKLKAELEKLKAHLGHQLSMHYESKTKGTEKIIAENERLRKELKKETDAAEKLRIAKNNLEILNEKMTVQLEETGKRLQFAESRGPQLEGADSKSWKSIVVTRMYETKLKELETDIAKKNQSITDLKQLVKEATEREQKVNKYNEDLEQQIKILKHVPEGAETEQGLKRELQVLRLANHQLDKEKAELIHQIEANKDQSGAESTIPDADQLKEKIKDLETQLKMSDLEKQHLKEEIKKLKKELENFDPSFFEEIEDLKYNYKEEVKKNILLEEKVKKLSEQLGVELTSPVAASEEFEDEEESPVNFPIY

SEQ ID NO: 217886 - protein, 2479 aa, Artificial Sequence
  derived and/or modified sequence
MPPNINWKEIMKVDPDDLPRQEELADNLLISLSKVEVNELKSEKQENVIHLFRITQSLMKMKAQEVELALEEVEKAGEEQAKFENQLKTKVMKLENELEMAQQSAGGRDTRFLRNEICQLEKQLEQKDRELEDMEKELEKEKKVNEQLALRNEEAENENSKLRRENKRLKKKNEQLCQDIIDYQKQIDSQKETLLSRRGEDSDYRSQLSKKNYELIQYLDEIQTLTEANEKIEVQNQEMRKNLEESVQEMEKMTDEYNRMKAIVHQTDNVIDQLKKENDHYQLQVQELTDLLKSKNEEDDPIMVAVNAKVEEWKLILSSKDDEIIEYQQMLHNLREKLKNAQLDADKSNVMALQQGIQERDSQIKMLTEQVEQYTKEMEKNTCIIEDLKNELQRNKGASTLSQQTHMKIQSTLDILKEKTKEAERTAELAEADAREKDKELVEALKRLKDYESGVYGLEDAVVEIKNCKNQIKIRDREIEILTKEINKLELKISDFLDENEALRERVGLEPKTMIDLTEFRNSKHLKQQQYRAENQILLKEIESLEEERLDLKKKIRQMAQERGKRSATSGLTTEDLNLTENISQGDRISERKLDLLSLKNMSEAQSKNEFLSRELIEKERDLERSRTVIAKFQNKLKELVEENKQLEEGMKEILQAIKEMQKDPDVKGGETSLIIPSLERLVNAIESKNAEGIFDASLHLKAQVDQLTGRNEELRQELRESRKEAINYSQQLAKANLKIDHLEKETSLLRQSEGSNVVFKGIDLPDGIAPSSASIINSQNEYLIHLLQELENKEKKLKNLEDSLEDYNRKFAVIRHQQSLLYKEYLSEKETWKTESKTIKEEKRKLEDQVQQDAIKVKEYNNLLNALQMDSDEMKKILAENSRKITVLQVNEKSLIRQYTTLVELERQLRKENEKQKNELLSMEAEVCEKIGCLQRFKEMAIFKIAALQKVVDNSVSLSELELANKQYNELTAKYRDILQKDNMLVQRTSNLEHLECENISLKEQVESINKELEITKEKLHTIEQAWEQETKLGNESSMDKAKKSITNSDIVSISKKITMLEMKELNERQRAEHCQKMYEHLRTSLKQMEERNFELETKFAELTKINLDAQKVEQMLRDELADSVSKAVSDADRQRILELEKNEMELKVEVSKLREISDIARRQVEILNAQQQSRDKEVESLRMQLLDYQAQSDEKSLIAKLHQHNVSLQLSEATALGKLESITSKLQKMEAYNLRLEQKLDEKEQALYYARLEGRNRAKHLRQTIQSLRRQFSGALPLAQQEKFSKTMIQLQNDKLKIMQEMKNSQQEHRNMENKTLEMELKLKGLEELISTLKDTKGAQKVINWHMKIEELRLQELKLNRELVKDKEEIKYLNNIISEYERTISSLEEEIVQQNKFHEERQMAWDQREVDLERQLDIFDRQQNEILNAAQKFEEATGSIPDPSLPLPNQLEIALRKIKENIRIILETRATCKSLEEKLKEKESALRLAEQNILSRDKVINELRLRLPATAEREKLIAELGRKEMEPKSHHTLKIAHQTIANMQARLNQKEEVLKKYQRLLEKAREEQREIVKKHEEDLHILHHRLELQADSSLNKFKQTAWDLMKQSPTPVPTNKHFIRLAEMEQTVAEQDDSLSSLLVKLKKVSQDLERQREITELKVKEFENIKLQLQENHEDEVKKVKAEVEDLKYLLDQSQKESQCLKSELQAQKEANSRAPTTTMRNLVERLKSQLALKEKQQKALSRALLELRAEMTAAAEERIISATSQKEAHLNVQQIVDRHTRELKTQVEDLNENLLKLKEALKTSKNRENSLTDNLNDLNNELQKKQKAYNKILREKEEIDQENDELKRQIKRLTSGLQGKPLTDNKQSLIEELQRKVKKLENQLEGKVEEVDLKPMKEKNAKEELIRWEEGKKWQAKIEGIRNKLKEKEGEVFTLTKQLNTLKDLFAKADKEKLTLQRKLKTTGMTVDQVLGIRALESEKELEELKKRNLDLENDILYMRAHQALPRDSVVEDLHLQNRYLQEKLHALEKQFSKDTYSKPSISGIESDDHCQREQELQKENLKLSSENIELKFQLEQANKDLPRLKNQVRDLKEMCEFLKKEKAEVQRKLGHVRGSGRSGKTIPELEKTIGLMKKVVEKVQRENEQLKKASGILTSEKMANIEQENEKLKAELEKLKAHLGHQLSMHYESKTKGTEKIIAENERLRKELKKETDAAEKLRIAKNNLEILNEKMTVQLEETGKRLQFAESRGPQLEGADSKSWKSIVVTRMYETKLKELETDIAKKNQSITDLKQLVKEATEREQKVNKYNEDLEQQIKILKHVPEGAETEQGLKRELQVLRLANHQLDKEKAELIHQIEANKDQSGAESTIPDADQLKEKIKDLETQLKMSDLEKQHLKEEIKKLKKELENFDPSFFEEIEDLKYNYKEEVKKNILLEEKVKKLSEQLGVELTSPVAASEEFEDEEESPVNFPIY

SEQ ID NO: 217887 - DNA, 7446 bp, Artificial Sequence
  derived and/or modified sequence
atgcctcctaatataaactggaaagagatcatgaaagtggaccccgacgatcttccacgacaggaggagctcgcagacaatttactgatttccctctccaaggtagaggtgaacgagctgaaatctgaaaagcaagaaaacgtgattcacctatttcggatcacccaaagccttatgaagatgaaggctcaggaggtggaactagctctggaagaagtggaaaaggccggtgaagaacaggcaaagtttgagaaccaactgaagactaaggttatgaagctcgagaatgaattagaaatggctcagcaaagcgcaggagggcgtgatacacggtttctccgtaatgagatatgtcagttggaaaagcagttggagcagaaagaccgcgagctggaagacatggaaaaggagctggagaaggaaaagaaagtgaacgagcagctggcactgcgcaacgaggaggccgagaatgaaaattctaaactgcggcgcgagaataaaaggctgaaaaagaaaaacgaacagctgtgtcaggatattatcgattaccagaagcagattgactctcagaaagagacacttctctcacgtagaggggaggactccgactatagatcacagttgtcaaaaaagaattatgagttgattcagtacctggatgaaattcagacactcacggaggcaaacgagaaaatcgaggtacagaaccaagagatgcgtaaaaacctggaagagagcgtgcaggagatggagaaaatgaccgacgagtacaaccgcatgaaggccattgtgcatcagactgacaatgtgattgatcaactaaagaaggagaacgaccattaccagctccaggtacaagagctaaccgatctgctcaagagcaagaatgaggaagatgaccctattatggtagccgtgaatgcaaaagtggaggagtggaagctgatcctttcgagcaaagacgatgaaatcattgagtaccagcagatgcttcataacctgcgcgaaaagctgaagaacgctcaactcgacgcagataagtctaacgtgatggcactgcagcagggtatccaggaacgtgacagtcagatcaaaatgctgaccgagcaagtggagcagtacaccaaggagatggaaaaaaatacctgcattatcgaggatctcaagaacgagctccagagaaacaagggagcctcaacgctgagccaacagacccatatgaagatacagagcacactagacatcctgaaagagaaaaccaaggaggctgaaagaaccgctgagctggcagaagctgatgcaagagaaaaagataaagagctggtcgaagccctcaagagactgaaggattatgagagcggggtgtatggcctggaggacgccgtggtggagatcaagaactgcaagaatcagattaagattcgcgatcgcgagatcgaaatactgacaaaagagatcaataagttagaattgaagatctcagatttcctggatgaaaacgaagccctccgtgaacgtgtgggcctcgaacccaagacgatgattgacctgactgaattccggaacagtaaacatctcaaacagcagcaataccgcgccgagaatcagatactactcaaagaagcatccatcgagtccttggaggaagagcgcttagacctgaagaagaaaataagacagatggcacaggagagggggaaacgaagtgccacaagtggattaaccaccgaggaccttaatctgacagagaatattagccagggcgatcgcataagcgagcggaagctagacctgttatcactgaagaatatgtccgaggctcaatccaagaatgagtttctgtctcgggagctgattgagaaggaaagagacctggaaaggtccagaaccgtgatagcaaagttccaaaacaagctaaaggagctggtagaggagaataagcaactggaggaggggatgaaagaaattctgcaggccattaaggaaatgcagaaggacccagacgtcaagggcggggagacttcccttattattcccagcctcgagcgcctagtaaacgctatcgagagcaaaaatgccgaggggatcttcgatgcaagcctccacttgaaagcccaggtcgatcagctcacaggtcgcaatgaggagttaagacaggagctgcgtgagtcacgaaaggaagctatcaactattcccagcaattggctaaagcaaacctaaaaattgaccacctggaaaaagagacctctctgctacggcagtcagaaggctcaaatgttgtgttcaagggcatcgaccttcccgatggcattgcacctagcagtgcttccataataaacagccaaaacgagtacctgatccacttgctgcaggagttggagaataaagagaaaaagcttaaaaatttggaagattcactcgaggactataacagaaaattcgccgtgatccgccatcaacaatcattactgtataaagagtacctgtctgagaaagagacctggaagactgaatccaagactattaaggaagaaaaacggaaacttgaggatcaggttcagcaggacgcaatcaaagtcaaggagtacaacaatcttctaaatgccctgcaaatggacagcgatgaaatgaaaaagattcttgccgagaactcccgaaagatcaccgtactccaggttaacgagaagagtctaattcgccagtatactaccctggtcgaattggaaaggcagctgcgtaaggagaatgaaaagcagaagaacgagctgctgagtatggaagcagaggtatgcgaaaagatcggctgcctgcagagattcaaggaaatggccatcttcaagattgcagcgctgcaaaaggtagtcgataactcggtctcactgagtgagcttgagctggccaacaaacagtacaacgaactcaccgccaaatacagagatattctccaaaaggacaatatgctagtgcagcggacaagcaatttagagcatctcgaatgcgagaatatatcactcaaagagcaagttgagtccatcaacaaagagcttgagattacaaaagaaaaactgcacacaattgaacaggcctgggagcaggaaacaaaactcggtaacgagtcaagtatggacaaggccaagaaaagtataacgaactctgatatagtgagtatcagtaagaaaattacaatgttggaaatgaaggagcttaatgaaagacaaagggctgagcactgtcagaagatgtatgagcacttgcgtacgtcccttaagcaaatggaggagcgcaacttcgagctggagaccaagttcgcagagctcaccaagataaaccttgacgcccaaaaagtcgaacaaatgcttcgcgatgagctcgccgacagtgtcagtaaagctgtttcggatgcagaccgccagcggattcttgagctcgagaaaaacgagatggagctaaaggtggaggtgtcaaagctccgcgaaatttccgatattgcccggcgacaggtggagattcttaatgcccagcagcaaagtagagacaaagaggtggaatcacttagaatgcagctgctggactatcaagcccaatctgatgagaagtcactgattgctaagctgcatcagcataatgtttccctccagctaagcgaggcgacagcactggggaagctcgagagcattacctccaaactgcagaaaatggaggcctacaatctgcgcctggagcagaagctggacgaaaaggaacaggcactgtactatgcccggctcgaaggaaggaatagggccaagcaccttcgacaaacgattcagagtctgaggaggcaatttagtggtgcccttcctctggcccagcaggaaaaatttagcaaaaccatgattcagctccagaacgataagctcaaaatcatgcaggaaatgaaaaactcccaacaggaacataggaatatggaaaataaaaccctggagatggaactgaagctcaaggggctggaggagctgatctctaccctcaaggacacgaaaggagcgcaaaaagtgatcaattggcacatgaaaatcgaggaactgcggctgcaggaactaaaactgaacagagagttagtcaaggataaggaggaaataaaatacctgaataacatcatctccgaatacgaacgaaccatatcttctctggaagaagagatcgtgcagcagaataaatttcacgaagagcggcagatggcatgggaccagagggaagtagacctagagagacagctcgatatttttgacagacagcaaaacgagatcttaaacgcagcacagaaattcgaagaagctactggctcaataccagatccatctctgccattgcctaaccagcttgagatcgcgctgcgaaaaatcaaagagaacatccgcatcattctggagacccgggccacatgtaaaagtttagaagagaagttgaaggaaaaggaatccgcgcttagactggctgaacagaatatcctctctcgcgacaaggtgatcaatgagctgcgattgagactacctgctactgcagagagggagaaacttattgctgagctaggccgcaaagagatggagcccaagtcgcatcacaccctgaaaatagcacaccagactatagccaatatgcaggccagacttaatcagaaggaggaggtgttaaagaagtaccagagactcctcgagaaggctcgggaagagcaaagggaaatcgtcaaaaagcacgaggaggatctccatatcttacaccatcgccttgaattacaagccgattcctctctgaacaaattcaaacagacagcgtgggacctaatgaaacaatctcccacgccagtgccaacgaataaacatttcatacggctggccgagatggaacagacggttgccgaacaagacgactctttgtcttccctgctggtgaagttgaaaaaggtaagtcaagacctggagcggcagcgtgagatcacggagttaaaggtgaaggaattcgagaacatcaagctgcagctgcaggaaaaccacgaagacgaagttaagaaggtgaaagctgaagttgaagacctaaagtatctgctggatcaatctcaaaaggagtcacagtgcctgaagagtgaactgcaggcccaaaaagaggcgaattcgcgcgcacccacgaccaccatgcgcaacctcgtggagcgtctgaagtcccaactggctttaaaagagaaacaacaaaaagctctgtcgagagctctgctggaactccgtgccgaaatgactgctgctgcggaagagaggatcatatccgccaccagccagaaggaggcgcacctgaacgttcaacagatcgttgatcgccacaccagggagctgaagactcaggtggaggatctaaacgagaaccttctgaagctgaaagaggctttgaagacctcaaaaaatagagagaactctttaaccgataatttgaacgatctcaacaacgagctccagaaaaagcagaaggcttataacaagatcctgagggagaaagaagaaattgatcaggagaacgatgaattaaagcggcagattaaacggctgacatctgggctacaaggcaaacccctgacggacaacaaacagtcgttgattgaagaactgcagaggaaggtgaaaaaactggagaaccagctggagggcaaggtggaagaggttgatctgaagcccatgaaagagaagaacgcaaaagaagaactgatcagatgggaggaggggaagaaatggcaagctaagatcgagggtatcagaaacaagcttaaagaaaaggaaggagaagtgtttaccctcaccaagcagttgaatacactcaaagatctgttcgctaaagccgacaaagaaaagttaacactccagagaaagctgaaaaccaccggaatgacagtcgatcaggtcctgggcatacgagcattagagtccgagaaggaattggaagagctcaagaaacgcaatctcgaccttgagaatgatatactgtacatgagagcccaccaagccctgcccagggatagtgtggtggaggacctgcatttgcaaaaccgatacttgcaagagaaactacacgctctcgaaaagcagttttcaaaggacacatatagcaagcctagtatctccggtattgaatcagacgaccactgtcagagagaacaggaattgcagaaagaaaacctgaagttgtcgagtgaaaacatcgagttgaaattccagttggaacaagccaacaaggatttgcctcgtctcaagaatcaggtaagggacctgaaagagatgtgtgaattcttgaaaaaggagaaagctgaggtgcagagaaagctggggcatgtccggggttctggccgaagtggaaagaccatccctgagttagaaaaaaccatcggcctgatgaagaaggtggtcgagaaggttcagcgggaaaacgagcagttaaaaaaagcttccggcattctgaccagcgagaagatggccaatattgaacaggagaacgaaaagcttaaagccgaactggaaaagcttaaagcccatttgggacatcagttgtctatgcactatgagtcaaaaaccaaggggaccgaaaagatcatagccgaaaatgaaaggctgaggaaggagctgaagaaagagaccgatgccgccgaaaagctgcggatcgccaaaaataacctcgaaatcctgaatgagaaaatgacagttcaattggaggagacaggcaagagactgcagttcgccgagtccaggggccctcagctcgaaggagctgattccaagtcctggaaatcaatagtggtgacccgcatgtacgaaacaaagcttaaagaactggaaaccgacattgccaagaaaaatcagtccatcacagacctcaaacagcttgtgaaggaggctacagaaagggaacaaaaagtgaacaagtataacgaggacttggagcaacagatcaaaatcctgaagcacgtccccgaaggggcagagacagagcagggtctgaagcgggaacttcaggtactgaggctggccaatcatcagctggacaaagaaaaggccgagcttatacaccagatcgaagccaacaaggaccagtctggtgccgagagtaccatccctgatgccgaccagctcaaggaaaaaattaaggatctggagacacaactgaagatgtcagatcttgagaaacaacatctgaaggaggaaattaagaagttgaaaaaggagctggagaactttgatcccagtttttttgaggaaatcgaggacttaaagtataattacaaagaagaagtgaaaaagaatatcctcttggaggagaaggtgaaaaaattgagcgaacagctgggagtcgaactgacgtcgccggttgctgcttccgaagagtttgaggatgaggaagagtcccctgtgaacttccctatttactag

SEQ ID NO: 217888 - DNA, 1650 bp, Artificial Sequence
  derived and/or modified sequence
aagatggctcagcagagcgcaggcggccgcgacaccagattcctgaggaatgaaatttgccagttagagaaacaattagagcagaaggatcgggaattagaagacatggaaaaggaactcgaaaaggagaaaaaggttaatgaacagctcgctctgcggaacgaggaagctgaaaacgaaaatagcaaactccggcgggaaaacaagagattgaagaagaaaaatgagcagctatgccaggacattatcgactatcagaaacagatcgactcccagaaggagactttactctctaggagaggagaggacagcgactatcgctcgcaattgtcgaaaaagaattacgagctgatccagtatctagatgagatccaaacccttactgaggcgaacgagaaaattgaggtgcagaaccaggaaatgcgtaaaaatctcgaagaaagcgtgcaggaaatggagaagatgaccgacgaatacaatcgaatgaaagcaatcgtgcaccaaactgataacgtaattgatcagctgaagaaagaaaacgaccactatcagttgcaggtgcaggagctgaccgatctccttaagtcgaaaaatgaagaagatgaccctataatggtcgccgttaacgcaaaagtggaggaatggaaacttattttgtcctccaaggatgatgagattatagagtaccagcaaatgcttcataatctccgggagaagttgaagaacgcacagcttgacgcagacaagagtaatgttatggcccttcaacaggggatccaagagcgtgatagtcagatcaaaatgttgacagaacaagtagagcagtataccaaagagatggagaagaatacttgcattatagaggaccttaaaaatgaactgcagcggaataaaggcgcctccacgttgtcccagcagacacacatgaagatccagagcactctagatattttgaaagaaaaaaccaaagaggctgaaaggaccgcagaactcgcggaggccgatgcaagggaaaaagacaaggagctggtagaggcgttaaaaagactgaaggactacgagagtggcgtgtatggactggaggatgccgtggttgaaataaaaaactgcaaaaaccagattaaaattcgggacagggaaattgagattctcacaaaagagatcaataaactggagttgaagatctctgacttcttggacgaaaatgaagcactgcgggagcgggttggactggaacctaaaaccatgatagacctgacagagttcagaaacagcaagcacctgaaacaacagcagtacagggcagagaatcagatattgctaaaagagattgagtcgctggaagaggaaaggcttgatctgaagaagaagattcgccaaatggctcaggagagaggcaagcgaagtgccacctccggactaaccactgaggaccttaacctgactgagaatatcagccagggggacaggatttccgaacgaaagctcgacctcctctcattgaagaacatgtctgaggcccagagtaaaaatgagttcctctctcgggagctgattgagaaggagagagacctcgaacgctcccgcacagtgattgctaaatttcaaaacaaatgttatcgcattaaggagtgcagaagaaatctttag

SEQ ID NO: 217889 - DNA, 7440 bp, Artificial Sequence
  derived and/or modified sequence
atgcctccaaacattaattggaaagaaataatgaaagtggaccccgatgatctgcctaggcaggaggaattggccgataatctgctgattagcttatcaaaggtcgaggtgaatgaactgaagtctgagaaacaagagaatgtgatccacctgtttcgcataacacagtcactgatgaaaatgaaagctcaggaggtggaactggcactagaagaggtcgagaaagcaggggaagaacaggcaaaattcgagaatcagctcaagactaaagttatgaagttggagaacgagctggagatggctcaacaatccgctggtggtcgcgatacaagatttctacgcaacgaaatttgtcagctagagaaacagttagaacaaaaggacagagagttggaggacatggaaaaggaactcgaaaaagagaaaaaagtgaacgagcagcttgctctgcgcaatgaggaggcagagaacgaaaactcgaaattgaggagggagaacaagcgactaaagaaaaaaaacgaacagctgtgtcaagacatcatcgattatcaaaagcagattgattcgcagaaagagacccttctctctagacgcggtgaggattctgattaccgcagccagctttccaagaagaattacgaactgattcagtacctggatgagattcagaccttaacagaagctaatgaaaagattgaggtgcagaatcaagagatgcggaagaacttggaagagtccgtgcaggagatggagaagatgactgacgaatataacaggatgaaggccatcgtgcatcagactgataacgttattgatcagctgaagaaagaaaacgatcactaccagctccaggtccaggaacttacagacctacttaaatccaaaaacgaggaggacgatccgattatggtcgccgtgaacgccaaagtagaagagtggaagcttattctgtcctccaaagatgatgagatcattgagtaccagcaaatgctgcataacttgagagaaaagctgaagaatgcacagcttgatgcagacaaaagcaatgtaatggcactgcagcagggcatccaggaacgcgacagtcagatcaaaatgttaactgagcaggtcgaacagtacaccaaggagatggaaaaaaacacttgcatcattgaggatctcaaaaatgagctgcagaggaacaaaggcgcgtctacactaagtcagcagacccatatgaaaattcagtccactctggacatcctcaaggaaaagacaaaagaggccgaaaggacagcagagcttgccgaggccgatgctagagagaaggataaagagttggtcgaagccttgaagcgactgaaagactatgagtccggagtgtatgggttggaagacgctgttgtcgagattaagaattgtaagaaccagattaaaatcagggatcgggaaattgaaattctcacaaaggaaatcaataaactggagctgaagatcagtgatttcctagacgagaacgaagccctaagggaaagggttggtttggagcctaagaccatgatcgatcttacagagttccggaactctaaacacctgaaacagcagcagtacagagctgagaaccagatcctgctgaaggagatagaatccctcgaggaagaaaggctggatctcaaaaaaaagattaggcaaatggcccaggaacgagggaaacgatccgcgacgagtggcttgacaactgaagatctgaacttaaccgagaacatctctcaaggcgacagaatctccgagcgcaaactcgacctccttagcctcaagaatatgtctgaggcccagagtaagaatgagttcctaagccgtgagctgatcgaaaaggagcgggatttggagcgtagccggacagtgatcgccaaatttcagaataagctgaaggagttggtggaagaaaataagcagttagaggaagggatgaaggagatcctgcaggccatcaaagagatgcagaaggatcctgatgtcaagggcggggaaaccagcctgataattccatctctggagaggttagtgaacgcaatcgagtccaagaatgctgagggtatcttcgacgcctccctgcacctgaaggcccaggtggaccagttaaccggtaggaatgaggaactgcggcaggaattgcgagagtcaaggaaggaggccatcaattactcccaacaattggcgaaggcaaatctgaagattgatcatctggagaaggaaacttcattattgagacagtctgaagggtcgaacgtggtgtttaaagggattgatctgcctgacggcattgccccgagctcagcgtctattattaatagccagaacgaatatttgatccaccttctgcaggaactggaaaacaaggagaagaagttaaaaaatctggaagattccctcgaagactacaacaggaagttcgcggtgatccggcaccagcaatccctgctgtacaaagaatatttatcagagaaagagacatggaaaactgagagcaagacaattaaagaggagaaacgaaaactggaggatcaggtccagcaagatgcaatcaaggtgaaggagtataacaaccttttgaacgccttgcaaatggattcagatgaaatgaaaaaaatcctggccgagaattctcggaagatcaccgtgctccaggtgaatgagaagtctttgattcgccagtataccactctcgttgagctagaaaggcagctccggaaggagaacgagaaacagaagaatgagctgctcagcatggaggctgaagtgtgcgagaagatcggatgtctccagagatttaaagaaatggcaatctttaagatagccgccctccagaaggtggtggataacagtgtgtcactttctgaactggagttggccaacaagcagtataatgagctgactgctaaatatcgggacattctgcagaaagacaatatgttggtgcagaggaccagcaatcttgagcacctggaatgcgaaaatatctcccttaaggaacaagttgaatcgattaataaggaactagagataactaaagagaaactgcacacgatcgagcaggcctgggaacaagaaaccaagcttggcaacgaatccagtatggacaaagccaagaagagcatcactaactcagatatcgtttctatctcgaaaaagatcactatgttggagatgaaggagttgaatgaacgacagagagccgagcattgtcagaaaatgtacgagcacctccggactagtctgaagcagatggaggaacggaacttcgagctggaaaccaagtttgccgagctgactaagattaacctagacgcacagaaggtggagcaaatgctccgagatgagctggccgattccgtgtctaaagccgtttctgacgccgacagacaacgtatactggaacttgagaagaacgaaatggagctcaaggtggaagtgtcaaagcttcgagagataagcgatatcgcccgtagacaggtggagatcctcaacgcccagcagcagagtagagacaaggaagtcgaaagcttgaggatgcagcttctggattaccaagcacagtccgacgagaaatcccttatagctaaattgcaccagcataatgtcagtttgcagttatcggaagctactgctttaggtaagctcgagtctatcactagcaaactgcagaagatggaggcatacaacctgagactcgaacagaaacttgatgaaaaggaacaggcactatactatgcaaggcttgaggggcggaacagagccaaacacctcaggcagaccattcagagcctgcgtagacagttctctggagctctgcctttggcccaacaggagaaattttctaagaccatgatccaacttcagaatgacaagctgaagatcatgcaggaaatgaaaaatagccagcaggaacatagaaatatggaaaacaaaacattagagatggaactaaagctgaaaggcctggaggaactcatttctacattgaaagacaccaagggggcccagaaggtaatcaattggcacatgaagattgaagagttgcgtctacaggagctgaagttaaatcgggagctggtgaaggataaagaagagatcaagtatctgaataacattatatccgaatatgagcggactataagttcccttgaggaggaaattgtgcagcaaaataagttccacgaggagcggcagatggcgtgggatcaacgggaggtggatttagagcgccagctggatatatttgatcgccagcagaatgaaatcctcaatgccgcccagaagttcgaagaagccactggtagcattccagaccctagtctccctctgcccaatcagctggaaatcgctctgcgtaagatcaaagagaacatacgcatcatcttggagactagggcaacctgcaagtccctcgaggaaaagcttaaggaaaaagagagcgccttgaggttggcggaacaaaatatcttatcccgcgacaaggtgattaacgaattgcgactgaggcttccagcgacggctgagagagagaagttaatagctgagttggggcggaaagagatggaacctaagtcccaccacaccctcaaaatagcacaccagactatcgcgaatatgcaggcaagactgaatcagaaagaagaagtgctgaagaagtaccagcggctgctagagaaagcaagagaggagcagcgagagatcgtcaagaaacacgaagaggatctgcacatccttcaccacaggttggaattacaggctgattcaagcctcaacaagtttaaacagaccgcatgggacttaatgaagcagagcccaacccctgtcccaaccaacaagcacttcatcaggctcgccgaaatggaacagacggtggctgagcaggacgactccctttcctcactcctggtaaaactgaagaaggtgagccaggacctcgagcgacagcgggaaatcacggaattaaaggtcaaggaatttgagaatattaaactgcaacttcaggagaaccacgaggacgaggttaaaaaggttaaggccgaagtagaggatctcaagtatctcctggaccagtcccagaaagagtcccagtgtctgaagtccgagcttcaagcccagaaggaggcgaattccagggcaccaactaccacgatgaggaacctcgtggagaggctcaagtcccagcttgctctgaaagagaaacagcagaaggcactcagtagagcactgctcgagctgcgcgcggagatgaccgccgccgctgaagagcgaattattagcgccacatcccagaaagaagcacatttaaacgtgcaacagatcgtcgatcgccataccagagagctcaagacgcaggtggaggacctgaatgaaaatctgcttaagctcaaggaggctttaaagaccagcaaaaatcgtgagaattcactgaccgacaacctcaacgacctaaacaatgaacttcagaagaaacagaaagcctacaataagattcttcgggaaaaggaggagatagaccaggaaaacgacgagctcaagaggcagataaagcgcctgaccagcggcttacaggggaaacctctaaccgacaacaaacaatccttgattgaggagctccagagaaaagtgaaaaagttggaaaatcagctggaggggaaagtggaagaggtggacctcaagcctatgaaggagaagaatgctaaggaggagcttatccggtgggaagagggtaagaaatggcaggcaaagattgaagggatcagaaataagcttaaggaaaaggaaggggaggtatttaccttgacgaaacagctgaacactctgaaagacctctttgctaaagcagataaggagaaacttacgcttcaaaggaagctgaagaccacagggatgacagtggaccaggtccttggcattcgggccctcgagtctgagaaagagctggaagagctgaaaaaacgcaacttagatctggaaaatgacattctttacatgagggctcatcaagccctgccccgggacagcgttgtcgaggacttgcatctgcaaaaccggtaccttcaggaaaagttacacgctttagagaaacagtttagtaaagacacgtacagcaagccctcaattagcggtatcgagagcgatgatcattgtcagcgcgagcaggaactgcaaaaagaaaacctgaaactgtcatctgaaaacattgaactgaagttccagctggaacaggccaacaaggacctgccccggctcaagaatcaggtgcgcgatctgaaggagatgtgtgaattcttgaaaaaagagaaggccgaggtccagcgcaagctcggccatgtgagggggtccggtagatcggggaaaactatccccgaactggaaaagacaatcgggcttatgaagaaagtggtagagaaagtacagagagagaacgagcagctgaagaaagcgtcaggcatattgactagtgagaagatggccaacattgagcaggagaacgaaaagctcaaagccgaactcgaaaagctgaaggctcacttgggccatcaattatctatgcactatgagagcaaaactaaagggactgaaaaaatcatcgctgaaaacgaacgccttcgaaaagaacttaagaaagaaactgatgccgctgaaaagctgaggattgcaaaaaataacctcgaaatactcaacgagaaaatgactgtgcagcttgaagagaccggaaagagattgcagttcgcagagagccgtggaccccagcttgaaggcgcagatagcaagtcatggaagtccatcgttgtcacaagaatgtacgaaacgaagctgaaagaactcgagacagatattgccaagaaaaaccagtctattacagacctcaagcagctggtcaaagaagccactgagcgagagcaaaaggtcaataaatataatgaagatttggagcaacaaatcaagattctgaagcatgtccccgaaggcgccgagacagaacaggggctcaaaagggagctgcaggtcctgaggttagcaaatcaccagttggataaggaaaaggccgaactgatacatcagatcgaggctaacaaggaccagtcaggcgcagagtccacaatcccagatgcagaccagcttaaagagaagataaaggatctcgagacccagctaaagatgtcagatctcgagaagcagcatctgaaggaggaaattaagaagctgaaaaaggagctggagaatttcgatccaagcttcttcgaggagatcgaggacttgaaatataactacaaggaggaggtgaaaaaaaatatcctgctggaagagaaagtgaaaaaactgagcgagcagctcggtgtggagctgacaagtcctgtcgcagcctcagaagagttcgaggacgaagaagaatctcctgtaaattttcccatatactag

SEQ ID NO: 217890 - DNA, 7446 bp, Artificial Sequence
  derived and/or modified sequence
atgccacccaacatcaactggaaggagatcatgaaggtggaccctgatgacctgccccggcaggaggagctggccgacaacctgctgatcagcctgagcaaggtggaggtgaatgagctgaagtctgagaagcaggagaatgtcatccacctgttccgcatcacccagagcctgatgaagatgaaggcccaggaggtggagctggccctggaggaggtggagaaggccggggaggagcaggccaagtttgagaaccagctgaagaccaaggtgatgaagctggagaatgagctggagatggcccagcagagcgctgggggccgggacacccgcttcctgagaaatgagatctgccagctggagaagcagctggagcagaaggaccgggagctggaggacatggagaaggagctggagaaggagaagaaggtgaatgagcagctggccctgagaaatgaggaggccgagaatgaaaacagcaagctgcggcgggagaacaagaggctgaagaagaagaatgagcagctgtgccaggacatcatcgactaccagaagcagattgacagccagaaggagaccctgctgagcagaagaggagaggacagcgactaccgcagccagctgagcaagaagaactatgagctgatccagtacctggatgagatccagaccctgacagaggccaatgagaagattgaggtgcagaaccaggagatgaggaagaacctggaggagagcgtgcaggagatggagaagatgacagatgagtacaacaggatgaaggccatcgtgcaccagacagacaacgtgattgaccagctgaagaaggaaaatgaccactaccagctgcaggtgcaggagctgacagacctgctgaagagcaagaatgaggaggatgaccccatcatggtggccgtgaatgccaaggtggaggagtggaagctgatcctgagcagcaaggatgatgagatcatcgagtaccagcagatgctgcacaacctgcgggagaagctgaagaatgcccagctggatgctgacaagagcaatgtgatggccctgcagcagggcatccaggagcgggacagccagatcaagatgctgacagagcaggtggagcagtacaccaaggagatggagaagaacacctgcatcatcgaggacctgaagaatgagctgcagaggaacaagggggccagcaccctgagccagcagacccacatgaagatccagagcaccctggacatcctgaaggagaagaccaaggaggccgagaggacagctgagctggccgaggctgatgcccgggagaaggacaaggagctggtggaggccctgaagaggctgaaggactatgaaagtggagtgtatggcctggaggatgctgtggtggagatcaagaactgcaagaaccagatcaagatccgggaccgggagattgagatcctgaccaaggagatcaacaagctggagctgaagatcagtgacttcctggatgaaaatgaggccctgcgggagcgggtgggcctggagcccaagaccatgattgacctgacagagttcaggaacagcaagcacctgaagcagcagcagtacagagctgagaaccagatcctgctgaaggaggccagcattgagagcctggaggaggagcggctggacctgaagaagaagatccggcagatggcccaggagcggggcaagaggtctgccaccagcggcctgaccacagaggacctgaacctgacagagaacatcagccagggcgaccgcatcagcgagaggaagctggacctgctgagcctgaagaacatgtctgaggcccagagcaagaatgagttcctgagccgggagctgattgagaaggagcgggacctggagaggagcaggacagtcatcgccaagttccagaacaagctgaaggagctggtggaggagaacaagcagctggaggagggcatgaaggagatcctgcaggccatcaaggagatgcagaaggaccctgatgtgaagggcggggagaccagcctcatcatccccagcctggagcggctggtgaatgccatcgagagcaagaatgctgagggcatctttgatgccagcctgcacctgaaggcccaggtggaccagctgactggaagaaatgaggagctgcggcaggagctgcgggagagcaggaaggaggccatcaactacagccagcagctggccaaggccaacctgaagattgaccacctggagaaggagaccagcctgctgcggcagagcgagggcagcaatgtggtgttcaagggcatcgacctgcctgatggcatcgcccccagcagcgccagcatcatcaacagccagaatgagtacctgatccacctgctgcaggagctggagaacaaggagaagaagctgaagaacctggaggacagcctggaggactacaacaggaagtttgctgtgatccgccaccagcagagcctgctgtacaaggagtacctgtctgagaaggagacctggaagacagagagcaagaccatcaaggaggagaagaggaagctggaggaccaggtgcagcaggatgccatcaaggtgaaggagtacaacaacctgctgaatgccctgcagatggacagtgatgagatgaagaagatcctggccgagaacagcaggaagatcaccgtgctgcaggtgaatgagaagagcctcatccggcagtacaccaccctggtggagctggagcggcagctgaggaaagaaaatgagaagcagaagaatgagctgctgtccatggaggccgaggtgtgtgagaagattggctgcctgcagcgcttcaaggagatggccatcttcaagattgctgccctgcagaaggtggtggacaacagcgtgtccctgtctgagctggagctggccaacaagcagtacaatgagctgacagccaagtacagagacatcctgcagaaggacaacatgctggtgcagaggaccagcaacctggagcacctggagtgtgagaacatcagcctgaaggagcaggtggagagcatcaacaaggagctggagatcaccaaggagaagctgcacaccatcgagcaggcctgggagcaggagaccaagctgggcaatgaaagctccatggacaaggccaagaagagcatcaccaacagcgacatcgtgtccatcagcaagaagatcaccatgctggagatgaaggagctgaatgaaaggcagagagctgagcactgccagaagatgtatgagcacctgcggaccagcctgaagcagatggaggagaggaactttgagctggagaccaagtttgctgagctgaccaagatcaacctggatgcccagaaggtggagcagatgctgagagatgagctggccgacagcgtgtccaaggctgtgtctgatgctgaccggcagaggatcctggagctggagaagaatgagatggagctgaaggtggaggtgtccaagctgcgggagatcagtgacatcgcccggcggcaggtggagatcctgaatgcccagcagcagagccgggacaaggaggtggagagcctgaggatgcagctgctggactaccaggcccagagtgatgagaagagcctcatcgccaagctgcaccagcacaacgtgtccctgcagctgtctgaggccacagccctgggcaagctggagagcatcaccagcaagctgcagaagatggaggcctacaacctgcggctggagcagaagctggatgagaaggagcaggccctgtactatgcccggctggagggcaggaacagagccaagcacctgcggcagaccatccagagcctgcggcggcagttcagcggggccctgcccctggcccagcaggagaagttcagcaagaccatgatccagctgcagaatgacaagctgaagatcatgcaggagatgaagaacagccagcaggagcacaggaacatggagaacaagaccctggagatggagctgaagctgaagggcctggaggagctgatcagcaccctgaaggacaccaagggggcccagaaggtgatcaactggcacatgaagattgaggagctgcggctgcaggagctgaagctgaaccgggagctggtgaaggacaaggaggagatcaagtacctgaacaacatcatcagtgaatatgaaagaaccatcagcagcctggaggaggagatcgtgcagcagaacaagttccacgaggagcggcagatggcctgggaccagcgggaggtggacctggagcggcagctggacatctttgaccggcagcagaatgagatcctgaatgctgcccagaagtttgaggaggccaccggcagcatcccagaccccagcctgcccctgcccaaccagctggagatcgccctgaggaagatcaaggagaacatccgcatcatcctggagacccgggccacctgcaagagcctggaggagaagctgaaggagaaggagagcgccctgcggctggccgagcagaacatcctgagccgggacaaggtgatcaatgagctgcggctgcggctgcctgccacagctgagcgggagaagctgattgctgagctgggcaggaaggagatggagcccaagagccaccacaccctgaagatcgcccaccagaccatcgccaacatgcaggcccggctgaaccagaaggaggaggtgctgaagaagtaccagaggctgctggagaaggcccgggaggagcagcgggagatcgtgaagaagcatgaggaggacctgcacatcctgcaccaccggctggagctgcaggccgacagcagcctgaacaagttcaagcagacagcctgggacctgatgaagcagagccccacccctgtgcccaccaacaagcacttcatccggctggccgagatggagcagacagtggccgagcaggatgacagcctgagcagcctgctggtgaagctgaagaaggtgtcccaggacctggagcggcagcgggagatcacagagctgaaggtgaaggagtttgagaacatcaagctgcagctgcaggagaaccatgaagatgaggtgaagaaggtgaaggccgaggtggaggacctgaagtacctgctggaccagagccagaaggagagccagtgcctgaagtctgagctgcaggcccagaaggaggccaacagccgggcccccaccaccaccatgaggaacctggtggagcggctgaagagccagctggccctgaaggagaagcagcagaaggccctgagccgggccctgctggagctgcgggcagagatgacagctgctgctgaggagcgcatcatcagcgccaccagccagaaggaggcccacctgaatgtgcagcagatcgtggacagacacacccgggagctgaagacccaggtggaggacctgaatgaaaacctgctgaagctgaaggaggccctgaagaccagcaagaaccgggagaacagcctgacagacaacctgaatgacctgaacaatgagctgcagaagaagcagaaggcctacaacaagatcctgcgggagaaggaggagattgaccaggagaatgatgagctgaagaggcagatcaagaggctgaccagcggcctgcagggcaagcccctgacagacaacaagcagagcctcatcgaggagctgcagaggaaggtgaagaagctggagaaccagctggagggcaaggtggaggaggtggacctgaagcccatgaaggagaagaatgccaaggaggagctgatccgctgggaggagggcaagaagtggcaggccaagattgagggcatccggaacaagctgaaggagaaggagggggaggtgttcaccctgaccaagcagctgaacaccctgaaggacctgtttgccaaggctgacaaggagaagctgaccctgcagaggaagctgaagaccaccggcatgacagtggaccaggtgctgggcatccgggccctggagagcgagaaggagctggaggagctgaagaagaggaacctggacctggagaatgacatcctgtacatgagggcccaccaggccctgccccgggacagcgtggtggaggacctgcacctgcagaaccgctacctgcaggagaagctgcacgccctggagaagcagttcagcaaggacacctacagcaagcccagcatctctggaattgaaagtgatgaccactgccagcgggagcaggagctgcagaaggagaacctgaagctgagcagtgaaaatattgagctgaagttccagctggagcaggccaacaaggacctgccccggctgaagaaccaggtgcgggacctgaaggagatgtgtgagttcctgaagaaggagaaggccgaggtgcagaggaagctgggccacgtgcggggcagcggccgcagcggcaagaccatccctgagctggagaagaccatcggcctgatgaagaaggtggtggagaaggtgcagagagaaaatgagcagctgaagaaggccagcggcatcctgaccagcgagaagatggccaacatcgagcaggagaatgagaagctgaaggccgagctggagaagctgaaggcccacctgggccaccagctgtccatgcactatgagagcaagaccaagggcacagagaagatcatcgcagaaaatgaaaggctgaggaaggagctgaagaaggagacagatgctgctgagaagctgagaattgccaagaacaacctggagatcctgaatgagaagatgacagtgcagctggaggagaccgggaagaggctgcagtttgctgagagccggggcccccagctggagggcgctgacagcaagtcctggaagagcatcgtggtgaccaggatgtatgagaccaagctgaaggagctggagacagacatcgccaagaagaaccagagcatcacagacctgaagcagctggtgaaggaggccacagagcgggagcagaaggtgaacaagtacaatgaagacctggagcagcagatcaagatcctgaagcacgtgcctgagggcgctgagacagagcagggcctgaagcgggagctgcaggtgctgcggctggccaaccaccagctggacaaggagaaggccgagctgatccaccagatcgaggccaacaaggaccagagcggggctgagagcaccatcccagatgctgaccagctgaaggagaagatcaaggacctggagacccagctgaagatgtctgacctggagaagcagcacctgaaggaggagatcaagaagctgaagaaggagctggagaactttgaccccagcttctttgaggagattgaggacctgaagtacaactacaaggaggaggtgaagaagaacatcctgctggaggagaaggtgaagaagctgtctgagcagctgggcgtggagctgaccagccctgtggccgccagcgaggagtttgaagatgaggaggagagccctgtgaacttccccatctactag

SEQ ID NO: 217891 - DNA, 1650 bp, Artificial Sequence
  derived and/or modified sequence
aagatggcccagcagagcgctgggggccgggacacccgcttcctgagaaatgagatctgccagctggagaagcagctggagcagaaggaccgggagctggaggacatggagaaggagctggagaaggagaagaaggtgaatgagcagctggccctgagaaatgaggaggccgagaatgaaaacagcaagctgcggcgggagaacaagaggctgaagaagaagaatgagcagctgtgccaggacatcatcgactaccagaagcagattgacagccagaaggagaccctgctgagcagaagaggagaggacagcgactaccgcagccagctgagcaagaagaactatgagctgatccagtacctggatgagatccagaccctgacagaggccaatgagaagattgaggtgcagaaccaggagatgaggaagaacctggaggagagcgtgcaggagatggagaagatgacagatgagtacaacaggatgaaggccatcgtgcaccagacagacaacgtgattgaccagctgaagaaggaaaatgaccactaccagctgcaggtgcaggagctgacagacctgctgaagagcaagaatgaggaggatgaccccatcatggtggccgtgaatgccaaggtggaggagtggaagctgatcctgagcagcaaggatgatgagatcatcgagtaccagcagatgctgcacaacctgcgggagaagctgaagaatgcccagctggatgctgacaagagcaatgtgatggccctgcagcagggcatccaggagcgggacagccagatcaagatgctgacagagcaggtggagcagtacaccaaggagatggagaagaacacctgcatcatcgaggacctgaagaatgagctgcagaggaacaagggggccagcaccctgagccagcagacccacatgaagatccagagcaccctggacatcctgaaggagaagaccaaggaggccgagaggacagctgagctggccgaggctgatgcccgggagaaggacaaggagctggtggaggccctgaagaggctgaaggactatgaaagtggagtgtatggcctggaggatgctgtggtggagatcaagaactgcaagaaccagatcaagatccgggaccgggagattgagatcctgaccaaggagatcaacaagctggagctgaagatcagtgacttcctggatgaaaatgaggccctgcgggagcgggtgggcctggagcccaagaccatgattgacctgacagagttcaggaacagcaagcacctgaagcagcagcagtacagagctgagaaccagatcctgctgaaggagattgagagcctggaggaggagcggctggacctgaagaagaagatccggcagatggcccaggagcggggcaagaggtctgccaccagcggcctgaccacagaggacctgaacctgacagagaacatcagccagggcgaccgcatcagcgagaggaagctggacctgctgagcctgaagaacatgtctgaggcccagagcaagaatgagttcctgagccgggagctgattgagaaggagcgggacctggagaggagcaggacagtcatcgccaagttccagaacaagtgctaccgcatcaaggagtgcagaagaaacctgtag

SEQ ID NO: 217892 - DNA, 7440 bp, Artificial Sequence
  derived and/or modified sequence
atgccacccaacatcaactggaaggagatcatgaaggtggaccctgatgacctgccccggcaggaggagctggccgacaacctgctgatcagcctgagcaaggtggaggtgaatgagctgaagtctgagaagcaggagaatgtcatccacctgttccgcatcacccagagcctgatgaagatgaaggcccaggaggtggagctggccctggaggaggtggagaaggccggggaggagcaggccaagtttgagaaccagctgaagaccaaggtgatgaagctggagaatgagctggagatggcccagcagagcgctgggggccgggacacccgcttcctgagaaatgagatctgccagctggagaagcagctggagcagaaggaccgggagctggaggacatggagaaggagctggagaaggagaagaaggtgaatgagcagctggccctgagaaatgaggaggccgagaatgaaaacagcaagctgcggcgggagaacaagaggctgaagaagaagaatgagcagctgtgccaggacatcatcgactaccagaagcagattgacagccagaaggagaccctgctgagcagaagaggagaggacagcgactaccgcagccagctgagcaagaagaactatgagctgatccagtacctggatgagatccagaccctgacagaggccaatgagaagattgaggtgcagaaccaggagatgaggaagaacctggaggagagcgtgcaggagatggagaagatgacagatgagtacaacaggatgaaggccatcgtgcaccagacagacaacgtgattgaccagctgaagaaggaaaatgaccactaccagctgcaggtgcaggagctgacagacctgctgaagagcaagaatgaggaggatgaccccatcatggtggccgtgaatgccaaggtggaggagtggaagctgatcctgagcagcaaggatgatgagatcatcgagtaccagcagatgctgcacaacctgcgggagaagctgaagaatgcccagctggatgctgacaagagcaatgtgatggccctgcagcagggcatccaggagcgggacagccagatcaagatgctgacagagcaggtggagcagtacaccaaggagatggagaagaacacctgcatcatcgaggacctgaagaatgagctgcagaggaacaagggggccagcaccctgagccagcagacccacatgaagatccagagcaccctggacatcctgaaggagaagaccaaggaggccgagaggacagctgagctggccgaggctgatgcccgggagaaggacaaggagctggtggaggccctgaagaggctgaaggactatgaaagtggagtgtatggcctggaggatgctgtggtggagatcaagaactgcaagaaccagatcaagatccgggaccgggagattgagatcctgaccaaggagatcaacaagctggagctgaagatcagtgacttcctggatgaaaatgaggccctgcgggagcgggtgggcctggagcccaagaccatgattgacctgacagagttcaggaacagcaagcacctgaagcagcagcagtacagagctgagaaccagatcctgctgaaggagattgagagcctggaggaggagcggctggacctgaagaagaagatccggcagatggcccaggagcggggcaagaggtctgccaccagcggcctgaccacagaggacctgaacctgacagagaacatcagccagggcgaccgcatcagcgagaggaagctggacctgctgagcctgaagaacatgtctgaggcccagagcaagaatgagttcctgagccgggagctgattgagaaggagcgggacctggagaggagcaggacagtcatcgccaagttccagaacaagctgaaggagctggtggaggagaacaagcagctggaggagggcatgaaggagatcctgcaggccatcaaggagatgcagaaggaccctgatgtgaagggcggggagaccagcctcatcatccccagcctggagcggctggtgaatgccatcgagagcaagaatgctgagggcatctttgatgccagcctgcacctgaaggcccaggtggaccagctgactggaagaaatgaggagctgcggcaggagctgcgggagagcaggaaggaggccatcaactacagccagcagctggccaaggccaacctgaagattgaccacctggagaaggagaccagcctgctgcggcagagcgagggcagcaatgtggtgttcaagggcatcgacctgcctgatggcatcgcccccagcagcgccagcatcatcaacagccagaatgagtacctgatccacctgctgcaggagctggagaacaaggagaagaagctgaagaacctggaggacagcctggaggactacaacaggaagtttgctgtgatccgccaccagcagagcctgctgtacaaggagtacctgtctgagaaggagacctggaagacagagagcaagaccatcaaggaggagaagaggaagctggaggaccaggtgcagcaggatgccatcaaggtgaaggagtacaacaacctgctgaatgccctgcagatggacagtgatgagatgaagaagatcctggccgagaacagcaggaagatcaccgtgctgcaggtgaatgagaagagcctcatccggcagtacaccaccctggtggagctggagcggcagctgaggaaagaaaatgagaagcagaagaatgagctgctgtccatggaggccgaggtgtgtgagaagattggctgcctgcagcgcttcaaggagatggccatcttcaagattgctgccctgcagaaggtggtggacaacagcgtgtccctgtctgagctggagctggccaacaagcagtacaatgagctgacagccaagtacagagacatcctgcagaaggacaacatgctggtgcagaggaccagcaacctggagcacctggagtgtgagaacatcagcctgaaggagcaggtggagagcatcaacaaggagctggagatcaccaaggagaagctgcacaccatcgagcaggcctgggagcaggagaccaagctgggcaatgaaagctccatggacaaggccaagaagagcatcaccaacagcgacatcgtgtccatcagcaagaagatcaccatgctggagatgaaggagctgaatgaaaggcagagagctgagcactgccagaagatgtatgagcacctgcggaccagcctgaagcagatggaggagaggaactttgagctggagaccaagtttgctgagctgaccaagatcaacctggatgcccagaaggtggagcagatgctgagagatgagctggccgacagcgtgtccaaggctgtgtctgatgctgaccggcagaggatcctggagctggagaagaatgagatggagctgaaggtggaggtgtccaagctgcgggagatcagtgacatcgcccggcggcaggtggagatcctgaatgcccagcagcagagccgggacaaggaggtggagagcctgaggatgcagctgctggactaccaggcccagagtgatgagaagagcctcatcgccaagctgcaccagcacaacgtgtccctgcagctgtctgaggccacagccctgggcaagctggagagcatcaccagcaagctgcagaagatggaggcctacaacctgcggctggagcagaagctggatgagaaggagcaggccctgtactatgcccggctggagggcaggaacagagccaagcacctgcggcagaccatccagagcctgcggcggcagttcagcggggccctgcccctggcccagcaggagaagttcagcaagaccatgatccagctgcagaatgacaagctgaagatcatgcaggagatgaagaacagccagcaggagcacaggaacatggagaacaagaccctggagatggagctgaagctgaagggcctggaggagctgatcagcaccctgaaggacaccaagggggcccagaaggtgatcaactggcacatgaagattgaggagctgcggctgcaggagctgaagctgaaccgggagctggtgaaggacaaggaggagatcaagtacctgaacaacatcatcagtgaatatgaaagaaccatcagcagcctggaggaggagatcgtgcagcagaacaagttccacgaggagcggcagatggcctgggaccagcgggaggtggacctggagcggcagctggacatctttgaccggcagcagaatgagatcctgaatgctgcccagaagtttgaggaggccaccggcagcatcccagaccccagcctgcccctgcccaaccagctggagatcgccctgaggaagatcaaggagaacatccgcatcatcctggagacccgggccacctgcaagagcctggaggagaagctgaaggagaaggagagcgccctgcggctggccgagcagaacatcctgagccgggacaaggtgatcaatgagctgcggctgcggctgcctgccacagctgagcgggagaagctgattgctgagctgggcaggaaggagatggagcccaagagccaccacaccctgaagatcgcccaccagaccatcgccaacatgcaggcccggctgaaccagaaggaggaggtgctgaagaagtaccagaggctgctggagaaggcccgggaggagcagcgggagatcgtgaagaagcatgaggaggacctgcacatcctgcaccaccggctggagctgcaggccgacagcagcctgaacaagttcaagcagacagcctgggacctgatgaagcagagccccacccctgtgcccaccaacaagcacttcatccggctggccgagatggagcagacagtggccgagcaggatgacagcctgagcagcctgctggtgaagctgaagaaggtgtcccaggacctggagcggcagcgggagatcacagagctgaaggtgaaggagtttgagaacatcaagctgcagctgcaggagaaccatgaagatgaggtgaagaaggtgaaggccgaggtggaggacctgaagtacctgctggaccagagccagaaggagagccagtgcctgaagtctgagctgcaggcccagaaggaggccaacagccgggcccccaccaccaccatgaggaacctggtggagcggctgaagagccagctggccctgaaggagaagcagcagaaggccctgagccgggccctgctggagctgcgggcagagatgacagctgctgctgaggagcgcatcatcagcgccaccagccagaaggaggcccacctgaatgtgcagcagatcgtggacagacacacccgggagctgaagacccaggtggaggacctgaatgaaaacctgctgaagctgaaggaggccctgaagaccagcaagaaccgggagaacagcctgacagacaacctgaatgacctgaacaatgagctgcagaagaagcagaaggcctacaacaagatcctgcgggagaaggaggagattgaccaggagaatgatgagctgaagaggcagatcaagaggctgaccagcggcctgcagggcaagcccctgacagacaacaagcagagcctcatcgaggagctgcagaggaaggtgaagaagctggagaaccagctggagggcaaggtggaggaggtggacctgaagcccatgaaggagaagaatgccaaggaggagctgatccgctgggaggagggcaagaagtggcaggccaagattgagggcatccggaacaagctgaaggagaaggagggggaggtgttcaccctgaccaagcagctgaacaccctgaaggacctgtttgccaaggctgacaaggagaagctgaccctgcagaggaagctgaagaccaccggcatgacagtggaccaggtgctgggcatccgggccctggagagcgagaaggagctggaggagctgaagaagaggaacctggacctggagaatgacatcctgtacatgagggcccaccaggccctgccccgggacagcgtggtggaggacctgcacctgcagaaccgctacctgcaggagaagctgcacgccctggagaagcagttcagcaaggacacctacagcaagcccagcatctctggaattgaaagtgatgaccactgccagcgggagcaggagctgcagaaggagaacctgaagctgagcagtgaaaatattgagctgaagttccagctggagcaggccaacaaggacctgccccggctgaagaaccaggtgcgggacctgaaggagatgtgtgagttcctgaagaaggagaaggccgaggtgcagaggaagctgggccacgtgcggggcagcggccgcagcggcaagaccatccctgagctggagaagaccatcggcctgatgaagaaggtggtggagaaggtgcagagagaaaatgagcagctgaagaaggccagcggcatcctgaccagcgagaagatggccaacatcgagcaggagaatgagaagctgaaggccgagctggagaagctgaaggcccacctgggccaccagctgtccatgcactatgagagcaagaccaagggcacagagaagatcatcgcagaaaatgaaaggctgaggaaggagctgaagaaggagacagatgctgctgagaagctgagaattgccaagaacaacctggagatcctgaatgagaagatgacagtgcagctggaggagaccgggaagaggctgcagtttgctgagagccggggcccccagctggagggcgctgacagcaagtcctggaagagcatcgtggtgaccaggatgtatgagaccaagctgaaggagctggagacagacatcgccaagaagaaccagagcatcacagacctgaagcagctggtgaaggaggccacagagcgggagcagaaggtgaacaagtacaatgaagacctggagcagcagatcaagatcctgaagcacgtgcctgagggcgctgagacagagcagggcctgaagcgggagctgcaggtgctgcggctggccaaccaccagctggacaaggagaaggccgagctgatccaccagatcgaggccaacaaggaccagagcggggctgagagcaccatcccagatgctgaccagctgaaggagaagatcaaggacctggagacccagctgaagatgtctgacctggagaagcagcacctgaaggaggagatcaagaagctgaagaaggagctggagaactttgaccccagcttctttgaggagattgaggacctgaagtacaactacaaggaggaggtgaagaagaacatcctgctggaggagaaggtgaagaagctgtctgagcagctgggcgtggagctgaccagccctgtggccgccagcgaggagtttgaagatgaggaggagagccctgtgaacttccccatctactag

SEQ ID NO: 217893 - DNA, 7446 bp, Artificial Sequence
  derived and/or modified sequence
atgccccccaacatcaactggaaggagatcatgaaggtggaccccgacgatctgccgcgtcaggaggagctggccgataatttgttaattagcctttccaaggtggaggttaatgagctgaagagcgaaaagcaagagaatgtaatacatctatttcgcatcactcagagcctgatgaagatgaaggcccaggaagtggaactggctctggaagaagtggagaaggctggcgaggaacaagccaagtttgagaatcagctgaagaccaaggtgatgaaattagagaatgagctcgaaatggcccagcaatctgccggaggtcgtgacacccggtttttgcgcaatgagatttgccagctggaaaaacagctggaacaaaaggaccgcgagctggaagatatggagaaggaactcgagaaggagaaaaaagttaacgagcagttggcccttcgcaatgaagaggctgagaacgaaaactcaaaactacgccgggagaacaagcgtcttaagaaaaagaacgaacaactgtgccaggatataatcgattaccagaagcagatcgattcacagaaagaaaccctactctcccgcagaggcgaagactccgactaccgctctcagctgtcaaaaaaaaactacgaactcattcaatatcttgatgaaattcaaacactgacggaggcaaacgagaagatagaggtccaaaatcaagagatgagaaaaaatctggaagagtctgtgcaggaaatggaaaagatgacagatgagtacaatagaatgaaagccattgtgcaccagacagataacgtcatagaccagctgaagaaagagaacgaccattaccagctccaagtccaggaacttactgatcttctgaaatctaaaaacgaagaagatgaccctattatggtggccgttaacgccaaggtcgaagagtggaaactaatcttgagctccaaagacgatgagatcatagaataccagcagatgctccataacctccgagagaaactgaaaaacgctcagctcgatgccgacaagtctaacgttatggcattgcagcaaggcatccaagagcgcgacagccagattaagatgctgacggagcaggtggagcaatacaccaaggagatggaaaagaacacttgtataattgaagatctgaagaacgagctccaacgaaataagggggcttctacactaagccagcagacacatatgaagattcagtctacactggatatccttaaggagaaaaccaaggaggccgaacgaaccgcagagctggctgaggccgacgcacgcgaaaaagataaggaactagtggaagctttgaaaagattgaaggattatgagagtggggtgtacggactggaggacgccgtggtggagattaagaattgcaaaaaccagattaagatcagagaccgcgagatcgaaattcttaccaaggagatcaataagcttgagcttaagattagcgatttcctcgatgagaacgaggcactaagagaaagggtggggctcgaacctaaaaccatgatcgatctgaccgagttccgtaactcaaaacatttgaagcaacagcagtatcgggccgagaatcagatactactgaaggaggcctccatagaatccctggaggaggaacgattggacctcaagaaaaagattcggcagatggcacaggaacgcggcaagcgtagtgcaacgtcgggacttaccaccgaagatctcaacctaactgagaatataagtcagggggatcgaatcagcgagagaaagcttgatctgctgagtctcaagaacatgtcggaggctcagtcaaagaacgaattcttgagtagagagctcatcgagaaggagagggatcttgagcggagtaggactgtaattgctaaattccaaaacaagctgaaggagctagtcgaagaaaataagcaactcgaagagggaatgaaggagatcctgcaggctatcaaagaaatgcagaaggatccagatgtcaagggaggagaaacaagcttaatcatcccctccttggaacggctggttaacgcaatcgaaagtaaaaatgcagaaggaatttttgacgcatccctgcatctgaaagcgcaggttgaccagctgaccggacggaatgaggaacttagacaagaactgagggagtcaagaaaggaggccatcaactactctcaacagctggctaaggccaatctcaaaattgatcacctcgagaaggaaacctcactgttgagacagagtgagggaagtaatgtggtgtttaagggaatcgatctgcccgacggcattgcgccgagtagtgccagcataatcaattctcagaatgagtacctgatacacctgctccaagagctggagaacaaggagaagaagctgaaaaacctggaagactctctggaggactacaatcgcaaatttgcagttatcaggcaccagcagagtttactgtacaaggaatacctctcggagaaggagacgtggaagacagagtccaagactattaaggaagagaaaaggaagctggaggaccaggtccagcaggacgctattaaggtaaaagagtacaataacctcctcaatgccttacagatggatagcgatgaaatgaagaaaatattggcagaaaattcgagaaaaatcaccgttcttcaggtaaatgagaagtcgctgattcgccagtacaccaccctggtcgaactcgagcggcagctgagaaaagaaaacgagaagcaaaagaacgagctgctgtcaatggaagccgaggtgtgcgagaagatcggatgcctccagcgattcaaagagatggcgatatttaagatagctgcattgcaaaaggtggtcgataactctgtgtctttgagcgagctggagctcgccaacaagcagtacaatgagttaaccgctaagtacagagatatactgcagaaggataatatgcttgtgcagcgtacatccaatcttgaacacttggagtgtgagaacatttcgcttaaggagcaggtggaaagcatcaacaaggagctggagatcaccaaggaaaaactgcatacaattgagcaggcctgggagcaggaaacgaagctgggtaacgagtcttcaatggacaaagccaagaagagcattactaacagcgacatcgtgtcaatatcaaaaaaaatcactatgctcgaaatgaaagagctgaacgaacgtcagcgagccgagcattgtcagaaaatgtatgaacatctgcgaacatccctcaagcaaatggaagagcggaacttcgaactggaaacaaagttcgccgaactgaccaagatcaacttggatgcacagaaggtggaacagatgctgcgcgacgaacttgctgactccgtgtctaaagcagtgtcggacgctgaccggcagaggatcctcgagctggagaagaacgaaatggagctcaaagtcgaagtgtccaaactgagggagattagcgatatcgcacgacgacaggtggaaattctcaacgcacaacagcagagccgcgacaaggaagtggagtcactgaggatgcagctgctcgattaccaggcccagagtgacgaaaagtccctgatcgccaagctccaccagcataacgtgtccttacagctcagcgaggccaccgctctcggtaagctggaatctattacctccaagctgcagaaaatggaagcatataatctgagacttgagcagaagctggacgaaaaggagcaggccctgtactatgcaagattagagggtagaaaccgggccaaacacttaagacagacgatccagagcctcagaaggcaattttccggggccctgcccctggcacagcaggagaaattttcaaaaacaatgatccaactccagaatgataagcttaaaatcatgcaggagatgaagaacagccagcaggagcatcggaacatggagaataaaacactggagatggagctaaaattaaaaggactggaggagctcatcagtaccctgaaagatacaaaaggcgcacagaaagtcatcaattggcacatgaagatcgaagagttaaggctgcaggagctgaagctgaatcgggaactggtgaaagacaaagaggaaatcaaatatttaaacaacattataagcgagtacgaacggacgatcagttcgctcgaagaagagatcgtccagcagaataaatttcacgaagaaaggcaaatggcgtgggaccagcgtgaagtggatctcgagagacagctggacatattcgatagacagcaaaacgaaatcctcaacgcggcccagaaattcgaggaggctacaggctctatccccgacccatccctgccgctcccaaatcaactggagattgcactcagaaagattaaagagaacatcagaattatcctggagacacgtgccacatgtaaaagcctggaggaaaagcttaaggaaaaggaatccgccctgaggctggccgagcagaatatcctttctagggacaaggttatcaacgaattgagattacgcctacctgcgaccgcagaacgagagaagctgatcgcagagctggggaggaaagagatggagccgaaatcccatcacacattaaagatcgctcaccagacaatcgcaaatatgcaagccaggctgaaccaaaaagaggaggtcctgaagaaatatcagcgtcttctcgagaaggcaagagaggagcagagggaaatcgtaaagaaacacgaggaggacctgcatatcctccatcataggctcgagctgcaggcagattccagcttgaacaaattcaaacagacagcttgggatttgatgaaacagtcacccaccccggtcccaacaaataaacattttataaggctcgccgagatggagcagaccgtagcggagcaggatgattccctcagctccctgttggttaagctaaagaaagtgagccaggaccttgagaggcagcgcgagattacagaacttaaggtgaaggagtttgagaacataaaattgcaactgcaggagaaccatgaggatgaagtaaaaaaagtgaaggctgaagtcgaagatctgaagtacctgctcgaccagtcccagaaggagtcacagtgtctaaagagtgagcttcaggcccagaaagaagccaactcccgagctccgaccaccaccatgagaaatttggttgaacgcctgaagagccagttagccctaaaggagaaacaacagaaagctctgagtcgtgccctgctggaattgcgggccgagatgacagccgctgccgaagagcgcatcatcagtgcgacgtcacagaaggaagcccacctgaacgtgcagcaaatcgtggatcgccatacacgggagcttaagacacaggtcgaggacctgaatgagaacttgctgaagcttaaggaggccttgaagacctcgaaaaatcgagagaattctctaacagataatcttaacgatctgaataacgaactgcagaaaaaacagaaagcctataacaagatattgcgagagaaggaagaaatcgaccaggagaatgacgaactgaaaaggcaaattaaacgcttgacgtcgggccttcaggggaaacccctgaccgacaataagcagtcactcatcgaagaattgcagcgtaaggtgaagaagctcgagaaccagcttgaggggaaggtggaggaggtcgatcttaagccaatgaaggaaaagaatgccaaggaagaactgattcgctgggaagagggaaaaaaatggcaggcaaaaattgagggaattcggaataagctgaaagagaaggagggggaagtgtttacactcacgaagcagttgaataccctaaaagatttgttcgccaaggcagataaggagaagttgacactccagagaaagctgaagacaaccggaatgacagtggaccaggttctcggaattcgtgccttggaatctgagaaggagctcgaagaactcaagaagcgcaacctggacctagagaatgacatcttgtacatgcgcgcccatcaggccttgcctagagatagcgtagtggaagatctccacttacagaacagatatctgcaagagaaattgcacgccctcgaaaagcagttcagcaaggacacctacagcaaacctagcatctccgggatcgaaagcgacgaccattgccagcgagaacaggagctccagaaggaaaatctaaaactgtcctcggagaacattgagttgaagtttcaattagagcaggccaataaggacctgccacggctaaaaaaccaagtcagagacctgaaggaaatgtgcgaattccttaagaaggaaaaggctgaagttcagcgcaaattgggccacgtacggggttctggcagaagtggaaagacaatcccagaactggagaaaaccattggactgatgaagaaagtcgtggaaaaggtgcaacgtgagaatgagcagctaaagaaggcttccggaatcctgacatctgaaaagatggcgaatattgagcaggaaaacgagaagctaaaagccgaactggagaaactgaaggctcatctggggcaccagctaagcatgcattatgagagtaagactaaaggaactgaaaagatcatcgcagagaatgagcgccttagaaaagaacttaagaaggaaacagacgcggccgagaaattacgtatagccaaaaacaacctcgagattttgaacgagaaaatgaccgtacaactggaggaaacagggaaacgccttcagtttgccgagtccagaggccctcagctggagggagctgactctaaatcttggaagagtatcgtggtcacaagaatgtatgaaactaagctgaaggagttggaaactgacattgcgaagaagaaccagagcatcaccgacctaaaacagctggtgaaagaagctaccgagagggagcagaaggtaaataaatataacgaggaccttgagcaacagatcaaaattctgaagcacgtgcccgagggagcagagacggagcagggactcaaaagagagctgcaggtcctgagactagcaaatcaccagctggacaaggagaaggccgagttaatacaccaaatcgaagccaataaagaccaatccggagccgaatctactattcccgacgccgatcagttgaaggaaaagatcaaggacctggagacccagttaaaaatgtcagatctggagaagcagcatctgaaggaggagattaagaagttaaagaaggaacttgagaactttgacccttctttcttcgaggagattgaagatttgaagtataactataaagaagaggtgaaaaagaatattctgctggaggaaaaagtgaaaaagctctcagagcagctgggcgtggagctcacatccccagttgctgccagcgaggagtttgaagacgaagaagaatcccctgtaaattttcccatttattag

SEQ ID NO: 217894 - DNA, 1650 bp, Artificial Sequence
  derived and/or modified sequence
aagatggcccagcagagcgccggcggccgggacacccggttcctgagaaatgagatctgtcagcttgagaagcagctggagcagaaggacagagagctagaagatatggagaaagagttagagaaggagaagaaggtgaacgagcagcttgccctgcgcaatgaggaagcagaaaatgagaacagtaagttaagacgcgagaacaaacgcctgaagaagaagaacgaacaactgtgccaagacattattgattatcagaaacagattgactcacagaaagagactctgttgagccggcgcggggaggacagcgactatcgtagtcagctgagtaagaagaattacgaactgatccagtacctcgacgaaattcagactcttactgaggccaacgagaagattgaggtccagaatcaggagatgcggaaaaatttagaagaatcagtacaagagatggagaaaatgacagacgaatataatcgcatgaaggccatcgtacatcagacagataatgtgatcgaccagctgaaaaaggagaatgatcactatcaacttcaagtgcaggagcttacggatttactgaagagcaaaaatgaggaggacgaccccatcatggtggcggtgaatgccaaagtggaggaatggaagttaatactgtcttccaaggatgacgagataattgaatatcaacagatgctccacaatttgcgggagaaactaaaaaacgcccagttggacgctgacaaaagcaacgtgatggctttgcagcagggcatccaggaacgcgactctcagattaaaatgctcactgagcaggtcgaacagtacacaaaggagatggagaagaatacctgtattatagaggatctgaaaaacgaactgcagcgaaataagggtgcaagtacgctctcccagcagacacatatgaagatacaatccactcttgacatccttaaggagaagacaaaggaagcagaaaggacagccgagctagccgaagccgatgcgagggaaaaagacaaggagctagtggaagcattaaagagactgaaggactacgagtccggtgtttacggtctagaagacgctgttgtggagattaagaattgtaagaaccagatcaagattagagatcgcgaaatcgagatcctgactaaggagatcaacaaactcgagctcaaaataagcgacttcctcgacgaaaacgaggctctgagagagagggtcggcctggaacccaagaccatgatcgatctgaccgagttcaggaactcgaagcacttaaaacaacagcaatacagggccgagaatcagatactactaaaggagattgagtcccttgaagaggagagacttgatctgaaaaagaagatacgccagatggctcaggagagggggaagcggtctgcaaccagcggcctcaccacagaggatctgaatctgacagaaaatattagtcaaggagaccgtatcagcgaacggaagttggacctgctgtctcttaaaaatatgtcagaagctcaatctaagaacgaatttctatcgcgagaactgattgagaaagaacgagacctggaaaggtcccgtaccgtcattgccaagttccaaaataagtgttaccggattaaagaatgccgtcgcaacctgtag

SEQ ID NO: 217895 - DNA, 7440 bp, Artificial Sequence
  derived and/or modified sequence
atgccccccaacatcaactggaaggagatcatgaaggtggaccccgacgacttgccacgtcaggaagagttggccgacaatctgctgatttctctgtccaaggtcgaggtgaatgagcttaagagcgagaagcaggaaaacgtgattcatttgttcagaatcacacaatctctgatgaagatgaaagctcaggaggtagagttggccctggaggaagtcgagaaggccggcgaggagcaagcaaagtttgaaaaccaactaaagaccaaagtgatgaaacttgagaacgagcttgagatggctcaacagtctgccgggggccgagacacccgcttccttaggaatgaaatctgtcagcttgagaaacagctcgagcagaaagatagggaattggaggacatggagaaagagctggagaaagagaaaaaggtgaacgaacaactggctttaagaaatgaagaggcagagaatgagaattctaagctccggagggaaaacaaaagactcaaaaaaaagaatgagcagctctgtcaagacattatagactatcaaaagcagatcgattcccagaaagaaactcttcttagcaggagaggcgaggatagcgactaccgcagccagctcagcaagaagaattatgagttaattcagtatctggatgagatccaaactctaactgaagctaatgagaagatagaggtgcaaaaccaagagatgagaaaaaacctggaggaaagcgtgcaggagatggagaagatgacagacgagtacaataggatgaaggcgatcgtccatcagaccgacaacgttatcgatcagctcaagaaagaaaacgaccactatcaactgcaggtgcaggaactaacggaccttttgaagagcaagaacgaggaggatgatcccatcatggtggcggtgaacgcgaaagtcgaggagtggaaactcattctgagctcgaaagatgacgagataatagaatatcagcagatgctccataatcttcgcgagaagctgaaaaacgcccagctagacgccgacaagagcaatgtgatggcccttcagcaaggtattcaggagcgagattcacagatcaagatgttaaccgaacaggtggaacagtacaccaaagagatggagaaaaacacttgcattattgaagacttgaagaacgaactgcagcgcaataaaggagctagtaccctctcacagcaaactcacatgaagatccagtctactttggatattctaaaagagaaaactaaagaggccgaacggacagcggagcttgcggaggccgatgcgcgggagaaagataaggaactggtggaagctctaaagaggttgaaggattatgagagcggcgtgtatggtctggaggacgccgtggtcgagattaagaactgtaagaaccagatcaagatccgggaccgggaaatcgagattctgacgaaggaaataaataagttagagcttaagattagcgactttctggacgaaaatgaagccctcagggaacgcgtgggtctcgaacctaagacaatgatcgacctgaccgaattcagaaactcaaaacacctgaagcagcagcaatatcgtgctgaaaaccagatactcttgaaggagatagagtcgctggaagaggagcggctggatctgaaaaagaaaattcggcaaatggcccaggaacgggggaaaaggagcgcaacaagcggccttactaccgaggatctcaacctcaccgaaaatatcagccagggagatcgcatctccgagcgtaaacttgacctcctgtcacttaagaacatgtctgaagcccagtctaagaatgaattcctgtctcgagaactgattgaaaaagaacgggacctggaacggtctaggacggtgattgccaaattccagaacaagcttaaagaattggtcgaggaaaataagcagctggaagaggggatgaaagagatactgcaggctatcaaggaaatgcaaaaagaccccgacgtgaagggaggggaaacaagcctcattatcccttcactggaaagactggttaatgctatcgagtctaaaaacgccgagggcatctttgatgctagcctgcatcttaaggcccaagttgaccaactcacaggccgcaatgaagagctccgccaagagctccgggaaagccggaaagaggctatcaattactcacagcagcttgcgaaggcaaacctgaaaattgatcacctagagaaggagaccagcctcttgcggcagtcagagggaagcaacgtggtcttcaagggtattgatctacccgacgggatcgcaccgtccagtgccagcattataaactctcagaacgaatatctgatccacctgctacaggagttggaaaataaagagaaaaagctcaaaaatctggaagactccctcgaagattacaacagaaagttcgcagtcattcggcatcagcaaagcttactgtacaaggagtacttgagtgagaaagagacgtggaaaacagaatcaaagaccataaaggaggaaaaaagaaagctcgaagatcaggtgcaacaagatgccattaaggtgaaagaatacaataacctgctcaacgccctgcagatggactccgatgaaatgaagaagattctggcggaaaactcccgaaagataaccgtgctgcaagtgaatgaaaaatcgctgatccgccagtacaccacactggtggagttggaacgccagctgcggaaggaaaacgaaaagcagaagaatgagctgttaagtatggaggcggaagtgtgtgaaaaaattgggtgcctccagagattcaaagagatggccatctttaagatcgcagctctccagaaggtcgtggacaacagcgtcagtctgagcgagcttgagctagccaacaagcaatataacgaattaacagcaaaatatcgcgacatactccagaaggataatatgctcgtgcaaaggacttccaacttggagcacctggaatgtgaaaatatcagtttgaaagagcaggtggaaagcattaataaagaactggagatcaccaaggagaaactgcacacaatcgagcaggcatgggagcaagagactaaactaggcaacgagtcttccatggacaaggccaaaaaatccatcaccaactcagacatcgtgagtatcagcaagaaaatcaccatgttggaaatgaaggagcttaatgagcgccaaagagctgaacactgccaaaagatgtacgaacacttacgcaccagtttgaaacagatggaagagagaaattttgagttagagacaaaatttgctgaactaactaaaataaacctggacgctcagaaggtggaacaaatgctccgcgacgagttggcggatagcgtgtccaaagcagtgtccgacgccgaccggcagagaatcttggaattggagaagaacgaaatggagctcaaggttgaggtcagcaaattaagagagataagcgatattgcccgtagacaggtagaaatactgaacgcccagcagcagtctcgggacaaggaggtggagtccctgcggatgcagttgctggactaccaggcacagtccgatgaaaaatccctgatcgcgaagctccaccagcacaatgtctctctgcagttgagcgaggcgactgcccttggtaagctcgagagcatcaccagtaagctgcagaagatggaagcctataacctgcgactcgagcagaagctcgacgaaaaggagcaggccttatactacgcccgcttggaggggagaaaccgcgcaaaacacttaaggcagacaatccagtccctgcgtcgtcagtttagtggtgctctgcctctcgcccagcaggaaaagtttagcaaaaccatgatccaactacagaacgataagcttaagattatgcaggagatgaaaaattcacaacaggaacatagaaatatggagaataagactttagagatggagctaaagctgaagggcctagaagaactaattagcactctaaaagatactaaaggggctcagaaagtcatcaactggcacatgaaaatagaagagttacgtttgcaggaattgaaattgaaccgcgagctggtgaaagacaaggaggagatcaaatacttgaataacatcattagcgaatatgaacgcacaatcagcagcctggaggaagaaatagtgcagcagaataaatttcatgaggagaggcagatggcctgggaccagcgcgaagtggacttggagcgtcagttggacatttttgatcggcagcaaaacgagatactcaacgccgcacaaaagttcgaggaagcaaccgggagcatcccagacccaagcctcccgcttccaaaccaactggagattgctctccgcaagatcaaagagaatattagaattattcttgagacccgggccacatgtaagtctctggaggagaagttaaaggaaaaagagtcagcgttacgtcttgccgagcagaatattctatcgagagacaaggttataaacgaactgaggctccggctgcctgcgaccgctgaacgggagaagctgattgccgagttaggtaggaaggaaatggagccgaaaagccatcatacactgaagattgcccaccagaccatcgccaacatgcaggctcgactgaaccagaaagaagaggtgctaaagaagtatcaaaggctgctcgagaaggccagagaggagcagagggagatcgtgaagaaacacgaggaggacctacacattctgcaccacaggctggagttacaggcagattcctcactgaataaatttaagcagacagcctgggatctgatgaaacagagtcctacccctgtccccactaacaaacattttataaggctcgccgagatggagcagacagtcgccgaacaggatgattcattaagttctctgctcgtgaaattaaagaaggtctcccaggatctagaaagacagcgagagatcacagaactcaaggtgaaagagttcgagaacattaaactccagctgcaggaaaatcacgaggatgaagtgaagaaagttaaggccgaagttgaggatttgaagtatctgctggaccaatcacagaaggagtcccagtgtttgaaatctgagttgcaggcccagaaggaagcaaacagcagagctccaaccaccacaatgaggaatttggttgaaaggcttaaatcccagctggccttgaaagaaaaacaacaaaaggccctcagcagggccctgctggagctgagggcagagatgactgctgccgcagaggaacgcatcatatccgccaccagccagaaggaggctcacctcaatgtgcagcagattgttgataggcatacacgggaacttaagacacaggttgaggacttaaatgagaacctgctgaagcttaaagaagccctgaagacctccaaaaatagggaaaacagcctgactgataacctaaatgaccttaacaacgaactccaaaagaagcagaaagcatacaataagatccttagagagaaagaagagatcgatcaggagaatgacgagcttaaaaggcagatcaagcgtttgacttcaggactccagggaaagccactgaccgataataagcagagcctgatcgaagaattgcagagaaaagtgaaaaagttagagaatcagctggaaggtaaggtggaagaggtggatctgaaaccaatgaaagaaaagaatgccaaggaagaattgatcagatgggaagaggggaagaaatggcaggctaaaattgaggggattcgcaataagctcaaggaaaaggagggggaagtcttcacgttgaccaagcagctgaacacccttaaagatctatttgctaaagcagacaaggagaagttgactctccagcgcaaactcaagactactggcatgactgtggaccaggtcttggggattagagccctggagagcgaaaaagaattagaagaactgaaaaagcgcaatcttgatctggagaatgacatcctgtacatgagagctcaccaagcgctgccacgtgattctgtcgtggaagacctccatctccagaatcgttatctccaggaaaaattgcacgctcttgagaaacagttctccaaggacacatattctaaaccttctatatctgggatcgagtctgatgatcactgtcagagggagcaggaattacagaaggaaaatctgaaattatcttcagaaaatatcgagctgaagtttcagcttgagcaggcaaataaggatctcccccggctcaagaatcaggtgcgcgacctcaaagagatgtgcgaatttttgaaaaaggagaaagctgaagtgcagaggaaactgggccacgtgagagggtctggcaggagcggcaagaccattccagaattagagaaaactattgggttgatgaagaaagttgtcgaaaaagtacaacgagagaatgaacagcttaagaaagctagtgggatcctaacatccgagaagatggccaacattgagcaggaaaacgagaagttaaaggctgaactagagaagctaaaagcccatctaggacaccagctctccatgcactacgagtctaagaccaaaggaacggaaaagattatcgcagagaatgagaggctaaggaaggaactaaagaaagagactgatgcagcagagaaactgcgaatcgctaaaaacaatcttgaaatattgaacgagaagatgacagtgcagctggaggaaacaggtaaacgcttgcagttcgccgagtctcggggccctcagttagagggagccgactctaagtcatggaaaagtatcgtagtcacacgaatgtacgagaccaagctcaaggagttggagacagatatcgccaagaagaatcagagcataactgatctcaagcaactggtgaaggaagcaaccgaaagagagcaaaaagtgaataagtataacgaggatctggagcagcaaataaagatattaaaacatgtgccggaaggggcagagacagagcaggggttgaaacgggagttgcaagtgctcagactcgctaaccatcagttagacaaggagaaagccgaactcattcatcagattgaggccaataaggatcagtctggagctgagtctaccatcccagatgctgatcagctcaaagaaaagatcaaagatttggagacacagctaaaaatgtccgacctggaaaagcagcacttaaaagaggagatcaagaagctaaagaaggagctggagaatttcgacccttcatttttcgaagagatcgaggatctcaaatacaattacaaggaggaagtgaagaagaacatccttctggaagagaaggtgaaaaaactctctgagcaactgggcgtggagctgacgtcacccgtggccgcctccgaggaattcgaggacgaagaagagtctccagtcaacttccccatctattag

SEQ ID NO: 217896 - DNA, 7445 bp, Artificial Sequence
  derived and/or modified sequence
atgccgcctaatattaactggaaggagattatgaaggtggaccccgatgatctcccaagacaggaagaactcgccgataatttactcatctctctttcaaaagtggaggtgaatgaactcaaaagtgagaagcaggaaaatgtgatccatctatttagaattactcagtccttgatgaagatgaaggctcaagaagtggagttagcgctggaagaggttgaaaaggccggtgaggagcaggcaaagttcgagaaccagcttaaaaccaaagttatgaaacttgaaaatgaactggaaatggctcagcagtctgctggagggcgtgacacaagattcctgagaaatgagatctgccagctagagaaacaactcgagcaaaaagaccgggaattagaggacatggagaaggagctcgagaaagagaaaaaagtcaatgagcagctagccttacggaacgaggaagcagaaaatgaaaactccaagctgcgccgtgagaacaaacgactcaagaagaagaatgagcaactctgccaagacattattgactatcaaaagcagattgactcacagaaagaaaccttgctgtcacgcagaggtgaggatagtgactaccggtcacaactatcaaagaaaaactatgagctgatccagtacctggacgaaattcagacccttacggaggcaaacgagaagattgaagttcagaatcaggaaatgagaaaaaatctggaagagagtgtacaggagatggagaaaatgaccgatgagtacaacaggatgaaagctattgtgcaccaaactgataatgtgatcgatcagctaaagaaagagaatgaccactatcagctccaggtgcaggaactcacagacctacttaaatcaaagaacgaggaggacgatccgatcatggtggcagtgaatgcaaaagtcgaggagtggaaacttattctctcatcaaaagatgacgagattatcgagtatcaacagatgctgcacaatttaagggagaagctcaagaatgcccagctggatgccgataagtccaatgtgatggccttgcagcaggggattcaggaaagagactcccagattaagatgctaactgagcaggtcgaacagtacaccaaggagatggagaaaaacacctgcattatagaggacctgaaaaatgaactccagcgtaataagggcgcaagtaccttatcccagcagacccatatgaagatccagagtactctagacatcctgaaagagaagacaaaagaggccgaaagaaccgccgagctggctgaggctgacgcaagagagaaggacaaagagctggtcgaggccttgaaaaggctgaaggactatgagagcggtgtttacggcctggaggatgcagttgtggagataaagaactgtaagaaccaaatcaaaatcagagacagagaaattgagatcttgaccaaagagataaacaaactggaattgaaaatctccgacttcctggacgaaaacgaggccttgcgtgaaagagtgggattagagccaaagaccatgattgatctcaccgagttccggaacagtaaacatcttaagcagcaacagtaccgcgcagagaatcagattctgttgaaggaagcatcgatcgaaagtctagaggaggaacgcctcgacctaaagaaaaaaatccgacagatggctcaggaaaggggaaagagaagcgctacatcaggtttgaccacggaggacctaaacctgactgagaatatttcccaaggcgatagaatatctgaacggaagctagacctgctgtctttaaaaaacatgtctgaagctcagagcaagaatgaattcctgtcaagagaactcatcgagaaagagcgcgatttggaacgttccaggacagtgatcgccaagttccagaacaagcttaaagaactcgttgaggaaaataagcagctggaggagggtatgaaagagatcttacaggcaattaaggagatgcagaaggaccccgacgtcaagggcggagaaacatccttgataatccctagcttggagcggctcgtcaacgcgatcgagagcaagaacgcagagggcattttcgatgcttccctgcatctgaaagcgcaggtcgatcaactcactggacgcaatgaggaacttaggcaggaactgcgcgagagccggaaggaggctattaactacagccaacaacttgctaaagcgaacttgaagatcgaccatcttgaaaaagagacatctctgttgaggcagtcagaaggatcaaatgtggtgtttaaagggatcgatctgcccgacggaatcgccccaagcagcgcatctattataaacagtcaaaatgaatacttgatccacctccttcaggagctggagaacaaagagaagaagttaaagaatttggaggactctttggaggactataatcgaaagtttgccgttattcggcaccagcagagcctcctgtacaaggaatacttgtcagaaaaggagacctggaagaccgaatcaaagactataaaggaagaaaaacgcaagctggaggaccaggtgcagcaagatgccattaaggtcaaggagtacaataacctgctgaatgccttgcagatggattccgacgagatgaagaagatactggctgaaaactctcggaagattaccgtgctgcaagtcaatgagaagtctctaatccgacaatacaccaccctcgttgagctggagagacagttgcggaaggaaaacgagaaacagaagaacgagctcttatctatggaagctgaggtttgtgagaaaatcggttgtctgcaacggtttaaggagatggctatctttaagattgcagctttacaaaaggtggtggacaacagcgtgtcactatctgaactcgaacttgctaacaagcagtacaatgagctcactgccaaatatagagatattcttcagaaggataatatgctcgtgcagcggacgtctaaccttgagcatcttgaatgcgagaacatctctctaaaggagcaagtagaaagtatcaataaggaactggagatcaccaaagaaaagctccatacaattgaacaggcctgggagcaagaaaccaagctgggcaacgagagcagcatggataaggcaaaaaaatctattaccaactctgacattgtctccatctctaaaaagatcaccatgctagagatgaaagagctcaatgaacgacagagagctgaacattgtcaaaaaatgtacgaacacctgagaacaagtctcaaacagatggaagagagaaattttgaactggaaaccaaatttgccgagcttacaaagatcaacttggatgcgcagaaggttgaacagatgctccgtgacgaactggccgattccgtgtccaaagcagtgagcgatgccgatagacagagaatcctggagctggaaaaaaatgaaatggagctgaaggttgaggttagcaagctccgcgagatcagcgacattgccagacgtcaggttgagattttaaacgcacaacagcaatcacgtgataaggaggtcgaaagtctgcggatgcagttgttagactaccaggcgcagagtgatgagaaatcgcttattgcaaaactgcaccaacacaacgtcagcctgcagctgagtgaagcaacagctctggggaaactagaaagcataaccagtaagttgcagaagatggaggcatacaacctgagattagaacagaagctagacgagaaggaacaggccttgtattatgcacggcttgagggcagaaatagggcaaagcatctacgtcaaacgatccagtccctgcgccgacagtttagtggagctctgccccttgctcagcaggagaagttcagcaagaccatgatccaactgcagaatgacaaactgaagattatgcaggaaatgaaaaattcacagcaggagcaccgcaacatggaaaacaaaactcttgaaatggaattgaagctgaaggggctagaggaactgatctccactctgaaggataccaagggagctcagaaagtgattaactggcacatgaagatcgaggaactgaggctccaggaactgaaactcaatcgggagctcgtgaaagacaaggaggaaattaagtatcttaataacattatcagtgaatacgagcggaccattagctctctagaagaagaaatcgtgcagcagaataagtttcacgaggagaggcagatggcctgggatcagcgcgaggtagatttagagcggcaactggatatttttgacagacaacagaacgagatactcaacgccgcacaaaagttcgaggaagccaccggatcgatcccagatccctctctgccacttcctaaccagttggagattgccctccgcaagattaaagagaatatccggatcatattggaaacacgggctacttgtaaatcactggaagagaaactcaaggagaaagagagtgctctgcgattagccgagcaaaacattctatctcgcgacaaagtgataaatgaactgagactaagactgccggcaactgccgagcgcgaaaagctaattgccgagttgggcagaaaggaaatggaaccaaaaagccaccataccctcaaaatcgcccaccaaacaatcgccaacatgcaggcacgccttaatcagaaggaggaggttctcaaaaagtatcaacggctgctggaaaaggcaagggaggaacagcgcgaaattgtgaaaaaacatgaggaggaccttcacattctgcatcaccggctggagcttcaggctgacagttccctcaataaatttaaacagaccgcgtgggaccttatgaaacaaagccctacgcctgtgcccaccaataagcacttcatcaggctggctgaaatggagcagaccgtggccgaacaggacgattcgctcagcagcttgttagtaaaattaaagaaagtttcccaggatctggagcgacagagagagatcaccgagcttaaagtgaaggaattcgagaacattaagctccagctgcaggaaaaccatgaggatgaggtgaaaaaggtgaaagctgaagtcgaggatctaaaatatttattagaccaatcccagaaggaatctcagtgtctgaaaagcgagctgcaggctcaaaaagaggctaactctagggccccaactacaactatgcgcaatctggtggagcggctgaagtctcaactcgcgttgaaagagaagcagcagaaggcattgagcagggcgctgctcgagctgagagcagagatgacagcggctgccgaagaacggatcatctcagctacctcccagaaggaagcacacctgaatgttcagcaaatagtcgatcgccataccagagaacttaagacacaggtagaggatcttaacgagaacctactcaaactcaaagaggctttaaagacatcaaagaatcgcgagaatagtctcaccgataacctcaacgacctgaataatgaactgcagaaaaagcagaaagcttacaataaaatcttgcgggaaaaagaggagatcgatcaggagaacgatgaactgaaacgccagatcaagcgcctgacttccggactgcaggggaaaccacttacagacaacaaacaaagcttgatagaggaattgcaaagaaaagtcaaaaagttagaaaatcagttagaagggaaagtcgaggaggtggatttgaagccgatgaaagagaagaacgcaaaggaggagcttatcagatgggaagaagggaagaaatggcaggccaaaatcgaaggaatccgtaacaagctgaaggaaaaagaaggcgaggtttttacactcacgaaacagctcaataccttgaaagacctctttgctaaagccgacaaggaaaaactaacattgcagaggaaactcaagacaactgggatgacagtggatcaggtgcttggcatccgggctctcgagtctgagaaggaacttgaagagctcaaaaaacgcaatctcgacctggagaatgacatcctctacatgagggcccatcaagcactgcccagagattctgtcgtagaggatctccatttgcaaaaccggtacttacaggaaaaactgcatgccttggagaagcagttctcaaaggatacgtattccaaaccctctatctcaggaatagaatcagacgatcattgtcagagagagcaggaactccaaaaggaaaacctgaagctctcatcagaaaacatagaactgaagttccagctggagcaggccaataaggatctgcccagactgaaaaaccaggttagggacctcaaagaaatgtgtgagtttctaaagaaggaaaaagccgaagtccagcgcaagctgggacatgtgcgtggcagcgggagatcagggaagaccattcctgagctggagaaaactatagggcttatgaagaaggttgttgagaaggtacaacgggagaacgaacagctcaagaaagcttctggcatacttacatctgaaaagatggctaacatcgaacaggaaaacgaaaagctgaaggctgagctggagaagctcaaggcgcatttgggccatcagcttagtatgcactacgaatcaaagacaaagggcaccgagaagatcattgccgagaatgaaagactgcgaaaagagctgaaaaaagaaacagatgctgcagaaaagctgagaattgcaaaaaacaacttagaaattcttaatgagaaaatgacagtacagcttgaagagacaggcaagcgtctgcagttcgctgaatcacggggtccccagctggagggcgctgacagcaaaagctggaaatcgatagtcgtcaccagaatgtacgagaccaaattgaaggaactggaaaccgacatcgcgaaaaaaaatcagtcaataactgatctaaaacagttggttaaagaagctacggagcgagagcagaaggtgaacaagtacaatgaggacctggagcagcagataaagattctgaagcacgtccccgaaggggctgagactgaacagggtctgaagagagagttgcaagtgctgcggttggctaaccatcaattggataaagaaaaagctgagttaattcatcagattgaagctaacaaagaccagtcaggcgctgagagcacaatcccagacgctgatcagctcaaggaaaagattaaagatctggagactcagttgaaaatgtccgatttggagaagcagcacctaaaggaggaaattaaaaaattgaagaaagagcttgaaaattttgaccccagcttcttcgaggagattgaagacctcaaatacaactacaaggaggaggtgaagaaaaacattttgttagaggaaaaggtcaaaaagttgtccgagcagttgggagtcgagctcacaagccccgtggcagcaagcgaggagttcgaagacgaagaagagagtcccgtgaactttcctatctacta

SEQ ID NO: 217897 - DNA, 1650 bp, Artificial Sequence
  derived and/or modified sequence
aagatggctcaacaatctgccggtggcagagacactcggttccttaggaacgaaatatgtcagctggaaaaacagctggagcagaaggacagagagttggaggatatggagaaagaactggagaaggagaagaaggtaaacgagcagctagcgttgcgcaatgaagaggcggaaaatgaaaactctaagctgcggagggagaataagagattgaagaagaagaacgagcagctctgtcaggacatcatcgactatcagaagcagattgactcacagaaagagaccctgctgagtagaaggggcgaagactcagattatcggagccagctctctaagaagaattacgagttgatccagtacttagatgagattcagactcttacggaagcgaatgaaaagatcgaggttcagaatcaagaaatgagaaagaacttggaggagagtgtacaggagatggaaaagatgactgatgaatataaccggatgaaggcaatagtgcaccaaacagacaatgttatcgatcagctcaaaaaggaaaacgaccattatcagttgcaggtacaggagcttaccgacctgcttaagagcaagaacgaagaagatgacccgattatggtggccgtgaacgccaaggtggaagaatggaagcttatactgagctctaaggatgacgagataattgagtaccagcagatgctccacaacctcagggaaaagctgaagaatgcacagctggacgccgacaaaagcaatgtgatggccctccagcagggcatccaggaacgtgactcccagattaagatgctgacagagcaggtcgagcaatataccaaagaaatggaaaaaaatacgtgtattatagaagatttgaaaaacgagctccagcgtaataagggagcctccaccctcagccaacagactcacatgaagattcagagcaccctggacatcctaaaagagaagacaaaagaggcggagcgcactgcagagctcgctgaagctgacgctcgtgagaaggacaaagagctcgtcgaggcactaaagagactgaaggactatgaatctggggtgtacggccttgaggatgcggtcgtggagattaaaaactgtaaaaaccaaatcaagatcagagacagggagatcgagatcctgacaaaggaaattaacaaactggaactaaagatatcagattttctcgatgagaatgaagctctgagggaaagagttggacttgaacccaagaccatgattgatcttaccgagttccgaaattccaagcacctgaaacagcagcagtatcgtgcagagaatcagatcctgctcaaggagatcgagtccctggaggaagaaaggctggacctgaaaaagaagatacgacagatggcacaggagaggggcaaacgttcggcgacttccgggctcaccacggaggatcttaacctcacagaaaatatttcccagggagatcggatttccgaaagaaagctggacttgctgagcctaaagaacatgtcggaggcacagagtaaaaacgaattcctctcacgcgaattgattgagaaggagagggatctggagcggtctcgcaccgtgatcgccaagttccagaataaatgctaccgaataaaggaatgtaggcgaaacctctag

SEQ ID NO: 217898 - DNA, 7439 bp, Artificial Sequence
  derived and/or modified sequence
atgccgcctaacattaactggaaagagattatgaaggtcgatccggacgacctgcctagacaggaggagctggccgataacttgcttatctctctctccaaggtggaggtcaacgagctcaaaagcgaaaagcaggaaaacgtgattcacttgttccggatcacacaaagccttatgaaaatgaaggcccaagaagttgagctcgccttggaagaagtggagaaagcgggtgaagagcaggctaaattcgaaaaccaactcaagactaaagttatgaaactcgaaaatgaactggaaatggctcaacaatctgccggaggaagggatacccggttcttacgtaatgagatatgccagttggagaagcagctcgagcagaaggatcgtgaactcgaagatatggaaaaagagttggaaaaggaaaaaaaggttaacgaacaattagcgttacgtaatgaggaggccgagaatgagaactcaaaactgagaagagaaaacaagcgcttgaaaaagaaaaatgagcagctctgtcaggatattatagactaccagaaacagatcgatagtcagaaggaaaccctgttaagccggagaggcgaagatagcgactatcgatcacagctgtcaaaaaaaaattatgagttaatccaatatctcgacgagatccagacattgacagaagccaatgaaaagatagaggtgcagaatcaagagatgaggaaaaatctcgaggagagtgttcaggaaatggagaagatgaccgacgagtataataggatgaaggcaattgtccaccagaccgataatgtaatcgaccaactcaaaaaggaaaacgatcattatcagctccaagtccaggagctgaccgaccttctgaagtcaaagaatgaagaggacgaccccattatggtggccgtgaacgctaaggttgaagagtggaagctcatactttcaagtaaagatgatgaaataattgaataccagcagatgctccataatctgcgagagaagttgaaaaacgcacagctagatgcagataagagcaacgtcatggctctgcagcaggggattcaagaaagagactcccagataaaaatgctaacagagcaggtcgaacaatacaccaaggaaatggaaaaaaatacatgtattattgaggatttaaaaaatgagctgcaacgcaacaaaggagcctctaccttaagtcagcagacacatatgaaaattcagagcactttagatatcctcaaagagaagaccaaagaggcagagaggacagccgagctcgccgaagctgacgctagggaaaaagataaggagcttgtggaggccttaaaaagattaaaagactacgaatcaggggtgtatgggctggaggacgcagtggtcgagattaagaactgcaaaaaccagataaagatacgtgaccgggagatagaaattctcactaaagaaataaataaactggagttgaaaatctctgatttcctggatgagaatgaagccttacgcgaaagagtgggcctcgagccaaagaccatgattgatctgaccgaatttagaaacagcaaacatctcaagcaacagcagtatcgtgcagagaaccaaattcttttaaaagagattgagagtctcgaggaagagcgattggatctcaaaaaaaagattagacagatggcccaagagcgcggtaaacggtccgccacaagcggcctcaccactgaggacctcaacctgacagaaaacatcagtcaaggggacagaatttctgagcgtaagttagacctgctctccctgaaaaatatgtccgaagcccagtcaaagaacgagttccttagtcgtgaactgattgaaaaggaacgagacctcgaaaggtcgcgtaccgtgattgccaaatttcagaataagctcaaagagctcgtggaagagaacaagcagctggaagagggtatgaaagagattctgcaagcaatcaaggagatgcagaaagacccagacgtgaaagggggtgaaacttcactcatcatcccgagtcttgaacgtctcgttaacgcaattgagtccaaaaatgcggagggtatcttcgacgcctcgttgcacttgaaggctcaggtagatcaactcacgggcagaaatgaggaactgcgccaggagctgagagaaagcaggaaggaggccataaattatagtcaacaactggccaaagcaaatttgaagatcgaccatttagaaaaggagacatctctactgcgtcaatctgaaggttcgaacgtggtctttaaggggatagacctccccgatggaatcgccccatcttcagcctcaatcatcaacagtcagaatgaatatcttatccacctgctacaggagctggagaacaaggagaaaaaactaaagaatctcgaggactctttagaagattacaaccgcaaattcgccgtcatcaggcaccaacagtccttactgtataaggaatatctgtctgagaaagagacgtggaaaacagaaagcaaaaccattaaggaggagaaaaggaaacttgaagatcaggtccagcaggacgcaatcaaggtgaaggagtacaacaacctcctcaatgcactgcaaatggactcggacgagatgaagaaaatcctcgccgagaactctcggaaaatcactgtgcttcaagtaaacgagaaatctcttatccggcagtacaccacactggttgagctcgagcgtcaacttagaaaggaaaacgagaaacagaagaacgagctgttgagcatggaggctgaggtatgcgagaaaatcggttgtctccagaggtttaaagagatggcaatctttaaaattgccgcattgcaaaaagtggtggataattccgtgagtctttcggagctggaactggctaacaaacaatataatgagcttaccgcgaaataccgggatatcctacagaaggataacatgcttgtccagcgcacgagcaatttggagcatctcgagtgtgagaacattagtctgaaagaacaggtcgagtcaattaataaagaactcgaaataacaaaagaaaaactgcacaccattgagcaagcatgggaacaggagacgaaattggggaatgaatcaagtatggataaagccaagaaatctataacaaactccgacatcgtgtcaatttccaagaaaatcacgatgctggagatgaaggaactgaacgagaggcaaagggcagaacactgccaaaagatgtacgaacacctgcggacttcgctgaaacagatggaagagcggaacttcgaacttgaaactaaattcgctgagctcacaaaaatcaacttggatgcccaaaaagtggagcagatgctgcgtgacgagttggcggactctgtctctaaagccgtgagcgacgccgatcgacagaggattctagagctggagaaaaacgagatggaactgaaagtggaggtatcaaagctgagagagatctctgatatagccaggcggcaggtggaaatcttaaacgcacagcagcagagtcgggacaaagaggtcgagagcctgcgcatgcagctactggattatcaggctcagtccgacgaaaaatcgcttatagcaaagctgcaccagcacaatgtgagccttcaactaagtgaggccacagccctcggaaagcttgagtccattacaagcaagttgcagaagatggaggcatacaacctgcgcctggagcagaaacttgatgagaaagagcaggctctgtactatgcaaggcttgaggggagaaatagagccaaacatctccggcagaccatccaaagtctaaggaggcaattctctggagccttaccacttgctcagcaagaaaagttttccaagactatgatccagctacagaatgataaactgaagatcatgcaggaaatgaaaaacagtcagcaggaacatagaaacatggaaaacaagacgttggagatggagcttaagctcaagggacttgaagagcttatctccaccttgaaggataccaaaggtgcacagaaggtaattaattggcatatgaaaatcgaggagctcagattgcaagaactgaaattgaaccgggagctcgtgaaagacaaggaagaaataaaatacctgaacaacattatctctgaatacgaacgcactattagtagcctggaagaagagatcgtacagcagaacaaattccatgaggaacggcagatggcctgggatcaacgcgaagtagacctggaaagacagttggatatctttgaccggcaacaaaatgagatcctaaacgccgctcaaaagtttgaggaggccacagggagtatacccgacccgtctctaccactgcccaatcagctggaaatcgccctccggaaaattaaggagaacatccggattatcctggagactagagcaacctgtaaatctctggaggagaaattgaaggaaaaggaaagcgccctgcgcctcgccgaacagaacatcttgagccgggacaaagtcattaacgagctccgcttgcggctgcccgcaaccgctgagcgtgagaagctcatagccgaactcggacgtaaggagatggagcctaagtcccatcataccctcaagattgcacaccagacaatcgctaacatgcaggcgaggttaaatcaaaaggaggaagtacttaaaaagtatcaacggctgttggaaaaggccagagaggagcagagggagatagtcaaaaagcacgaggaggacctacacatcctgcatcatcgtttagaacttcaggccgactcctcactcaataagtttaaacaaactgcatgggatctgatgaagcaatcccccacccccgtaccaaccaacaagcatttcattagactcgcggaaatggaacaaacagtcgccgagcaggacgacagtctgtcatcccttttggtgaaactcaagaaagtgagtcaggatctagagcgtcagagagagatcactgagcttaaggttaaggaatttgagaacatcaaactgcagctgcaagagaatcatgaagacgaggtcaaaaaggttaaagctgaggtggaagacttgaagtaccttctggatcaaagtcagaaggagtcacagtgtttaaagagtgaactacaagcgcagaaggaggccaatagcagagctccgacaacaaccatgcgtaacctggttgagaggctgaagtcacaacttgctttaaaagagaagcagcaaaaagccctcagcagggccctgctggaattgcgcgcagaaatgaccgccgctgccgaggaacggataatttctgccacttcgcagaaagaggcacacttaaatgtgcagcaaatagttgaccggcacacccgtgaattgaaaactcaagtagaggatctcaatgagaacctgctcaagctgaaggaggccctgaagaccagcaaaaacagggagaatagcctgaccgacaatctgaatgacctgaataacgaactacagaagaaacaaaaagcctacaacaagattttaagagagaaagaggagatcgaccaggagaacgacgagcttaagagacagattaaacgcctgacttcgggcctgcagggtaaacctcttaccgataacaagcaaagcctgattgaagaactccagcgcaaagtaaaaaaacttgagaatcagctggagggaaaggttgaagaagtggatcttaagccaatgaaagagaaaaacgccaaggaggagctgatacggtgggaggaaggaaaaaaatggcaggccaagattgagggtatccgtaataaactgaaagagaaagagggggaggtctttacactgactaagcaacttaataccctcaaagacctgttcgccaaggcagataaggagaagctgacccttcagcggaagctgaaaaccacaggtatgacagtcgaccaagttctgggcattcgagccctggagagcgagaaagaacttgaggaattgaaaaagaggaacctggacctcgagaacgacatcctgtacatgcgggctcatcaagccctgcccagggactccgttgtggaggacctgcatctgcagaaccgttatcttcaggaaaaactccacgcacttgagaaacagtttagcaaagatacttactctaagccgtccatcagcggaatagaatccgatgaccattgtcagagagagcaagaactgcagaaggagaacctgaagctcagctcagaaaacatagaactcaagtttcagctggagcaggcaaataaagatctgcccaggctgaaaaaccaggtgcgggaccttaaggagatgtgcgaatttctcaagaaagagaaagcagaagtccagcggaaattgggccacgtacgcggttccggccgaagtggtaagaccataccagaactggagaagacgatcggactgatgaagaaagtggtggagaaggtgcagcgggagaacgagcagttgaagaaggcgagcgggattctgaccagcgagaaaatggccaatattgagcaggaaaacgagaaactgaaagctgagctggagaaattgaaggcccatctgggccatcagctgtccatgcactacgaatctaagactaagggaacggagaagatcatcgccgagaacgaacggctaagaaaagagctgaagaaggaaaccgacgctgcagaaaaactgaggatagcaaagaacaatctcgagatcttgaatgagaaaatgaccgtacaactggaggagacaggcaaacgccttcagttcgccgaatcccgaggacctcaactggaaggtgcggacagtaagtcctggaaaagcatagttgtgacccgcatgtacgaaaccaagctcaaggaactcgaaacagatatcgcaaagaaaaaccagagcattactgacctcaaacagctggtgaaagaggctactgagagggagcagaaagtgaacaagtataacgaggacttagagcagcagatcaaaatcctgaagcatgtcccggaaggagcagagaccgagcagggcttgaaaagggagctgcaggtcctgaggttggccaaccaccagcttgataaggagaaagctgagctgattcaccaaattgaggccaacaaggaccagtctggggcagagtcaactattcctgacgcagaccagcttaaagaaaagatcaaagatttggaaacacagctaaagatgagcgacttggaaaagcaacaccttaaagaggaaataaaaaagctgaagaaggaactggagaatttcgatcctagcttctttgaggaaatcgaggacttgaaatataattataaggaagaggtgaagaagaacattctgctcgaggagaaggtcaagaagctcagcgagcaactaggggtcgagctaaccagccccgtggcagccagtgaggaatttgaagacgaagaggagtctcccgtaaatttcccaatatacta

SEQ ID NO: 217899 - DNA, 7544 bp, Artificial Sequence
  derived and/or modified sequence
ggcccgcggccgggtccagcttggtggttgcggtagtgagaggcctccgctggttgccaggcttggtctagaggtggagcacagtgaaagaattcaagatgccacctaatataaactggaaagaaataatgaaagttgacccagatgacctgccccgtcaagaagaactggcagataatttattgatttccttatccaaggtggaagtaaatgagctaaaaagtgaaaagcaagaaaatgtgatacaccttttcagaattactcagtcactaatgaagatgaaagctcaagaagtggagctggctttggaagaagtagaaaaagctggagaagaacaagcaaaatttgaaaatcaattaaaaactaaagtaatgaaactggaaaatgaactggagatggctcagcagtctgcaggtggacgagatactcggtttttacgtaatgaaatttgccaacttgaaaaacaattagaacaaaaagatagagaattggaggacatggaaaaggagttggagaaagagaagaaagttaatgagcaattggctcttcgaaatgaggaggcagaaaatgaaaacagcaaattaagaagagagaacaaacgtctaaagaaaaagaatgaacaactttgtcaggatattattgactaccagaaacaaatagattcacagaaagaaacacttttatcaagaagaggggaagacagtgactaccgatcacagttgtctaaaaaaaactatgagcttatccaatatcttgatgaaattcagactttaacagaagctaatgagaaaattgaagttcagaatcaagaaatgagaaaaaatttagaagagtctgtacaggaaatggagaagatgactgatgaatataatagaatgaaagctattgtgcatcagacagataatgtaatagatcagttaaaaaaagaaaacgatcattatcaacttcaagtgcaggagcttacagatcttctgaaatcaaaaaatgaagaagatgatccaattatggtagctgtcaatgcaaaagtagaagaatggaagctaattttgtcttctaaagatgatgaaattattgagtatcagcaaatgttacataacctaagggagaaacttaagaatgctcagcttgatgctgataaaagtaatgttatggctctacagcagggtatacaggaacgagacagtcaaattaagatgctcaccgaacaagtagaacaatatacaaaagaaatggaaaagaatacttgtattattgaagatttgaaaaatgagctccaaagaaacaaaggtgcttcaaccctttctcaacagactcatatgaaaattcagtcaacgttagacattttaaaagagaaaactaaagaggctgagagaacagctgaactggctgaggctgatgctagggaaaaggataaagaattagttgaggctctgaagaggttaaaagattatgaatcgggagtatatggtttagaagatgctgtcgttgaaataaagaattgtaaaaaccaaattaaaataagagatcgagagattgaaatattaacaaaggaaatcaataaacttgaattgaagatcagtgatttccttgatgaaaatgaggcacttagagagcgtgtgggccttgaaccaaagacaatgattgatttaactgaatttagaaatagcaaacacttaaaacagcagcagtacagagctgaaaaccagattcttttgaaagaggcaagtattgaaagtctagaggaagaacgacttgatctgaaaaaaaaaattcgtcaaatggctcaagaaagaggaaaaagaagtgcaacttcaggattaaccactgaggacctgaacctaactgaaaacatttctcaaggagatagaataagtgaaagaaaattggatttattgagcctcaaaaatatgagtgaagcacaatcaaagaatgaatttctttcaagagaactaattgaaaaagaaagagatttagaaaggagtaggacagtgatagccaaatttcagaataaattaaaagaattagttgaagaaaataagcaacttgaagaaggtatgaaagaaatattgcaagcaattaaggaaatgcagaaagatcctgatgttaaaggaggagaaacatctctaattatccctagccttgaaagactagttaatgctatagaatcaaagaatgcagaaggaatctttgatgcgagtctgcatttgaaagcccaagttgatcagcttaccggaagaaatgaagaattaagacaggagctcagggaatctcggaaagaggctataaattattcacagcagttggcaaaagctaatttaaagatagaccatcttgaaaaagaaactagtcttttacgacaatcagaaggatcaaatgttgtttttaaaggaattgacttacctgatgggatagcaccatctagtgccagtatcattaattctcagaatgaatatttaatacatttgttacaggaactagaaaataaagaaaaaaagttaaagaatttagaagattctcttgaagattacaacagaaaatttgctgtaattcgtcatcaacaaagtttgttgtataaagaatacctaagtgaaaaggagacctggaaaacagaatctaaaacaataaaagaggaaaagagaaaacttgaggatcaagtccaacaagatgctataaaagtaaaagaatataataatttgctcaatgctcttcagatggattcggatgaaatgaaaaaaatacttgcagaaaatagtaggaaaattactgttttgcaagtgaatgaaaaatcacttataaggcaatatacaaccttagtagaattggagcgacaacttagaaaagaaaatgagaagcaaaagaatgaattgttgtcaatggaggctgaagtttgtgaaaaaattgggtgtttgcaaagatttaaggaaatggccattttcaagattgcagctctccaaaaagttgtagataatagtgtttctttgtctgaactagaactggctaataaacagtacaatgaactgactgctaagtacagggacatcttgcaaaaagataatatgcttgttcaaagaacaagtaacttggaacacctggagtgtgaaaacatctccttaaaagaacaagtggagtctataaataaagaactggagattaccaaggaaaaacttcacactattgaacaagcctgggaacaggaaactaaattaggtaatgaatctagcatggataaggcaaagaaatcaataaccaacagtgacattgtttccatttcaaaaaaaataactatgctggaaatgaaggaattaaatgaaaggcagcgggctgaacattgtcaaaaaatgtatgaacacttacggacttcgttaaagcaaatggaggaacgtaattttgaattggaaaccaaatttgctgagcttaccaaaatcaatttggatgcacagaaggtggaacagatgttaagagatgaattagctgatagtgtgagcaaggcagtaagtgatgctgataggcaacggattctagaattagagaagaatgaaatggaactaaaagttgaagtgtcaaaactgagagagatttctgatattgccagaagacaagttgaaattttgaatgcacaacaacaatctagggacaaggaagtagagtccctcagaatgcaactgctagactatcaggcacagtctgatgaaaagtcgctcattgccaagttgcaccaacataatgtctctcttcaactgagtgaggctactgctcttggtaagttggagtcaattacatctaaactgcagaagatggaggcctacaacttgcgcttagagcagaaacttgatgaaaaagaacaggctctctattatgctcgtttggagggaagaaacagagcaaaacatctgcgccaaacaattcagtctctacgacgacagtttagtggagctttacccttggcacaacaggaaaagttctccaaaacaatgattcaactacaaaatgacaaacttaagataatgcaagaaatgaaaaattctcaacaagaacatagaaatatggagaacaaaacattggagatggaattaaaattaaagggcctggaagagttaataagcactttaaaggataccaaaggagcccaaaaggtaatcaactggcatatgaaaatagaagaacttcgtcttcaagaacttaaactaaatcgggaattagtcaaggataaagaagaaataaaatatttgaataacataatttctgaatatgaacgtacaatcagcagtcttgaagaagaaattgtgcaacagaacaagtttcatgaagaaagacaaatggcctgggatcaaagagaagttgacctggaacgccaactagacatttttgaccgtcagcaaaatgaaatactaaatgcggcacaaaagtttgaagaagctacaggatcaatccctgaccctagtttgccccttccaaatcaacttgagatcgctctaaggaaaattaaggagaacattcgaataattctagaaacacgggcaacttgcaaatcactagaagagaaactaaaagagaaagaatctgctttaaggttagcagaacaaaatatactgtcaagagacaaagtaatcaatgaactgaggcttcgattgcctgccactgcagaaagagaaaagctcatagctgagctaggcagaaaagagatggaaccaaaatctcaccacacattgaaaattgctcatcaaaccattgcaaacatgcaagcaaggttaaatcaaaaagaagaagtattaaagaagtatcaacgtcttctagaaaaagccagagaggagcaaagagaaattgtgaagaaacatgaggaagaccttcatattcttcatcacagattagaactacaggctgatagttcactaaataaattcaaacaaacggcttgggatttaatgaaacagtctcccactccagttcctaccaacaagcattttattcgtctggctgagatggaacagacagtagcagaacaagatgactctctttcctcactcttggtcaaactaaagaaagtatcacaagatttggagagacaaagagaaatcactgaattaaaagtaaaagaatttgaaaatatcaaattacagcttcaagaaaaccatgaagatgaagtgaaaaaagtaaaagcggaagtagaggatttaaagtatcttctggaccagtcacaaaaggagtcacagtgtttaaaatctgaacttcaggctcaaaaagaagcaaattcaagagctccaacaactacaatgagaaatctagtagaacggctaaagagccaattagccttgaaggagaaacaacagaaagcacttagtcgggcacttttagaactccgggcagaaatgacagcagctgctgaagaacgtattatttctgcaacttctcaaaaagaggcccatctcaatgttcaacaaatcgttgatcgacatactagagagctaaagacacaagttgaagatttaaatgaaaatcttttaaaattgaaagaagcacttaaaacaagtaaaaacagagaaaactcactaactgataatttgaatgacttaaataatgaactgcaaaagaaacaaaaagcctataataaaatacttagagagaaagaggaaattgatcaagagaatgatgaactgaaaaggcaaattaaaagactaaccagtggattacagggcaaacccctgacagataataaacaaagtctaattgaagaactccaaaggaaagttaaaaaactagagaaccaattagagggaaaggtggaggaagtagacctaaaacctatgaaagaaaagaatgctaaagaagaattaattaggtgggaagaaggtaaaaagtggcaagccaaaatagaaggaattcgaaacaagttaaaagagaaagagggggaagtctttactttaacaaagcagttgaatactttgaaggatctttttgccaaagccgataaagagaaacttactttgcagaggaaactaaaaacaactggcatgactgttgatcaggttttgggaatacgagctttggagtcagaaaaagaattggaagaattaaaaaagagaaatcttgacttagaaaatgatatattgtatatgagggcccaccaagctcttcctcgagattctgttgtagaagatttacatttacaaaatagatacctccaagaaaaacttcatgctttagaaaaacagttttcaaaggatacatattctaagccttcaatttcaggaatagagtcagatgatcattgtcagagagaacaggagcttcagaaggaaaacttgaagttgtcatctgaaaatattgaactgaaatttcagcttgaacaagcaaataaagatttgccaagattaaagaatcaagtcagagatttgaaggaaatgtgtgaatttcttaagaaagaaaaagcagaagttcagcggaaacttggccatgttagagggtctggtagaagtggaaagacaatcccagaactggaaaaaaccattggtttaatgaaaaaagtagttgaaaaagtccagagagaaaatgaacagttgaaaaaagcatcaggaatattgactagtgaaaaaatggctaatattgagcaggaaaatgaaaaattgaaggctgaattagaaaaacttaaagctcatcttgggcatcagttgagcatgcactatgaatccaagaccaaaggcacagaaaaaattattgctgaaaatgaaaggcttcgtaaagaacttaaaaaagaaactgatgctgcagagaaattacggatagcaaagaataatttagagatattaaatgagaagatgacagttcaactagaagagactggtaagagattgcagtttgcagaaagcagaggtccacagcttgaaggtgctgacagtaagagctggaaatccattgtggttacaagaatgtatgaaaccaagttaaaagaattggaaactgatattgccaaaaaaaatcaaagcattactgaccttaaacagcttgtaaaagaagcaacagagagagaacaaaaagttaacaaatacaatgaagaccttgaacaacagattaagattcttaaacatgttcctgaaggtgctgagacagagcaaggccttaaacgggagcttcaagttcttagattagctaatcatcagctggataaagagaaagcagaattaatccatcagatagaagctaacaaggaccaaagtggagctgaaagcaccatacctgatgctgatcaactaaaggaaaaaataaaagatctagagacacagctcaaaatgtcagatctagaaaagcagcatttgaaggaggaaataaagaagctgaaaaaagaactggaaaattttgatccttcattttttgaagaaattgaagatcttaagtataattacaaggaagaagtgaagaagaatattctcttagaagagaaggtaaaaaaactttcagaacaattgggagttgaattaactagccctgttgctgcttctgaagagtttgaagatgaagaagaaagtcctgttaatttccccatttactaa

SEQ ID NO: 217900 - DNA, 1935 bp, Artificial Sequence
  derived and/or modified sequence
aagatggctcagcagtctgcaggtggacgagatactcggtttttacgtaatgaaatttgccaacttgaaaaacaattagaacaaaaagatagagaattggaggacatggaaaaggagttggagaaagagaagaaagttaatgagcaattggctcttcgaaatgaggaggcagaaaatgaaaacagcaaattaagaagagagaacaaacgtctaaagaaaaagaatgaacaactttgtcaggatattattgactaccagaaacaaatagattcacagaaagaaacacttttatcaagaagaggggaagacagtgactaccgatcacagttgtctaaaaaaaactatgagcttatccaatatcttgatgaaattcagactttaacagaagctaatgagaaaattgaagttcagaatcaagaaatgagaaaaaatttagaagagtctgtacaggaaatggagaagatgactgatgaatataatagaatgaaagctattgtgcatcagacagataatgtaatagatcagttaaaaaaagaaaacgatcattatcaacttcaagtgcaggagcttacagatcttctgaaatcaaaaaatgaagaagatgatccaattatggtagctgtcaatgcaaaagtagaagaatggaagctaattttgtcttctaaagatgatgaaattattgagtatcagcaaatgttacataacctaagggagaaacttaagaatgctcagcttgatgctgataaaagtaatgttatggctctacagcagggtatacaggaacgagacagtcaaattaagatgctcaccgaacaagtagaacaatatacaaaagaaatggaaaagaatacttgtattattgaagatttgaaaaatgagctccaaagaaacaaaggtgcttcaaccctttctcaacagactcatatgaaaattcagtcaacgttagacattttaaaagagaaaactaaagaggctgagagaacagctgaactggctgaggctgatgctagggaaaaggataaagaattagttgaggctctgaagaggttaaaagattatgaatcgggagtatatggtttagaagatgctgtcgttgaaataaagaattgtaaaaaccaaattaaaataagagatcgagagattgaaatattaacaaaggaaatcaataaacttgaattgaagatcagtgatttccttgatgaaaatgaggcacttagagagcgtgtgggccttgaaccaaagacaatgattgatttaactgaatttagaaatagcaaacacttaaaacagcagcagtacagagctgaaaaccagattcttttgaaagagattgaaagtctagaggaagaacgacttgatctgaaaaaaaaaattcgtcaaatggctcaagaaagaggaaaaagaagtgcaacttcaggattaaccactgaggacctgaacctaactgaaaacatttctcaaggagatagaataagtgaaagaaaattggatttattgagcctcaaaaatatgagtgaagcacaatcaaagaatgaatttctttcaagagaactaattgaaaaagaaagagatttagaaaggagtaggacagtgatagccaaatttcagaataaatgctatagaatcaaagaatgcagaaggaatctttgatgcgagtctgcatttgaaagcccaagttgatcagcttaccggaagaaatgaagaattaagacaggagctcagggaatctcggaaagaggctataaattattcacagcagttggcaaaagctaatttaaagatagaccatcttgaaaaagaaactagtcttttacgacaatcagaaggatcaaatgttgtttttaaaggaattgacttacctgatgggatagcaccatctagtgccagtatcattaattctcagaatgaatatttaatacatttgttacaggtatt

SEQ ID NO: 217901 - DNA, 7948 bp, Artificial Sequence
  derived and/or modified sequence
atttgaagtcctcgttccacgccttctcatcatcctgaacaccgagctctgggactccggcggagaatctaaacgtaaagcatcacccacggtcgtgaactgtaggctctcctggcatccgggatcttattctggccttggcggagttggggatggtgtcgcctagcagccgctgccgctttggcttgctcgggaccatttggctggacccagagtccgcgtggaaccgcgatagggatctgtcagggcccgcggccgggtccagcttggtggttgcggtagtgagaggcctccgctggttgccaggcttggtctagaggtggagcacagtgaaagaattcaagatgccacctaatataaactggaaagaaataatgaaagttgacccagatgacctgccccgtcaagaagaactggcagataatttattgatttccttatccaaggtggaagtaaatgagctaaaaagtgaaaagcaagaaaatgtgatacaccttttcagaattactcagtcactaatgaagatgaaagctcaagaagtggagctggctttggaagaagtagaaaaagctggagaagaacaagcaaaatttgaaaatcaattaaaaactaaagtaatgaaactggaaaatgaactggagatggctcagcagtctgcaggtggacgagatactcggtttttacgtaatgaaatttgccaacttgaaaaacaattagaacaaaaagatagagaattggaggacatggaaaaggagttggagaaagagaagaaagttaatgagcaattggctcttcgaaatgaggaggcagaaaatgaaaacagcaaattaagaagagagaacaaacgtctaaagaaaaagaatgaacaactttgtcaggatattattgactaccagaaacaaatagattcacagaaagaaacacttttatcaagaagaggggaagacagtgactaccgatcacagttgtctaaaaaaaactatgagcttatccaatatcttgatgaaattcagactttaacagaagctaatgagaaaattgaagttcagaatcaagaaatgagaaaaaatttagaagagtctgtacaggaaatggagaagatgactgatgaatataatagaatgaaagctattgtgcatcagacagataatgtaatagatcagttaaaaaaagaaaacgatcattatcaacttcaagtgcaggagcttacagatcttctgaaatcaaaaaatgaagaagatgatccaattatggtagctgtcaatgcaaaagtagaagaatggaagctaattttgtcttctaaagatgatgaaattattgagtatcagcaaatgttacataacctaagggagaaacttaagaatgctcagcttgatgctgataaaagtaatgttatggctctacagcagggtatacaggaacgagacagtcaaattaagatgctcaccgaacaagtagaacaatatacaaaagaaatggaaaagaatacttgtattattgaagatttgaaaaatgagctccaaagaaacaaaggtgcttcaaccctttctcaacagactcatatgaaaattcagtcaacgttagacattttaaaagagaaaactaaagaggctgagagaacagctgaactggctgaggctgatgctagggaaaaggataaagaattagttgaggctctgaagaggttaaaagattatgaatcgggagtatatggtttagaagatgctgtcgttgaaataaagaattgtaaaaaccaaattaaaataagagatcgagagattgaaatattaacaaaggaaatcaataaacttgaattgaagatcagtgatttccttgatgaaaatgaggcacttagagagcgtgtgggccttgaaccaaagacaatgattgatttaactgaatttagaaatagcaaacacttaaaacagcagcagtacagagctgaaaaccagattcttttgaaagagattgaaagtctagaggaagaacgacttgatctgaaaaaaaaaattcgtcaaatggctcaagaaagaggaaaaagaagtgcaacttcaggattaaccactgaggacctgaacctaactgaaaacatttctcaaggagatagaataagtgaaagaaaattggatttattgagcctcaaaaatatgagtgaagcacaatcaaagaatgaatttctttcaagagaactaattgaaaaagaaagagatttagaaaggagtaggacagtgatagccaaatttcagaataaattaaaagaattagttgaagaaaataagcaacttgaagaaggtatgaaagaaatattgcaagcaattaaggaaatgcagaaagatcctgatgttaaaggaggagaaacatctctaattatccctagccttgaaagactagttaatgctatagaatcaaagaatgcagaaggaatctttgatgcgagtctgcatttgaaagcccaagttgatcagcttaccggaagaaatgaagaattaagacaggagctcagggaatctcggaaagaggctataaattattcacagcagttggcaaaagctaatttaaagatagaccatcttgaaaaagaaactagtcttttacgacaatcagaaggatcaaatgttgtttttaaaggaattgacttacctgatgggatagcaccatctagtgccagtatcattaattctcagaatgaatatttaatacatttgttacaggaactagaaaataaagaaaaaaagttaaagaatttagaagattctcttgaagattacaacagaaaatttgctgtaattcgtcatcaacaaagtttgttgtataaagaatacctaagtgaaaaggagacctggaaaacagaatctaaaacaataaaagaggaaaagagaaaacttgaggatcaagtccaacaagatgctataaaagtaaaagaatataataatttgctcaatgctcttcagatggattcggatgaaatgaaaaaaatacttgcagaaaatagtaggaaaattactgttttgcaagtgaatgaaaaatcacttataaggcaatatacaaccttagtagaattggagcgacaacttagaaaagaaaatgagaagcaaaagaatgaattgttgtcaatggaggctgaagtttgtgaaaaaattgggtgtttgcaaagatttaaggaaatggccattttcaagattgcagctctccaaaaagttgtagataatagtgtttctttgtctgaactagaactggctaataaacagtacaatgaactgactgctaagtacagggacatcttgcaaaaagataatatgcttgttcaaagaacaagtaacttggaacacctggagtgtgaaaacatctccttaaaagaacaagtggagtctataaataaagaactggagattaccaaggaaaaacttcacactattgaacaagcctgggaacaggaaactaaattaggtaatgaatctagcatggataaggcaaagaaatcaataaccaacagtgacattgtttccatttcaaaaaaaataactatgctggaaatgaaggaattaaatgaaaggcagcgggctgaacattgtcaaaaaatgtatgaacacttacggacttcgttaaagcaaatggaggaacgtaattttgaattggaaaccaaatttgctgagcttaccaaaatcaatttggatgcacagaaggtggaacagatgttaagagatgaattagctgatagtgtgagcaaggcagtaagtgatgctgataggcaacggattctagaattagagaagaatgaaatggaactaaaagttgaagtgtcaaaactgagagagatttctgatattgccagaagacaagttgaaattttgaatgcacaacaacaatctagggacaaggaagtagagtccctcagaatgcaactgctagactatcaggcacagtctgatgaaaagtcgctcattgccaagttgcaccaacataatgtctctcttcaactgagtgaggctactgctcttggtaagttggagtcaattacatctaaactgcagaagatggaggcctacaacttgcgcttagagcagaaacttgatgaaaaagaacaggctctctattatgctcgtttggagggaagaaacagagcaaaacatctgcgccaaacaattcagtctctacgacgacagtttagtggagctttacccttggcacaacaggaaaagttctccaaaacaatgattcaactacaaaatgacaaacttaagataatgcaagaaatgaaaaattctcaacaagaacatagaaatatggagaacaaaacattggagatggaattaaaattaaagggcctggaagagttaataagcactttaaaggataccaaaggagcccaaaaggtaatcaactggcatatgaaaatagaagaacttcgtcttcaagaacttaaactaaatcgggaattagtcaaggataaagaagaaataaaatatttgaataacataatttctgaatatgaacgtacaatcagcagtcttgaagaagaaattgtgcaacagaacaagtttcatgaagaaagacaaatggcctgggatcaaagagaagttgacctggaacgccaactagacatttttgaccgtcagcaaaatgaaatactaaatgcggcacaaaagtttgaagaagctacaggatcaatccctgaccctagtttgccccttccaaatcaacttgagatcgctctaaggaaaattaaggagaacattcgaataattctagaaacacgggcaacttgcaaatcactagaagagaaactaaaagagaaagaatctgctttaaggttagcagaacaaaatatactgtcaagagacaaagtaatcaatgaactgaggcttcgattgcctgccactgcagaaagagaaaagctcatagctgagctaggcagaaaagagatggaaccaaaatctcaccacacattgaaaattgctcatcaaaccattgcaaacatgcaagcaaggttaaatcaaaaagaagaagtattaaagaagtatcaacgtcttctagaaaaagccagagaggagcaaagagaaattgtgaagaaacatgaggaagaccttcatattcttcatcacagattagaactacaggctgatagttcactaaataaattcaaacaaacggcttgggatttaatgaaacagtctcccactccagttcctaccaacaagcattttattcgtctggctgagatggaacagacagtagcagaacaagatgactctctttcctcactcttggtcaaactaaagaaagtatcacaagatttggagagacaaagagaaatcactgaattaaaagtaaaagaatttgaaaatatcaaattacagcttcaagaaaaccatgaagatgaagtgaaaaaagtaaaagcggaagtagaggatttaaagtatcttctggaccagtcacaaaaggagtcacagtgtttaaaatctgaacttcaggctcaaaaagaagcaaattcaagagctccaacaactacaatgagaaatctagtagaacggctaaagagccaattagccttgaaggagaaacaacagaaagcacttagtcgggcacttttagaactccgggcagaaatgacagcagctgctgaagaacgtattatttctgcaacttctcaaaaagaggcccatctcaatgttcaacaaatcgttgatcgacatactagagagctaaagacacaagttgaagatttaaatgaaaatcttttaaaattgaaagaagcacttaaaacaagtaaaaacagagaaaactcactaactgataatttgaatgacttaaataatgaactgcaaaagaaacaaaaagcctataataaaatacttagagagaaagaggaaattgatcaagagaatgatgaactgaaaaggcaaattaaaagactaaccagtggattacagggcaaacccctgacagataataaacaaagtctaattgaagaactccaaaggaaagttaaaaaactagagaaccaattagagggaaaggtggaggaagtagacctaaaacctatgaaagaaaagaatgctaaagaagaattaattaggtgggaagaaggtaaaaagtggcaagccaaaatagaaggaattcgaaacaagttaaaagagaaagagggggaagtctttactttaacaaagcagttgaatactttgaaggatctttttgccaaagccgataaagagaaacttactttgcagaggaaactaaaaacaactggcatgactgttgatcaggttttgggaatacgagctttggagtcagaaaaagaattggaagaattaaaaaagagaaatcttgacttagaaaatgatatattgtatatgagggcccaccaagctcttcctcgagattctgttgtagaagatttacatttacaaaatagatacctccaagaaaaacttcatgctttagaaaaacagttttcaaaggatacatattctaagccttcaatttcaggaatagagtcagatgatcattgtcagagagaacaggagcttcagaaggaaaacttgaagttgtcatctgaaaatattgaactgaaatttcagcttgaacaagcaaataaagatttgccaagattaaagaatcaagtcagagatttgaaggaaatgtgtgaatttcttaagaaagaaaaagcagaagttcagcggaaacttggccatgttagagggtctggtagaagtggaaagacaatcccagaactggaaaaaaccattggtttaatgaaaaaagtagttgaaaaagtccagagagaaaatgaacagttgaaaaaagcatcaggaatattgactagtgaaaaaatggctaatattgagcaggaaaatgaaaaattgaaggctgaattagaaaaacttaaagctcatcttgggcatcagttgagcatgcactatgaatccaagaccaaaggcacagaaaaaattattgctgaaaatgaaaggcttcgtaaagaacttaaaaaagaaactgatgctgcagagaaattacggatagcaaagaataatttagagatattaaatgagaagatgacagttcaactagaagagactggtaagagattgcagtttgcagaaagcagaggtccacagcttgaaggtgctgacagtaagagctggaaatccattgtggttacaagaatgtatgaaaccaagttaaaagaattggaaactgatattgccaaaaaaaatcaaagcattactgaccttaaacagcttgtaaaagaagcaacagagagagaacaaaaagttaacaaatacaatgaagaccttgaacaacagattaagattcttaaacatgttcctgaaggtgctgagacagagcaaggccttaaacgggagcttcaagttcttagattagctaatcatcagctggataaagagaaagcagaattaatccatcagatagaagctaacaaggaccaaagtggagctgaaagcaccatacctgatgctgatcaactaaaggaaaaaataaaagatctagagacacagctcaaaatgtcagatctagaaaagcagcatttgaaggaggaaataaagaagctgaaaaaagaactggaaaattttgatccttcattttttgaagaaattgaagatcttaagtataattacaaggaagaagtgaagaagaatattctcttagaagagaaggtaaaaaaactttcagaacaattgggagttgaattaactagccctgttgctgcttctgaagagtttgaagatgaagaagaaagtcctgttaatttccccatttactaaaggtcacctataaactttgtttcatttaactatttattaactttataagttaaatatacttggaaataagcagttctccgaactgtagtatttccttctcactaccttgtacctttatacttagattggaattcttaataaataaaattatatgaaattttcaa

SEQ ID NO: 217902 - DNA, 7446 bp, Artificial Sequence
  derived and/or modified sequence
atgccccccaacatcaactggaaggagatcatgaaggtggaccccgacgacctgcccagacaggaggagctggccgacaacctgctgatcagcctgagcaaggtggaggtgaacgagctgaagagcgagaagcaggagaacgtgatccacctgttcagaatcacccagagcctgatgaagatgaaggcccaggaggtggagctggccctggaggaggtggagaaggccggcgaggagcaggccaagttcgagaaccagctgaagaccaaggtgatgaagctggagaacgagctggagatggcccagcagagcgccggcggcagagacaccagattcctgagaaacgagatctgccagctggagaagcagctggagcagaaggacagagagctggaggacatggagaaggagctggagaaggagaagaaggtgaacgagcagctggccctgagaaacgaggaggccgagaacgagaacagcaagctgagaagagagaacaagagactgaagaagaagaacgagcagctgtgccaggacatcatcgactaccagaagcagatcgacagccagaaggagaccctgctgagcagaagaggcgaggacagcgactacagaagccagctgagcaagaagaactacgagctgatccagtacctggacgagatccagaccctgaccgaggccaacgagaagatcgaggtgcagaaccaggagatgagaaagaacctggaggagagcgtgcaggagatggagaagatgaccgacgagtacaacagaatgaaggccatcgtgcaccagaccgacaacgtgatcgaccagctgaagaaggagaacgaccactaccagctgcaggtgcaggagctgaccgacctgctgaagagcaagaacgaggaggacgaccccatcatggtggccgtgaacgccaaggtggaggagtggaagctgatcctgagcagcaaggacgacgagatcatcgagtaccagcagatgctgcacaacctgagagagaagctgaagaacgcccagctggacgccgacaagagcaacgtgatggccctgcagcagggcatccaggagagagacagccagatcaagatgctgaccgagcaggtggagcagtacaccaaggagatggagaagaacacctgcatcatcgaggacctgaagaacgagctgcagagaaacaagggcgccagcaccctgagccagcagacccacatgaagatccagagcaccctggacatcctgaaggagaagaccaaggaggccgagagaaccgccgagctggccgaggccgacgccagagagaaggacaaggagctggtggaggccctgaagagactgaaggactacgagagcggcgtgtacggcctggaggacgccgtggtggagatcaagaactgcaagaaccagatcaagatcagagacagagagatcgagatcctgaccaaggagatcaacaagctggagctgaagatcagcgacttcctggacgagaacgaggccctgagagagagagtgggcctggagcccaagaccatgatcgacctgaccgagttcagaaacagcaagcacctgaagcagcagcagtacagagccgagaaccagatcctgctgaaggaggccagcatcgagagcctggaggaggagagactggacctgaagaagaagatcagacagatggcccaggagagaggcaagagaagcgccaccagcggcctgaccaccgaggacctgaacctgaccgagaacatcagccagggcgacagaatcagcgagagaaagctggacctgctgagcctgaagaacatgagcgaggcccagagcaagaacgagttcctgagcagagagctgatcgagaaggagagagacctggagagaagcagaaccgtgatcgccaagttccagaacaagctgaaggagctggtggaggagaacaagcagctggaggagggcatgaaggagatcctgcaggccatcaaggagatgcagaaggaccccgacgtgaagggcggcgagaccagcctgatcatccccagcctggagagactggtgaacgccatcgagagcaagaacgccgagggcatcttcgacgccagcctgcacctgaaggcccaggtggaccagctgaccggcagaaacgaggagctgagacaggagctgagagagagcagaaaggaggccatcaactacagccagcagctggccaaggccaacctgaagatcgaccacctggagaaggagaccagcctgctgagacagagcgagggcagcaacgtggtgttcaagggcatcgacctgcccgacggcatcgcccccagcagcgccagcatcatcaacagccagaacgagtacctgatccacctgctgcaggagctggagaacaaggagaagaagctgaagaacctggaggacagcctggaggactacaacagaaagttcgccgtgatcagacaccagcagagcctgctgtacaaggagtacctgagcgagaaggagacctggaagaccgagagcaagaccatcaaggaggagaagagaaagctggaggaccaggtgcagcaggacgccatcaaggtgaaggagtacaacaacctgctgaacgccctgcagatggacagcgacgagatgaagaagatcctggccgagaacagcagaaagatcaccgtgctgcaggtgaacgagaagagcctgatcagacagtacaccaccctggtggagctggagagacagctgagaaaggagaacgagaagcagaagaacgagctgctgagcatggaggccgaggtgtgcgagaagatcggctgcctgcagagattcaaggagatggccatcttcaagatcgccgccctgcagaaggtggtggacaacagcgtgagcctgagcgagctggagctggccaacaagcagtacaacgagctgaccgccaagtacagagacatcctgcagaaggacaacatgctggtgcagagaaccagcaacctggagcacctggagtgcgagaacatcagcctgaaggagcaggtggagagcatcaacaaggagctggagatcaccaaggagaagctgcacaccatcgagcaggcctgggagcaggagaccaagctgggcaacgagagcagcatggacaaggccaagaagagcatcaccaacagcgacatcgtgagcatcagcaagaagatcaccatgctggagatgaaggagctgaacgagagacagagagccgagcactgccagaagatgtacgagcacctgagaaccagcctgaagcagatggaggagagaaacttcgagctggagaccaagttcgccgagctgaccaagatcaacctggacgcccagaaggtggagcagatgctgagagacgagctggccgacagcgtgagcaaggccgtgagcgacgccgacagacagagaatcctggagctggagaagaacgagatggagctgaaggtggaggtgagcaagctgagagagatcagcgacatcgccagaagacaggtggagatcctgaacgcccagcagcagagcagagacaaggaggtggagagcctgagaatgcagctgctggactaccaggcccagagcgacgagaagagcctgatcgccaagctgcaccagcacaacgtgagcctgcagctgagcgaggccaccgccctgggcaagctggagagcatcaccagcaagctgcagaagatggaggcctacaacctgagactggagcagaagctggacgagaaggagcaggccctgtactacgccagactggagggcagaaacagagccaagcacctgagacagaccatccagagcctgagaagacagttcagcggcgccctgcccctggcccagcaggagaagttcagcaagaccatgatccagctgcagaacgacaagctgaagatcatgcaggagatgaagaacagccagcaggagcacagaaacatggagaacaagaccctggagatggagctgaagctgaagggcctggaggagctgatcagcaccctgaaggacaccaagggcgcccagaaggtgatcaactggcacatgaagatcgaggagctgagactgcaggagctgaagctgaacagagagctggtgaaggacaaggaggagatcaagtacctgaacaacatcatcagcgagtacgagagaaccatcagcagcctggaggaggagatcgtgcagcagaacaagttccacgaggagagacagatggcctgggaccagagagaggtggacctggagagacagctggacatcttcgacagacagcagaacgagatcctgaacgccgcccagaagttcgaggaggccaccggcagcatccccgaccccagcctgcccctgcccaaccagctggagatcgccctgagaaagatcaaggagaacatcagaatcatcctggagaccagagccacctgcaagagcctggaggagaagctgaaggagaaggagagcgccctgagactggccgagcagaacatcctgagcagagacaaggtgatcaacgagctgagactgagactgcccgccaccgccgagagagagaagctgatcgccgagctgggcagaaaggagatggagcccaagagccaccacaccctgaagatcgcccaccagaccatcgccaacatgcaggccagactgaaccagaaggaggaggtgctgaagaagtaccagagactgctggagaaggccagagaggagcagagagagatcgtgaagaagcacgaggaggacctgcacatcctgcaccacagactggagctgcaggccgacagcagcctgaacaagttcaagcagaccgcctgggacctgatgaagcagagccccacccccgtgcccaccaacaagcacttcatcagactggccgagatggagcagaccgtggccgagcaggacgacagcctgagcagcctgctggtgaagctgaagaaggtgagccaggacctggagagacagagagagatcaccgagctgaaggtgaaggagttcgagaacatcaagctgcagctgcaggagaaccacgaggacgaggtgaagaaggtgaaggccgaggtggaggacctgaagtacctgctggaccagagccagaaggagagccagtgcctgaagagcgagctgcaggcccagaaggaggccaacagcagagcccccaccaccaccatgagaaacctggtggagagactgaagagccagctggccctgaaggagaagcagcagaaggccctgagcagagccctgctggagctgagagccgagatgaccgccgccgccgaggagagaatcatcagcgccaccagccagaaggaggcccacctgaacgtgcagcagatcgtggacagacacaccagagagctgaagacccaggtggaggacctgaacgagaacctgctgaagctgaaggaggccctgaagaccagcaagaacagagagaacagcctgaccgacaacctgaacgacctgaacaacgagctgcagaagaagcagaaggcctacaacaagatcctgagagagaaggaggagatcgaccaggagaacgacgagctgaagagacagatcaagagactgaccagcggcctgcagggcaagcccctgaccgacaacaagcagagcctgatcgaggagctgcagagaaaggtgaagaagctggagaaccagctggagggcaaggtggaggaggtggacctgaagcccatgaaggagaagaacgccaaggaggagctgatcagatgggaggagggcaagaagtggcaggccaagatcgagggcatcagaaacaagctgaaggagaaggagggcgaggtgttcaccctgaccaagcagctgaacaccctgaaggacctgttcgccaaggccgacaaggagaagctgaccctgcagagaaagctgaagaccaccggcatgaccgtggaccaggtgctgggcatcagagccctggagagcgagaaggagctggaggagctgaagaagagaaacctggacctggagaacgacatcctgtacatgagagcccaccaggccctgcccagagacagcgtggtggaggacctgcacctgcagaacagatacctgcaggagaagctgcacgccctggagaagcagttcagcaaggacacctacagcaagcccagcatcagcggcatcgagagcgacgaccactgccagagagagcaggagctgcagaaggagaacctgaagctgagcagcgagaacatcgagctgaagttccagctggagcaggccaacaaggacctgcccagactgaagaaccaggtgagagacctgaaggagatgtgcgagttcctgaagaaggagaaggccgaggtgcagagaaagctgggccacgtgagaggcagcggcagaagcggcaagaccatccccgagctggagaagaccatcggcctgatgaagaaggtggtggagaaggtgcagagagagaacgagcagctgaagaaggccagcggcatcctgaccagcgagaagatggccaacatcgagcaggagaacgagaagctgaaggccgagctggagaagctgaaggcccacctgggccaccagctgagcatgcactacgagagcaagaccaagggcaccgagaagatcatcgccgagaacgagagactgagaaaggagctgaagaaggagaccgacgccgccgagaagctgagaatcgccaagaacaacctggagatcctgaacgagaagatgaccgtgcagctggaggagaccggcaagagactgcagttcgccgagagcagaggcccccagctggagggcgccgacagcaagagctggaagagcatcgtggtgaccagaatgtacgagaccaagctgaaggagctggagaccgacatcgccaagaagaaccagagcatcaccgacctgaagcagctggtgaaggaggccaccgagagagagcagaaggtgaacaagtacaacgaggacctggagcagcagatcaagatcctgaagcacgtgcccgagggcgccgagaccgagcagggcctgaagagagagctgcaggtgctgagactggccaaccaccagctggacaaggagaaggccgagctgatccaccagatcgaggccaacaaggaccagagcggcgccgagagcaccatccccgacgccgaccagctgaaggagaagatcaaggacctggagacccagctgaagatgagcgacctggagaagcagcacctgaaggaggagatcaagaagctgaagaaggagctggagaacttcgaccccagcttcttcgaggagatcgaggacctgaagtacaactacaaggaggaggtgaagaagaacatcctgctggaggagaaggtgaagaagctgagcgagcagctgggcgtggagctgaccagccccgtggccgccagcgaggagttcgaggacgaggaggagagccccgtgaacttccccatctactag

SEQ ID NO: 217903 - DNA, 1650 bp, Artificial Sequence
  derived and/or modified sequence
aagatggcccagcagagcgccggcggcagagacaccagattcctgagaaacgagatctgccagctggagaagcagctggagcagaaggacagagagctggaggacatggagaaggagctggagaaggagaagaaggtgaacgagcagctggccctgagaaacgaggaggccgagaacgagaacagcaagctgagaagagagaacaagagactgaagaagaagaacgagcagctgtgccaggacatcatcgactaccagaagcagatcgacagccagaaggagaccctgctgagcagaagaggcgaggacagcgactacagaagccagctgagcaagaagaactacgagctgatccagtacctggacgagatccagaccctgaccgaggccaacgagaagatcgaggtgcagaaccaggagatgagaaagaacctggaggagagcgtgcaggagatggagaagatgaccgacgagtacaacagaatgaaggccatcgtgcaccagaccgacaacgtgatcgaccagctgaagaaggagaacgaccactaccagctgcaggtgcaggagctgaccgacctgctgaagagcaagaacgaggaggacgaccccatcatggtggccgtgaacgccaaggtggaggagtggaagctgatcctgagcagcaaggacgacgagatcatcgagtaccagcagatgctgcacaacctgagagagaagctgaagaacgcccagctggacgccgacaagagcaacgtgatggccctgcagcagggcatccaggagagagacagccagatcaagatgctgaccgagcaggtggagcagtacaccaaggagatggagaagaacacctgcatcatcgaggacctgaagaacgagctgcagagaaacaagggcgccagcaccctgagccagcagacccacatgaagatccagagcaccctggacatcctgaaggagaagaccaaggaggccgagagaaccgccgagctggccgaggccgacgccagagagaaggacaaggagctggtggaggccctgaagagactgaaggactacgagagcggcgtgtacggcctggaggacgccgtggtggagatcaagaactgcaagaaccagatcaagatcagagacagagagatcgagatcctgaccaaggagatcaacaagctggagctgaagatcagcgacttcctggacgagaacgaggccctgagagagagagtgggcctggagcccaagaccatgatcgacctgaccgagttcagaaacagcaagcacctgaagcagcagcagtacagagccgagaaccagatcctgctgaaggagatcgagagcctggaggaggagagactggacctgaagaagaagatcagacagatggcccaggagagaggcaagagaagcgccaccagcggcctgaccaccgaggacctgaacctgaccgagaacatcagccagggcgacagaatcagcgagagaaagctggacctgctgagcctgaagaacatgagcgaggcccagagcaagaacgagttcctgagcagagagctgatcgagaaggagagagacctggagagaagcagaaccgtgatcgccaagttccagaacaagtgctacagaatcaaggagtgcagaagaaacctgtag

SEQ ID NO: 217904 - DNA, 7440 bp, Artificial Sequence
  derived and/or modified sequence
atgccccccaacatcaactggaaggagatcatgaaggtggaccccgacgacctgcccagacaggaggagctggccgacaacctgctgatcagcctgagcaaggtggaggtgaacgagctgaagagcgagaagcaggagaacgtgatccacctgttcagaatcacccagagcctgatgaagatgaaggcccaggaggtggagctggccctggaggaggtggagaaggccggcgaggagcaggccaagttcgagaaccagctgaagaccaaggtgatgaagctggagaacgagctggagatggcccagcagagcgccggcggcagagacaccagattcctgagaaacgagatctgccagctggagaagcagctggagcagaaggacagagagctggaggacatggagaaggagctggagaaggagaagaaggtgaacgagcagctggccctgagaaacgaggaggccgagaacgagaacagcaagctgagaagagagaacaagagactgaagaagaagaacgagcagctgtgccaggacatcatcgactaccagaagcagatcgacagccagaaggagaccctgctgagcagaagaggcgaggacagcgactacagaagccagctgagcaagaagaactacgagctgatccagtacctggacgagatccagaccctgaccgaggccaacgagaagatcgaggtgcagaaccaggagatgagaaagaacctggaggagagcgtgcaggagatggagaagatgaccgacgagtacaacagaatgaaggccatcgtgcaccagaccgacaacgtgatcgaccagctgaagaaggagaacgaccactaccagctgcaggtgcaggagctgaccgacctgctgaagagcaagaacgaggaggacgaccccatcatggtggccgtgaacgccaaggtggaggagtggaagctgatcctgagcagcaaggacgacgagatcatcgagtaccagcagatgctgcacaacctgagagagaagctgaagaacgcccagctggacgccgacaagagcaacgtgatggccctgcagcagggcatccaggagagagacagccagatcaagatgctgaccgagcaggtggagcagtacaccaaggagatggagaagaacacctgcatcatcgaggacctgaagaacgagctgcagagaaacaagggcgccagcaccctgagccagcagacccacatgaagatccagagcaccctggacatcctgaaggagaagaccaaggaggccgagagaaccgccgagctggccgaggccgacgccagagagaaggacaaggagctggtggaggccctgaagagactgaaggactacgagagcggcgtgtacggcctggaggacgccgtggtggagatcaagaactgcaagaaccagatcaagatcagagacagagagatcgagatcctgaccaaggagatcaacaagctggagctgaagatcagcgacttcctggacgagaacgaggccctgagagagagagtgggcctggagcccaagaccatgatcgacctgaccgagttcagaaacagcaagcacctgaagcagcagcagtacagagccgagaaccagatcctgctgaaggagatcgagagcctggaggaggagagactggacctgaagaagaagatcagacagatggcccaggagagaggcaagagaagcgccaccagcggcctgaccaccgaggacctgaacctgaccgagaacatcagccagggcgacagaatcagcgagagaaagctggacctgctgagcctgaagaacatgagcgaggcccagagcaagaacgagttcctgagcagagagctgatcgagaaggagagagacctggagagaagcagaaccgtgatcgccaagttccagaacaagctgaaggagctggtggaggagaacaagcagctggaggagggcatgaaggagatcctgcaggccatcaaggagatgcagaaggaccccgacgtgaagggcggcgagaccagcctgatcatccccagcctggagagactggtgaacgccatcgagagcaagaacgccgagggcatcttcgacgccagcctgcacctgaaggcccaggtggaccagctgaccggcagaaacgaggagctgagacaggagctgagagagagcagaaaggaggccatcaactacagccagcagctggccaaggccaacctgaagatcgaccacctggagaaggagaccagcctgctgagacagagcgagggcagcaacgtggtgttcaagggcatcgacctgcccgacggcatcgcccccagcagcgccagcatcatcaacagccagaacgagtacctgatccacctgctgcaggagctggagaacaaggagaagaagctgaagaacctggaggacagcctggaggactacaacagaaagttcgccgtgatcagacaccagcagagcctgctgtacaaggagtacctgagcgagaaggagacctggaagaccgagagcaagaccatcaaggaggagaagagaaagctggaggaccaggtgcagcaggacgccatcaaggtgaaggagtacaacaacctgctgaacgccctgcagatggacagcgacgagatgaagaagatcctggccgagaacagcagaaagatcaccgtgctgcaggtgaacgagaagagcctgatcagacagtacaccaccctggtggagctggagagacagctgagaaaggagaacgagaagcagaagaacgagctgctgagcatggaggccgaggtgtgcgagaagatcggctgcctgcagagattcaaggagatggccatcttcaagatcgccgccctgcagaaggtggtggacaacagcgtgagcctgagcgagctggagctggccaacaagcagtacaacgagctgaccgccaagtacagagacatcctgcagaaggacaacatgctggtgcagagaaccagcaacctggagcacctggagtgcgagaacatcagcctgaaggagcaggtggagagcatcaacaaggagctggagatcaccaaggagaagctgcacaccatcgagcaggcctgggagcaggagaccaagctgggcaacgagagcagcatggacaaggccaagaagagcatcaccaacagcgacatcgtgagcatcagcaagaagatcaccatgctggagatgaaggagctgaacgagagacagagagccgagcactgccagaagatgtacgagcacctgagaaccagcctgaagcagatggaggagagaaacttcgagctggagaccaagttcgccgagctgaccaagatcaacctggacgcccagaaggtggagcagatgctgagagacgagctggccgacagcgtgagcaaggccgtgagcgacgccgacagacagagaatcctggagctggagaagaacgagatggagctgaaggtggaggtgagcaagctgagagagatcagcgacatcgccagaagacaggtggagatcctgaacgcccagcagcagagcagagacaaggaggtggagagcctgagaatgcagctgctggactaccaggcccagagcgacgagaagagcctgatcgccaagctgcaccagcacaacgtgagcctgcagctgagcgaggccaccgccctgggcaagctggagagcatcaccagcaagctgcagaagatggaggcctacaacctgagactggagcagaagctggacgagaaggagcaggccctgtactacgccagactggagggcagaaacagagccaagcacctgagacagaccatccagagcctgagaagacagttcagcggcgccctgcccctggcccagcaggagaagttcagcaagaccatgatccagctgcagaacgacaagctgaagatcatgcaggagatgaagaacagccagcaggagcacagaaacatggagaacaagaccctggagatggagctgaagctgaagggcctggaggagctgatcagcaccctgaaggacaccaagggcgcccagaaggtgatcaactggcacatgaagatcgaggagctgagactgcaggagctgaagctgaacagagagctggtgaaggacaaggaggagatcaagtacctgaacaacatcatcagcgagtacgagagaaccatcagcagcctggaggaggagatcgtgcagcagaacaagttccacgaggagagacagatggcctgggaccagagagaggtggacctggagagacagctggacatcttcgacagacagcagaacgagatcctgaacgccgcccagaagttcgaggaggccaccggcagcatccccgaccccagcctgcccctgcccaaccagctggagatcgccctgagaaagatcaaggagaacatcagaatcatcctggagaccagagccacctgcaagagcctggaggagaagctgaaggagaaggagagcgccctgagactggccgagcagaacatcctgagcagagacaaggtgatcaacgagctgagactgagactgcccgccaccgccgagagagagaagctgatcgccgagctgggcagaaaggagatggagcccaagagccaccacaccctgaagatcgcccaccagaccatcgccaacatgcaggccagactgaaccagaaggaggaggtgctgaagaagtaccagagactgctggagaaggccagagaggagcagagagagatcgtgaagaagcacgaggaggacctgcacatcctgcaccacagactggagctgcaggccgacagcagcctgaacaagttcaagcagaccgcctgggacctgatgaagcagagccccacccccgtgcccaccaacaagcacttcatcagactggccgagatggagcagaccgtggccgagcaggacgacagcctgagcagcctgctggtgaagctgaagaaggtgagccaggacctggagagacagagagagatcaccgagctgaaggtgaaggagttcgagaacatcaagctgcagctgcaggagaaccacgaggacgaggtgaagaaggtgaaggccgaggtggaggacctgaagtacctgctggaccagagccagaaggagagccagtgcctgaagagcgagctgcaggcccagaaggaggccaacagcagagcccccaccaccaccatgagaaacctggtggagagactgaagagccagctggccctgaaggagaagcagcagaaggccctgagcagagccctgctggagctgagagccgagatgaccgccgccgccgaggagagaatcatcagcgccaccagccagaaggaggcccacctgaacgtgcagcagatcgtggacagacacaccagagagctgaagacccaggtggaggacctgaacgagaacctgctgaagctgaaggaggccctgaagaccagcaagaacagagagaacagcctgaccgacaacctgaacgacctgaacaacgagctgcagaagaagcagaaggcctacaacaagatcctgagagagaaggaggagatcgaccaggagaacgacgagctgaagagacagatcaagagactgaccagcggcctgcagggcaagcccctgaccgacaacaagcagagcctgatcgaggagctgcagagaaaggtgaagaagctggagaaccagctggagggcaaggtggaggaggtggacctgaagcccatgaaggagaagaacgccaaggaggagctgatcagatgggaggagggcaagaagtggcaggccaagatcgagggcatcagaaacaagctgaaggagaaggagggcgaggtgttcaccctgaccaagcagctgaacaccctgaaggacctgttcgccaaggccgacaaggagaagctgaccctgcagagaaagctgaagaccaccggcatgaccgtggaccaggtgctgggcatcagagccctggagagcgagaaggagctggaggagctgaagaagagaaacctggacctggagaacgacatcctgtacatgagagcccaccaggccctgcccagagacagcgtggtggaggacctgcacctgcagaacagatacctgcaggagaagctgcacgccctggagaagcagttcagcaaggacacctacagcaagcccagcatcagcggcatcgagagcgacgaccactgccagagagagcaggagctgcagaaggagaacctgaagctgagcagcgagaacatcgagctgaagttccagctggagcaggccaacaaggacctgcccagactgaagaaccaggtgagagacctgaaggagatgtgcgagttcctgaagaaggagaaggccgaggtgcagagaaagctgggccacgtgagaggcagcggcagaagcggcaagaccatccccgagctggagaagaccatcggcctgatgaagaaggtggtggagaaggtgcagagagagaacgagcagctgaagaaggccagcggcatcctgaccagcgagaagatggccaacatcgagcaggagaacgagaagctgaaggccgagctggagaagctgaaggcccacctgggccaccagctgagcatgcactacgagagcaagaccaagggcaccgagaagatcatcgccgagaacgagagactgagaaaggagctgaagaaggagaccgacgccgccgagaagctgagaatcgccaagaacaacctggagatcctgaacgagaagatgaccgtgcagctggaggagaccggcaagagactgcagttcgccgagagcagaggcccccagctggagggcgccgacagcaagagctggaagagcatcgtggtgaccagaatgtacgagaccaagctgaaggagctggagaccgacatcgccaagaagaaccagagcatcaccgacctgaagcagctggtgaaggaggccaccgagagagagcagaaggtgaacaagtacaacgaggacctggagcagcagatcaagatcctgaagcacgtgcccgagggcgccgagaccgagcagggcctgaagagagagctgcaggtgctgagactggccaaccaccagctggacaaggagaaggccgagctgatccaccagatcgaggccaacaaggaccagagcggcgccgagagcaccatccccgacgccgaccagctgaaggagaagatcaaggacctggagacccagctgaagatgagcgacctggagaagcagcacctgaaggaggagatcaagaagctgaagaaggagctggagaacttcgaccccagcttcttcgaggagatcgaggacctgaagtacaactacaaggaggaggtgaagaagaacatcctgctggaggagaaggtgaagaagctgagcgagcagctgggcgtggagctgaccagccccgtggccgccagcgaggagttcgaggacgaggaggagagccccgtgaacttccccatctactag

SEQ ID NO: 217905 - protein, 508 aa, Artificial Sequence
  derived and/or modified sequence
MELDSALEAPSQEDSNLSEELSHSAFGQAFSKILHCLARPEARRGNVKDAVLKDLGDLIEATEFDRLFEGTGARLRGMPETLGQVAKALEKYAAPSKEEEGGGDGHSEAAEKAAQVGLLFLKLLGKVETAKNSLVGPAWQTGLHHLAGPVYIFAITHSLEQPWTTPRSREVAREVLTSLLQVTECGSVAGFLHGENEDEKGRLSVILGLLKPDLYKESWKNNPAIKHVFSWTLQQVTRPWLSQHLERVLPASLVISDDYQTENKILGVHCLHHIVLNVPAADLLQYNRAQVLYHAISNHLYTPEHHLIQAVLLCLLDLFPILEKTLHWKGDGARPTTHCDEVLRLILTHMEPEHRLLLRRTYARNLPAFVNRLGILTVRHLKRLERVIIGYLEVYDGPEEEARLKILETLKLLMQHTWPRVSCRLVVLLKALLKLICDVARDPNLTPESVKSALLQEATDCLILLDRCSQGRVKGLLAKIPQSCEDRKVVNYIRKVQQVSEGAPYNGT

SEQ ID NO: 217906 - protein, 497 aa, Artificial Sequence
  derived and/or modified sequence
MELDSALEAPSQEDSNLSEELSHSAFGQAFSKILHCLARPEARRGNVKDAVLKDLGDLIEATEFDRLFEGTGARLRGMPETLGQVAKALEKYAAPSKEEEGGGDGHSEAAEKAAQVGLLFLKLLGKVETAKNSLVGPAWQTGLHHLAGPVYIFAITHSLEQPWTTPRSREVAREVLTSLLQVTECGSVAGFLHGENEDEKGRLSVILGLLKPDLYKESWKNNPAIKHVFSWTLQQVTRPWLSQHLERVLPASLVISDDYQTENKILGVHCLHHIVLNVPAADLLQYNRAQVLYHAISNHLYTPEHHLIQAVLLCLLDLFPILEKTLHWKGDGARPTTHCDEVLRLILTHMEPEHRLLLRRTYARNLPAFVNRLERVIIGYLEVYDGPEEEARLKILETLKLLMQHTWPRVSCRLVVLLKALLKLICDVARDPNLTPESVKSALLQEATDCLILLDRCSQGRVKGLLAKIPQSCEDRKVVNYIRKVQQVSEGAPYNGT

SEQ ID NO: 217907 - protein, 101 aa, Artificial Sequence
  derived and/or modified sequence
MELDSALEAPSQEDSNLSEELSHSAFGQAFSKILHCLARPEARRGNVKDAVLKDLGDLIEATEFDRLFEGTGARLRGMPETLGQVAKALEKYAAPSKEEEG

SEQ ID NO: 217908 - DNA, 1527 bp, Artificial Sequence
  derived and/or modified sequence
atggagctggacagcgccctggaggcccccagccaggaggacagcaacctgagcgaggagctgagccacagcgccttcggccaggccttcagcaagatcctgcactgcctggccagacccgaggccagaagaggcaacgtgaaggacgccgtgctgaaggacctgggcgacctgatcgaggccaccgagttcgacagactgttcgagggcaccggcgccagactgagaggcatgcccgagaccctgggccaggtggccaaggccctggagaagtacgccgcccccagcaaggaggaggagggcggcggcgacggccacagcgaggccgccgagaaggccgcccaggtgggcctgctgttcctgaagctgctgggcaaggtggagaccgccaagaacagcctggtgggccccgcctggcagaccggcctgcaccacctggccggccccgtgtacatcttcgccatcacccacagcctggagcagccctggaccacccccagaagcagagaggtggccagagaggtgctgaccagcctgctgcaggtgaccgagtgcggcagcgtggccggcttcctgcacggcgagaacgaggacgagaagggcagactgagcgtgatcctgggcctgctgaagcccgacctgtacaaggagagctggaagaacaaccccgccatcaagcacgtgttcagctggaccctgcagcaggtgaccagaccctggctgagccagcacctggagagagtgctgcccgccagcctggtgatcagcgacgactaccagaccgagaacaagatcctgggcgtgcactgcctgcaccacatcgtgctgaacgtgcccgccgccgacctgctgcagtacaacagagcccaggtgctgtaccacgccatcagcaaccacctgtacacccccgagcaccacctgatccaggccgtgctgctgtgcctgctggacctgttccccatcctggagaagaccctgcactggaagggcgacggcgccagacccaccacccactgcgacgaggtgctgagactgatcctgacccacatggagcccgagcacagactgctgctgagaagaacctacgccagaaacctgcccgccttcgtgaacagactgggcatcctgaccgtgagacacctgaagagactggagagagtgatcatcggctacctggaggtgtacgacggccccgaggaggaggccagactgaagatcctggagaccctgaagctgctgatgcagcacacctggcccagagtgagctgcagactggtggtgctgctgaaggccctgctgaagctgatctgcgacgtggccagagaccccaacctgacccccgagagcgtgaagagcgccctgctgcaggaggccaccgactgcctgatcctgctggacagatgcagccagggcagagtgaagggcctgctggccaagatcccccagagctgcgaggacagaaaggtggtgaactacatcagaaaggtgcagcaggtgagcgagggcgccccctacaacggcacctag

SEQ ID NO: 217909 - DNA, 1494 bp, Artificial Sequence
  derived and/or modified sequence
atggagctggacagcgccctggaggcccccagccaggaggacagcaacctgagcgaggagctgagccacagcgccttcggccaggccttcagcaagatcctgcactgcctggccagacccgaggccagaagaggcaacgtgaaggacgccgtgctgaaggacctgggcgacctgatcgaggccaccgagttcgacagactgttcgagggcaccggcgccagactgagaggcatgcccgagaccctgggccaggtggccaaggccctggagaagtacgccgcccccagcaaggaggaggagggcggcggcgacggccacagcgaggccgccgagaaggccgcccaggtgggcctgctgttcctgaagctgctgggcaaggtggagaccgccaagaacagcctggtgggccccgcctggcagaccggcctgcaccacctggccggccccgtgtacatcttcgccatcacccacagcctggagcagccctggaccacccccagaagcagagaggtggccagagaggtgctgaccagcctgctgcaggtgaccgagtgcggcagcgtggccggcttcctgcacggcgagaacgaggacgagaagggcagactgagcgtgatcctgggcctgctgaagcccgacctgtacaaggagagctggaagaacaaccccgccatcaagcacgtgttcagctggaccctgcagcaggtgaccagaccctggctgagccagcacctggagagagtgctgcccgccagcctggtgatcagcgacgactaccagaccgagaacaagatcctgggcgtgcactgcctgcaccacatcgtgctgaacgtgcccgccgccgacctgctgcagtacaacagagcccaggtgctgtaccacgccatcagcaaccacctgtacacccccgagcaccacctgatccaggccgtgctgctgtgcctgctggacctgttccccatcctggagaagaccctgcactggaagggcgacggcgccagacccaccacccactgcgacgaggtgctgagactgatcctgacccacatggagcccgagcacagactgctgctgagaagaacctacgccagaaacctgcccgccttcgtgaacagactggagagagtgatcatcggctacctggaggtgtacgacggccccgaggaggaggccagactgaagatcctggagaccctgaagctgctgatgcagcacacctggcccagagtgagctgcagactggtggtgctgctgaaggccctgctgaagctgatctgcgacgtggccagagaccccaacctgacccccgagagcgtgaagagcgccctgctgcaggaggccaccgactgcctgatcctgctggacagatgcagccagggcagagtgaagggcctgctggccaagatcccccagagctgcgaggacagaaaggtggtgaactacatcagaaaggtgcagcaggtgagcgagggcgccccctacaacggcacctag

SEQ ID NO: 217910 - DNA, 1527 bp, Artificial Sequence
  derived and/or modified sequence
atggaactcgacagcgctctggaagccccatctcaggaggacagtaacctgagtgaggaactgagtcactccgcttttggccaggccttcagcaaaattctgcactgccttgcaaggcctgaggccagacgtggaaatgtgaaagatgccgtactcaaggacttaggggatctgatcgaggcgactgagttcgatcggttattcgaagggaccggtgcaaggctgcgcggaatgccagaaacactgggtcaggttgccaaagcccttgaaaagtacgccgcgccttctaaagaggaggagggaggtggtgacggtcactccgaggcggctgagaaagccgcgcaggttggactgctgttccttaagcttctgggcaaggtggagacagccaaaaattctctcgtgggccctgcttggcaaaccgggctgcaccaccttgccggcccggtctatatatttgcaatcacccattcactcgagcagccttggacgaccccacggagtcgtgaagtggcccgcgaagtgttaacatctctgttgcaggtcacagagtgcggaagtgtcgcaggatttctgcatggggagaacgaagacgagaagggccggctctctgtcatactcgggctcttgaagcctgacttatataaagagtcttggaagaataatcccgcaatcaaacacgtgttttcctggacgctgcaacaagttacacgaccatggctatcccagcaccttgagagggtgctgcctgcgtctttggtcatatctgatgattatcaaactgaaaacaaaatactcggggtgcactgtctacaccacattgttctgaacgtccccgctgccgacctgctgcagtataatcgggcacaggtgttataccatgccatctcaaatcatctctacactcctgaacaccatctcatacaagccgttctcctgtgtctcttggacctttttccaatactagaaaagaccctccattggaagggggacggcgcacgcccaacaacccactgcgatgaggtactgagactgatcctcacgcacatggagccagagcatcggctgctgcttcgcagaacatacgcccggaatctcccggccttcgtaaatagactgggcattctgaccgtgaggcacttaaaacgcctggagcgcgtgattatcggctatctcgaagtatatgatggcccggaagaggaagccaggctgaagatcctcgagactcttaagctcttaatgcagcatacctggccacgggtatcctgtaggctggtggttctcttaaaggctctactgaaactgatctgtgatgttgctcgcgaccccaacctgaccccggaatctgtcaaaagcgctctgctacaggaggccacagattgcctcattctgctggaccggtgtagtcaggggcgcgttaagggcctgctggctaaaatcccacagtcctgcgaggacagaaaggtggttaactacatccggaaggtacagcaggtctctgaaggcgctccctataacgggacctag

SEQ ID NO: 217911 - DNA, 1527 bp, Artificial Sequence
  derived and/or modified sequence
atggagctcgactctgctctggaagctccatcccaggaggatagtaacctctcggaggaactgtcacatagcgcttttgggcaagcttttagcaaaatcctccactgcctggccagacccgaggccaggcgcgggaacgtgaaggacgcagtgctgaaggatcttggcgatctcatcgaggcaactgagtttgatcggctctttgaggggacaggcgcaaggctgagggggatgcctgagacgctgggccaggtggccaaggcacttgaaaaatatgcagctcccagcaaggaggaagaaggaggaggcgacggccactctgaggcagccgaaaaagctgcccaggtgggactgcttttcctgaagctgctgggcaaggtggagacagcaaaaaatagcctcgtgggcccggcatggcagactgggctgcaccatctcgctggcccagtgtacatattcgctattacccattcccttgaacagccttggacaacgccacggagccgagaagtggcaagagaggtccttactagccttctgcaggttacagaatgtgggtccgtggctgggttcctacacggcgagaacgaagacgagaagggacggttatcggtaatcttgggactgttgaagccagacttgtataaggagtcttggaaaaataaccccgctatcaagcacgtgttctcatggacccttcagcaggtcactagaccctggctgtctcagcatctggagagagtgctaccagccagtctagtcatttccgatgactaccagactgagaataagattctcggcgtccattgcctgcaccacatcgtcctgaatgttccggccgccgacctgctgcagtataatcgggcccaggtgctataccacgcaattagcaatcacttatacactcctgagcatcatctgattcaggcagtcttgctttgccttctcgatctgtttccaatcctggaaaaaaccctgcactggaagggcgacggagcccgccccaccactcactgcgacgaggttctccggctgatcctgacccatatggaacccgagcaccgcctgctactccgtagaacgtatgctagaaacttgccggcattcgttaataggttaggaatcttgaccgtacgtcatctaaagagactcgaacgcgtgattatcgggtatttagaggtgtacgatggtcccgaggaagaagcacgactaaagatcctcgagactcttaagttactgatgcagcacacatggcccagagtgtcctgtcgcctggtggtattacttaaggccctcctcaaactgatttgtgatgtcgcacgcgatcctaatcttacccccgagtccgttaagtctgcactcctccaagaagccacagactgcctcatccttctggatcgttgtagtcagggccgggtgaaaggattattggcgaaaattcctcagtcctgcgaagatagaaaggttgtgaactacattcgaaaggtgcagcaagttagcgagggtgcaccctataacggcacctag

SEQ ID NO: 217912 - DNA, 1494 bp, Artificial Sequence
  derived and/or modified sequence
atggaactcgatagtgccctggaagcaccatctcaggaggattctaatctgtcagaggagctctcccactccgcttttggacaggcgttcagcaaaatcctccactgtctggcccggcctgaagcaagacgtggtaatgtcaaggacgctgtgttaaaagacctgggggacctcattgaggccacggaattcgacagactgtttgagggcactggagcccggctccgagggatgcccgagaccctgggacaggttgcgaaagctcttgagaagtatgctgcccctagcaaagaagaggaaggcgggggcgacggacactctgaagctgcagagaaggcagcccaggtgggcctactctttctgaaactgctggggaaagtcgagactgcgaagaactcactcgtcggtcccgcatggcagacgggcctgcaccaccttgccggacccgtctacatctttgccattacccactctctggagcagccctggacaacacctcggtcccgggaggtggcccgcgaagttctgacgtctttactgcaggtcaccgagtgtggttcagtggccgggtttcttcacggagaaaatgaggatgagaaaggccgtttaagtgtaatactggggttgctcaaacctgacctctataaggagagttggaagaacaatcccgccatcaagcacgtgtttagctggacgttgcagcaagtgacacgaccgtggctctctcagcacttggagagggtgcttcccgcatctctggtgatctccgacgattaccagacggaaaataagatccttggtgtgcattgtctccaccacatcgtgcttaacgtccccgctgcagacctgttacagtacaaccgcgcccaggtcttatatcacgcgatcagtaaccacctgtacactccagagcatcacttaatccaggccgtactgttgtgtctcctggacctctttccaatcctggaaaaaacactccattggaagggggacggcgcccgacccacaacccactgtgatgaggtgctcagactgattttgacacacatggaaccagaacaccggctgttgcttcggaggacctatgctagaaatctcccagcctttgtcaacagactcgaaagagtgatcattggttatttagaagtgtacgacgggcctgaagaagaggcacgcctgaaaattctagaaacactgaagctacttatgcaacacacctggccacgcgtgtcttgccgactcgttgtactgctcaaggctctgcttaagcttatctgcgatgttgctcgggatcccaacctgaccccggaaagtgtcaagagtgccctgttgcaggaggcaaccgattgcttgatcctgctggatagatgttctcagggccgagtgaaggggctcctcgcgaagataccgcagtcctgtgaggatcggaaggtggttaactacataaggaaggttcagcaggtgagtgaaggcgctccttacaatggcacttag

SEQ ID NO: 217913 - DNA, 1527 bp, Artificial Sequence
  derived and/or modified sequence
atggagctggacagcgccctggaggcccccagccaggaggacagcaacctgtctgaggagctgagccacagcgccttcggccaggccttcagcaagatcctgcactgcctggcccggcctgaggccaggagaggaaatgtgaaggatgctgtgctgaaggacctgggggacctgattgaggccacagaatttgaccggctgtttgagggcactggagcccggctgcggggcatgcctgagaccctgggccaggtggccaaggccctggagaagtatgctgcccccagcaaggaggaggagggcggcggagatggccacagcgaggccgctgagaaggccgcccaggtgggcctgctcttcctgaagctgctgggcaaggtggagacagccaagaacagcctggtgggccctgcctggcagacaggcctgcaccacctggccggccctgtgtacatctttgccatcacccacagcctggagcagccctggaccacccccaggagccgggaggtggcccgggaggtgctgaccagcctgctgcaggtgacagaatgtggctctgtggccggcttcctgcatggagaaaatgaagatgagaagggccgcctgagcgtcatcctgggcctgctgaagccagacctgtacaaggagagctggaagaacaacccagccatcaagcacgtgttctcctggaccctgcagcaggtgacccggccctggctgagccagcacctggagcgggtgctgcctgccagcctggtgatcagtgatgactaccagacagagaacaagatcctgggcgtgcactgcctgcaccacatcgtgctgaatgtgcctgctgctgacctgctgcagtacaacagagcccaggtgctgtaccacgccatcagcaaccacctgtacaccccagagcaccacctgatccaggccgtgctgctgtgcctgctggacctcttccccatcctggagaagaccctgcactggaagggagatggagcccggcccaccacccactgtgatgaggtgctgcggctcatcctgacccacatggagcctgagcaccggctgctgctgcggaggacctacgccaggaacctgcctgcctttgtgaaccggctgggcatcctgactgtgcgccacctgaagaggctggagagggtcatcatcggctacctggaggtgtatgatggccctgaggaggaggcccggctgaagatcctggagaccctgaagctgctgatgcagcacacctggccccgggtgtcctgccgcctggtggtgctgctgaaggccctgctgaagctgatctgtgatgtggcccgggaccccaacctgaccccagagagcgtgaagagcgccctgctgcaggaggccacagactgcctgatcctgctggaccgctgcagccagggccgggtgaagggcctgctggccaagatcccccagagctgtgaggacaggaaggtggtgaactacatcaggaaggtgcagcaggtgtctgagggcgccccctacaacggcacctag

SEQ ID NO: 217914 - DNA, 1494 bp, Artificial Sequence
  derived and/or modified sequence
atggagctggacagcgccctggaggcccccagccaggaggacagcaacctgtctgaggagctgagccacagcgccttcggccaggccttcagcaagatcctgcactgcctggcccggcctgaggccaggagaggaaatgtgaaggatgctgtgctgaaggacctgggggacctgattgaggccacagaatttgaccggctgtttgagggcactggagcccggctgcggggcatgcctgagaccctgggccaggtggccaaggccctggagaagtatgctgcccccagcaaggaggaggagggcggcggagatggccacagcgaggccgctgagaaggccgcccaggtgggcctgctcttcctgaagctgctgggcaaggtggagacagccaagaacagcctggtgggccctgcctggcagacaggcctgcaccacctggccggccctgtgtacatctttgccatcacccacagcctggagcagccctggaccacccccaggagccgggaggtggcccgggaggtgctgaccagcctgctgcaggtgacagaatgtggctctgtggccggcttcctgcatggagaaaatgaagatgagaagggccgcctgagcgtcatcctgggcctgctgaagccagacctgtacaaggagagctggaagaacaacccagccatcaagcacgtgttctcctggaccctgcagcaggtgacccggccctggctgagccagcacctggagcgggtgctgcctgccagcctggtgatcagtgatgactaccagacagagaacaagatcctgggcgtgcactgcctgcaccacatcgtgctgaatgtgcctgctgctgacctgctgcagtacaacagagcccaggtgctgtaccacgccatcagcaaccacctgtacaccccagagcaccacctgatccaggccgtgctgctgtgcctgctggacctcttccccatcctggagaagaccctgcactggaagggagatggagcccggcccaccacccactgtgatgaggtgctgcggctcatcctgacccacatggagcctgagcaccggctgctgctgcggaggacctacgccaggaacctgcctgcctttgtgaaccggctggagagggtcatcatcggctacctggaggtgtatgatggccctgaggaggaggcccggctgaagatcctggagaccctgaagctgctgatgcagcacacctggccccgggtgtcctgccgcctggtggtgctgctgaaggccctgctgaagctgatctgtgatgtggcccgggaccccaacctgaccccagagagcgtgaagagcgccctgctgcaggaggccacagactgcctgatcctgctggaccgctgcagccagggccgggtgaagggcctgctggccaagatcccccagagctgtgaggacaggaaggtggtgaactacatcaggaaggtgcagcaggtgtctgagggcgccccctacaacggcacctag

SEQ ID NO: 217915 - DNA, 1527 bp, Artificial Sequence
  derived and/or modified sequence
atggagctggacagcgccctggaggcccccagccaggaggacagcaacctctcagaggagctatcacactcggcgtttggacaagctttctccaagatccttcactgtctggcacgtcccgaggccagacggggcaatgtgaaggatgctgttttaaaggacctgggcgacctcattgaggctacggaatttgatagactgttcgaaggcacgggggcccgcctacgtggaatgcctgaaactctggggcaagtggcgaaggctctggaaaagtacgctgcaccatcgaaggaagaggagggaggaggggatggacactccgaagccgcagagaaggccgcgcaggtcggcctgttatttttgaagcttttgggaaaggtggagacagccaagaatagtcttgtggggccggcctggcagacaggcctacaccatttagcaggtcccgtgtatattttcgccatcacacatagtcttgagcagccatggaccaccccaagaagccgggaggtcgcccgggaggttcttaccagcctcctccaggtgactgagtgcggtagcgtcgcaggatttctacacggcgaaaatgaagatgaaaaggggagactgtcggtgattctgggcctgttgaagcctgatctgtacaaagagtcgtggaaaaacaacccagccattaagcatgtcttttcctggaccctgcagcaggtgacgcgaccatggctttcccagcatctcgagagagtattgccagcctcactggtgataagcgatgattatcagacagagaacaaaatactgggtgtccactgtctgcatcacatcgtgctgaacgtgcctgccgctgatcttttgcagtataatagagcgcaggtcttgtaccacgctatttccaatcatctttacactccggaacatcacctgatccaggccgtgctattatgcctacttgacctgtttcccatcctggagaagacactccactggaaaggggacggtgccagaccaaccacgcactgcgatgaggtgctgcggctgatacttactcatatggaacccgaacacagattgctcctgcgccggacttacgcgcgtaatctgccggcattcgtgaatcggctgggcatcctcacggtgcgccacctcaagcggttagagcgtgtcatcattgggtacctggaggtgtatgacggtccagaagaggaagcccgcttgaagattctcgagacactgaagctcttaatgcaacacacctggcctagagtgagttgtcgattggtcgtcctcctgaaggccttgctgaagctgatctgcgacgtagctcgcgatcctaacctgacacccgagtctgttaaatccgctttgcttcaggaagccaccgactgcttaatcctcctcgatcggtgcagccagggaagagtcaaagggttgcttgctaagatcccacagagttgtgaagatagaaaggtggtgaactacattcgaaaggtgcagcaggtgtccgaaggagctccgtacaacggcacttag

SEQ ID NO: 217916 - DNA, 1527 bp, Artificial Sequence
  derived and/or modified sequence
atggagctggacagcgccctggaggcccccagccaggaggacagcaacctcagcgaagagctgagtcattctgcattcggccaagccttttccaaaatcttgcactgcttggcaagacccgaggcaagacgcggaaatgtaaaagatgccgtattgaaggacttgggcgaccttatcgaggctactgagtttgatcgactatttgaggggactggggcaagacttaggggcatgcccgaaacactcggacaggtggccaaggccctggaaaagtatgctgcaccatcaaaagaggaggagggcggcggcgacggtcacagcgaggccgctgaaaaggccgctcaggtgggcctcttgttcttgaaactcctcggtaaagttgagactgcgaaaaattccctggtggggcctgcatggcagacaggtcttcatcacctggctgggcccgtgtacatttttgcaatcacacatagtctagaacaaccctggacaacacctcgctccagggaagtggctcgcgaggtactgacctcactgttacaggtgacggaatgtggcagcgtggccggctttctgcacggcgaaaatgaggatgaaaaaggtcggctgtctgtgatcctgggactgttgaaacctgacctttacaaggagtcttggaagaacaatccagccatcaagcatgttttctcatggacacttcagcaggtaacccgtccatggcttagtcagcatctggaacgcgttctgcctgctagtctggtgatttcagatgactaccagacggagaacaagatcctcggggtccattgtctgcatcatattgtccttaacgttccagcagccgatctcctgcagtataatcgggctcaggtattgtatcacgctatctccaaccacctatatacaccggaacaccacctaattcaggcagtgcttctttgcttgcttgacctgtttcccatcctggagaagactctgcactggaaaggtgatggcgcccgaccaacgacccactgcgatgaagtgttgagacttatcttgacacatatggaacctgaacaccgcctgcttcttaggcgcacatatgctcgcaatctcccggccttcgttaaccgcctcggcattctcactgtgcggcatctcaagcggttggaaagggtgattattgggtatctcgaggtatacgacggccctgaggaagaggctaggctgaagatccttgaaacccttaagctgttgatgcagcacacatggccccgggtctcatgccgcctggtggttctccttaaagccctgttgaagctgatttgcgatgttgctcgcgatcctaacttgaccccagagagcgtgaaatccgcgctcttacaggaggctaccgactgcctcatccttctggacaggtgttcccaagggcgcgtgaaagggctgttagccaagattcctcagtcttgcgaagacagaaaagttgttaattacatccgaaaagtgcagcaagtgagtgaaggagccccttacaacggcacttag

SEQ ID NO: 217917 - DNA, 1494 bp, Artificial Sequence
  derived and/or modified sequence
atggagctggacagcgccctggaggcccccagccaggaggacagcaacctgagtgaagagctatcacactccgcttttggacaggctttcagcaaaattctgcactgtctcgcccgtcctgaagccaggagggggaatgtgaaggatgccgttctcaaggacctgggagatctcatcgaggccaccgaatttgataggctcttcgagggcaccggcgctagactgcgaggtatgccagaaactctgggacaggtcgccaaagccttggaaaagtacgccgcccctagtaaggaggaggaagggggaggagatgggcattctgaagcggccgaaaaggccgcccaggtggggctgctgtttctgaaattactcggaaaggtggagacagccaaaaactccctcgtcgggccagcttggcagacgggccttcatcacctagctggtcctgtgtatatcttcgccatcactcatagtctggagcaaccttggacgacgccacggtctagggaagtcgcgcgggaagtattgacatctctcctgcaggtaacagagtgcggctccgtcgccggtttccttcacggtgagaacgaggacgagaaggggaggctctcagtgatcctggggctgctgaagcccgatttatataaggagagttggaagaacaatccggcgattaaacatgtattttcttggacgcttcagcaggtgacccgtccatggttatcgcaacatttagaacgcgtgctgccagcctcactggtgattagtgacgattaccagaccgaaaataaaattctgggtgtccattgccttcaccatattgtgctgaacgtacccgcagccgaccttcttcagtataatcgggcgcaggttctgtatcatgccataagcaaccacctgtacacgccagaacaccatctgatccaggcagtcctgctgtgcctcctcgacctattcccaatccttgaaaagaccttgcactggaagggtgatggggcccgaccgacgacccactgtgacgaggtgcttaggctgatactgacccacatggagccagagcaccgtttgctccttcgtcggacatacgcaaggaatctgccggcgtttgtgaatcgccttgaaagagtcattattggctatttagaagtatatgatggacctgaagaagaagcaaggctgaagatcttggagactttgaagcttctgatgcagcacacatggccacgggtgtcgtgtcgtctggtagtcctgctgaaggccctgttgaagcttatctgtgacgtcgcacgcgatcctaacctcacccccgaatctgttaagagcgcgttgctgcaagaggccaccgattgcctaattttgcttgatcgctgctcacagggcagagtcaaagggctcttggccaaaatccctcaaagttgtgaggataggaaggtggtgaattatatccgtaaagtccagcaggtgtccgagggggcaccctacaatggcacgtag

SEQ ID NO: 217918 - DNA, 1527 bp, Artificial Sequence
  derived and/or modified sequence
atggagctggactctgccttggaagccccatcgcaggaggactctaacttaagcgaggagctcagccatagcgcttttgggcaagcgttctcgaaaatactccattgtttagctagacctgaagccagacgtggcaacgttaaagacgccgttcttaaggacctgggggatcttatcgaggccacggagtttgatcggctttttgaaggaacgggagcgagactgagagggatgccagaaacgctgggacaggtggcgaaagcactggagaagtatgctgccccaagcaaggaggaggagggcggaggcgacggacatagtgaggccgcagaaaaggccgctcaggttgggttgcttttccttaaattgctggggaaggtcgaaaccgccaaaaactcactggtgggacccgcttggcagaccggactgcaccacctggccggacctgtgtacattttcgcaatcactcactccctggagcagccatggaccacccctcgcagccgcgaggtcgccagagaggtgctaactagtttattgcaagtgaccgagtgcggaagcgtggccggattcttgcatggcgagaacgaggacgaaaaaggtcgtttgagcgtcatcctaggcctgcttaagcctgatctttataaggaaagttggaaaaataatcctgcaatcaaacatgttttcagctggactctgcagcaggttacaaggccgtggctctctcagcaccttgaacgtgtattacccgcatcgcttgtgattagtgacgattaccagactgagaataagatattgggcgtgcattgcctgcatcatattgtgttgaacgtccctgctgcagacctgctgcaatataacagagcacaagtgttgtaccatgccatttccaaccatctctacactccagaacaccaccttattcaggccgtcctgctgtgtttacttgatctgtttcctatcctcgaaaagacattacactggaagggagacggggcacggccaaccacacactgtgacgaggtcctgaggctcatccttactcatatggagccagagcaccggctgctgctgcggaggacatatgctaggaatctgcctgccttcgtaaacagacttggcatactgacagtgcgacacctcaagcgcctagagcgggtgataattgggtatctcgaagtgtacgacgggccagaggaggaggccaggttgaagatactggaaaccctcaaactgctcatgcagcatacatggcccagggtctcttgtcggttggtggtgctgctgaaggccctgctgaaactgatttgcgacgtggcacgtgatccaaatctgacaccggagagtgttaagagcgcacttctccaggaagccacagattgcctgatccttctggataggtgctcccaggggagagtcaaggggctgctggcaaagatcccgcagagctgcgaagacagaaaggttgtcaactacatcagaaaggtccagcaggtctcagaaggggcaccctataatggaacttag

SEQ ID NO: 217919 - DNA, 1527 bp, Artificial Sequence
  derived and/or modified sequence
atggagcttgacagtgcactcgaggccccttcgcaagaagattctaacctgagtgaggagttatctcatagcgcattcgggcaggcatttagcaagatcctgcattgcctcgccaggcctgaagctaggcgtggtaatgtcaaggacgctgtgcttaaggatctaggcgacttgatcgaggccactgaattcgatagactgttcgagggcacgggcgcacgtctacggggtatgcccgaaacactgggacaagtcgccaaggctctagaaaaatatgctgctccttctaaggaagaagaaggcggaggggacgggcactccgaggctgccgagaaagctgcccaggtaggcttgttatttctcaagttgctcggtaaggtagaaaccgccaaaaactcccttgttggaccggcttggcagactggattgcaccaccttgcgggaccagtgtatatcttcgctatcactcattccttggagcaaccttggactactcctaggagcagagaagtagcacgcgaggtgctgacaagcctgctacaagtaaccgagtgcgggtccgtcgccggatttcttcacggcgagaacgaggacgaaaaaggcaggttaagcgtgatcctcggtcttctcaaaccagatctctacaaagagtcatggaagaacaacccagccatcaaacacgtttttagctggactctgcagcaggtgacccgaccatggctttcccagcaccttgagagagtccttcccgctagccttgtaattagcgatgactatcagaccgagaacaaaatcctgggcgtccattgcctccaccatattgttctgaacgtgcctgccgctgacttgcttcagtacaaccgagcacaggtattataccacgccatcagcaatcacttgtacacaccggagcatcacttgattcaggcagtcctgctatgcctgttggatctctttccaattctggagaaaaccctgcattggaaaggagacggggctcgtcctaccacacactgcgatgaggtactcaggctaatactgactcacatggaacccgaacatcgattgcttctgcgcaggacctatgccaggaaccttccagcgttcgtgaacagactaggcatactgacagtcaggcatttgaagcggttggaacgggtgatcattggatatcttgaggtgtacgatggcccagaagaggaggcaagactgaagatccttgaaaccctcaagctgttaatgcagcatacttggccacgggtctcctgtcggcttgtagtgttgctgaaagccctgctcaagctgatatgtgatgtggcccgtgatcctaaccttactccagagagcgtgaagtccgccctgctgcaggaggcgacagactgtctcattctactggatagatgttcccaaggtagagtgaaaggactcctcgccaaaattcctcaatcttgtgaagaccgcaaagtcgttaattacatcagaaaagtgcagcaggtgagcgaaggagccccttacaacggtacctag

SEQ ID NO: 217920 - DNA, 1494 bp, Artificial Sequence
  derived and/or modified sequence
atggaattagacagcgcactcgaggccccaagtcaagaggacagtaatctaagtgaggaattaagccacagcgcctttggccaggcgtttagtaaaattttgcattgtcttgctcgaccagaggctaggcgaggcaacgtgaaagacgccgtactgaaagatctcggagatctgattgaagcaaccgaattcgatcgtctgtttgaaggaactggcgcaagactccgcggaatgccggagactctggggcaggtggcaaaagcgttagaaaagtacgctgctcctagcaaggaagaggaaggcggaggagatggacattctgaggcggcagagaaagcggctcaggtaggattgttgttcctgaagcttttgggcaaggtagagaccgctaagaactctcttgtgggcccagcttggcaaactggtcttcaccatttagcaggtccagtatacatcttcgccatcactcactctctagaacagccatggaccactcccaggtccagggaagttgctcgcgaagtgctcactagcctgctgcaggtgaccgaatgtggaagcgtggctggcttcttgcatggtgagaacgaggacgagaagggacggctttccgtaatcctgggcctcctgaagcccgacctgtacaaggagtcttggaaaaataaccctgcaattaaacacgtcttcagctggacactacagcaggtcacacgtccttggctgtcccagcatctcgaacgcgtgttgccagccagcttagtgatcagtgatgactaccagaccgaaaacaagatcctaggcgtgcattgcctccatcacatcgttctcaatgtacccgcagccgacttgctgcagtataaccgagcgcaagtcctctaccacgccatctccaatcatctgtatacaccagaacatcacctgatacaagctgtgctactgtgcctgctcgacctctttcccattctcgaaaagaccctccattggaagggggatggagccagaccaaccacacattgcgacgaagtcctgagattaattcttacccatatggaaccagaacaccggctgctgctgaggcgcacctacgcgcgaaatttgcctgcctttgtgaaccggttggagcgcgttatcatcggttatctggaagtttacgacggcccagaagaagaggctcgactgaaaatcttagagactctgaaacttcttatgcaacatacctggccacgggtctcttgtaggctcgtagtgctgctgaaggccttgttgaaactgatatgtgacgttgccagagatcctaacctgacccctgagtctgtgaagtccgcccttctgcaggaagccaccgactgtttgatcctgctcgatagatgcagtcaggggagagtcaaggggttgctggcaaaaattccacagtcctgcgaggatcgcaaggtcgtaaattatattcgaaaagttcaacaggtaagtgagggcgcaccatacaatgggacgtag

SEQ ID NO: 217921 - DNA, 2242 bp, Artificial Sequence
  derived and/or modified sequence
agacaccggcgggcgcgagccgttgcaggtacctgggggtggttaagttggtgacatggctcagaagtttatttctttaaatttttaagttttttttctttttagtcttcagaaaggcaacagtagtcttttaacgtcactgttaaaagtgtaagactcttttactccctgagagtcccctttccctttcttgcgtcctttcctctttattcttttttttttttttttttttactgagacggagtctcactctgtcgcccaggctggagtgcagtggcgcgatctcggctcactgcaaactccgcctcccgggttcaccctttctctttattcttatcccggtcagactcgccccctcctccaagacatctctctgttttattttatttgattttagttctctttgggtgatcgctccttccctcttcaacggatccctccccgcctccatcctcgttctgtgggagagaccagccttctggtgctgcagtcaggaatggagcttgacagcgctctggaagccccatcgcaggaagactctaatttgtccgaggagttgtctcactccgcctttggacaggccttctccaagattttacactgtcttgcccgcccggaggcacgacgaggcaatgtaaaagatgcagttcttaaagacctcggtgatctaatagaagccacagaatttgataggttatttgaggggactggtgcacggctccgcggaatgccggagacactggggcaggtagcaaaagccctggagaagtatgcagccccctccaaggaggaggaaggtggaggtgatgggcactccgaagcggccgagaaagcagcccaagttgggttactgtttcttaaactgttagggaaagttgagactgctaagaattccctggtcggccctgcatggcagacgggcctgcatcacttggcaggacccgtttatatttttgccatcacacacagcttggagcaaccatggaccactccgagatctcgggaagttgctagggaggtgctcacctcactgcttcaagttactgaatgcggttctgtggcaggattcctacatggagaaaatgaagatgagaaagggagactttcggtgatactagggcttctcaaacccgacttgtataaggaatcctggaagaataaccctgccatcaaacatgttttctcatggactctgcaacaggtcactcggccctggctgagccagcatctggaaagggtacttcccgcatcattggtcatttcagatgactatcagactgagaacaaaatcctgggtgtacactgtctccatcacattgtgcttaatgtgccagctgctgatttgctccagtataacagagcccaggtcctataccatgccatttccaaccacctgtacacaccagagcaccacctcattcaggctgtgctcctgtgtctgctggatttattccccatcctggagaaaaccctgcactggaaaggagatggagctcgacccaccacccattgtgatgaggtcctgcggctgatcctgacccacatggagccagagcaccgccttcttttacgcaggacctacgcaagaaacctgccggctttcgtgaacaggttggggatcctaactgtccggcacttaaagaggctggagagagtcatcattggttatctggaggtttatgatggacctgaggaggaagctagactgaagatattggaaaccctaaaacttctcatgcaacatacttggcccagagtttcctgcagacttgtggtcttactgaaggccctcttgaaactgatttgtgatgtagcaagggatccaaaccttacacctgagtctgttaagagcgccctgctacaggaggccacagactgcctgattctcctggaccgctgttctcaaggacgggtaaagggtctcctggccaaaattccccaaagctgtgaagacagaaaagtggtgaactatatcagaaaagtgcagcaggtttctgaaggcgcaccctacaatggaacttaagacttgtattactttcccaagaggaaaggattttcttcccatcccaatttgtatgaatggagttatttaagaaaaaaagatatttttacacgaaactttgtaagtgaaagctgctttttccttccttcctttccttttacctccataagaatagggaaagtagaacaagaaaaaattgaactccttccatttctaaataaagtttgggagaaaaaagga

SEQ ID NO: 217922 - DNA, 2363 bp, Artificial Sequence
  derived and/or modified sequence
gttaaatcgatccttgaagttcaggtcagacgggtaatgtgcccacgtcgtaacaaggttcaagggtggcacatctcacacaagcgtatgaacacccaatcatcacgctcatgaactacaaaaggatcatcttatagttgacattaaggagtgccaagtatgtgccactaatttacacatagggtgactaccgtaatgcgatacatccattcttcacgtataaaatcctggatattttcaaagtcccactgagattctgtgattattcttttgtttctaccttagcaaaggaaaacagaaacacaattagcgagcggattattatatatgcaaatttattctctatagttccacctctccgtcattttcccgagcctggatctttattgctttacgaccatacgtcgtgaaataagaaggtgttgcggcagtactggcggaagctagccttgcgttttgcggcagcaatatgagctaggtccggatcctgttagacaccggcgggcgcgagccgttgcagttctctttgggtgatcgctccttccctcttcaacggatccctccccgcctccatcctcgttctgtgggagagaccagccttctggtgctgcagtcaggaatggagcttgacagcgctctggaagccccatcgcaggaagactctaatttgtccgaggagttgtctcactccgcctttggacaggccttctccaagattttacactgtcttgcccgcccggaggcacgacgaggcaatgtaaaagatgcagttcttaaagacctcggtgatctaatagaagccacagaatttgataggttatttgaggggactggtgcacggctccgcggaatgccggagacactggggcaggtagcaaaagccctggagaagtatgcagccccctccaaggaggaggaaggtggaggtgatgggcactccgaagcggccgagaaagcagcccaagttgggttactgtttcttaaactgttagggaaagttgagactgctaagaattccctggtcggccctgcatggcagacgggcctgcatcacttggcaggacccgtttatatttttgccatcacacacagcttggagcaaccatggaccactccgagatctcgggaagttgctagggaggtgctcacctcactgcttcaagttactgaatgcggttctgtggcaggattcctacatggagaaaatgaagatgagaaagggagactttcggtgatactagggcttctcaaacccgacttgtataaggaatcctggaagaataaccctgccatcaaacatgttttctcatggactctgcaacaggtcactcggccctggctgagccagcatctggaaagggtacttcccgcatcattggtcatttcagatgactatcagactgagaacaaaatcctgggtgtacactgtctccatcacattgtgcttaatgtgccagctgctgatttgctccagtataacagagcccaggtcctataccatgccatttccaaccacctgtacacaccagagcaccacctcattcaggctgtgctcctgtgtctgctggatttattccccatcctggagaaaaccctgcactggaaaggagatggagctcgacccaccacccattgtgatgaggtcctgcggctgatcctgacccacatggagccagagcaccgccttcttttacgcaggacctacgcaagaaacctgccggctttcgtgaacaggttggggatcctaactgtccggcacttaaagaggctggagagagtcatcattggttatctggaggtttatgatggacctgaggaggaagctagactgaagatattggaaaccctaaaacttctcatgcaacatacttggcccagagtttcctgcagacttgtggtcttactgaaggccctcttgaaactgatttgtgatgtagcaagggatccaaaccttacacctgagtctgttaagagcgccctgctacaggaggccacagactgcctgattctcctggaccgctgttctcaaggacgggtaaagggtctcctggccaaaattccccaaagctgtgaagacagaaaagtggtgaactatatcagaaaagtgcagcaggtttctgaaggcgcaccctacaatggaacttaagacttgtattactttcccaagaggaaaggattttcttcccatcccaatttgtatgaatggagttatttaagaaaaaaagatatttttacacgaaactttgtaagtgaaagctgctttttccttccttcctttccttttacctccataagaatagggaaagtagaacaagaaaaaattgaactccttccatttctaaataaagtttgggagaaaaaag

SEQ ID NO: 217923 - DNA, 1828 bp, Artificial Sequence
  derived and/or modified sequence
gggcgcgagccgttgcaggtacctgggggtggttaagttggtgacatggctcagaagtttatttctttaaatttttaagttttttttctttttagtcttcagaaaggcaacagtagtcttttaacgtcactgttaaaagtttctctttgggtgatcgctccttccctcttcaacggatccctccccgcctccatcctcgttctgtgggagagaccagccttctggtgctgcagtcaggaatggagcttgacagcgctctggaagccccatcgcaggaagactctaatttgtccgaggagttgtctcactccgcctttggacaggccttctccaagattttacactgtcttgcccgcccggaggcacgacgaggcaatgtaaaagatgcagttcttaaagacctcggtgatctaatagaagccacagaatttgataggttatttgaggggactggtgcacggctccgcggaatgccggagacactggggcaggtagcaaaagccctggagaagtatgcagccccctccaaggaggaggaaggtggaggtgatgggcactccgaagcggccgagaaagcagcccaagttgggttactgtttcttaaactgttagggaaagttgagactgctaagaattccctggtcggccctgcatggcagacgggcctgcatcacttggcaggacccgtttatatttttgccatcacacacagcttggagcaaccatggaccactccgagatctcgggaagttgctagggaggtgctcacctcactgcttcaagttactgaatgcggttctgtggcaggattcctacatggagaaaatgaagatgagaaagggagactttcggtgatactagggcttctcaaacccgacttgtataaggaatcctggaagaataaccctgccatcaaacatgttttctcatggactctgcaacaggtcactcggccctggctgagccagcatctggaaagggtacttcccgcatcattggtcatttcagatgactatcagactgagaacaaaatcctgggtgtacactgtctccatcacattgtgcttaatgtgccagctgctgatttgctccagtataacagagcccaggtcctataccatgccatttccaaccacctgtacacaccagagcaccacctcattcaggctgtgctcctgtgtctgctggatttattccccatcctggagaaaaccctgcactggaaaggagatggagctcgacccaccacccattgtgatgaggtcctgcggctgatcctgacccacatggagccagagcaccgccttcttttacgcaggacctacgcaagaaacctgccggctttcgtgaacaggctggagagagtcatcattggttatctggaggtttatgatggacctgaggaggaagctagactgaagatattggaaaccctaaaacttctcatgcaacatacttggcccagagtttcctgcagacttgtggtcttactgaaggccctcttgaaactgatttgtgatgtagcaagggatccaaaccttacacctgagtctgttaagagcgccctgctacaggaggccacagactgcctgattctcctggaccgctgttctcaaggacgggtaaagggtctcctggccaaaattccccaaagctgtgaagacagaaaagtggtgaactatatcagaaaagtgcagcaggtttctgaaggcgcaccctacaatggaacttaagacttgtattactttcccaagaggaaaggattttcttcccatcccaatttgtatgaatggagttatttaagaaaaaaagatatttttacacgaaa

SEQ ID NO: 217924 - protein, 195 aa, Artificial Sequence
  derived and/or modified sequence
MSAARPQFSIDDAFELSLEDGGPGPESSGVARFGPLHFERRARFEVADEDKQSRLRYQNLENDEDGAQASPEPDGGVGTRDSSRTSIRSSQWSFSTISSSTQRSYNTCCSWTQHPLIQKNRRVVLASFLLLLLGLVLILVGVGLEATPSPGVSSAIFFVPGFLLLVPGVYHVIFIYCAVKGHRGFQFFYLPYFEK

SEQ ID NO: 217925 - DNA, 588 bp, Artificial Sequence
  derived and/or modified sequence
atgagcgccgccagaccccagttcagcatcgacgacgccttcgagctgagcctggaggacggcggccccggccccgagagcagcggcgtggccagattcggccccctgcacttcgagagaagagccagattcgaggtggccgacgaggacaagcagagcagactgagataccagaacctggagaacgacgaggacggcgcccaggccagccccgagcccgacggcggcgtgggcaccagagacagcagcagaaccagcatcagaagcagccagtggagcttcagcaccatcagcagcagcacccagagaagctacaacacctgctgcagctggacccagcaccccctgatccagaagaacagaagagtggtgctggccagcttcctgctgctgctgctgggcctggtgctgatcctggtgggcgtgggcctggaggccacccccagccccggcgtgagcagcgccatcttcttcgtgcccggcttcctgctgctggtgcccggcgtgtaccacgtgatcttcatctactgcgccgtgaagggccacagaggcttccagttcttctacctgccctacttcgagaagtag

SEQ ID NO: 217926 - DNA, 588 bp, Artificial Sequence
  derived and/or modified sequence
atgtccgcagcccgtccccaattctccatcgatgacgcttttgagctgtcgttagaggacggaggccccggacccgagagctcgggcgtggcaaggtttggaccactgcacttcgagagaagagcccgtttcgaggtcgctgatgaggacaagcagtcccgcctgaggtatcaaaatttggaaaacgacgaggatggtgcccaagcttccccagaacccgacggtggagtaggaacacgtgactccagcaggacctcaatcaggagtagccagtggtcctttagtacaataagctcctccacccaaaggtcttataatacctgctgttcctggactcagcacccactcatacaaaagaatcgccgggtggtgctggcctctttcctccttctgctcctgggcctggtgctcatactggtcggcgtggggttggaagcaactccctccccgggggtgtcttccgccattttcttcgtgccaggatttcttttgctcgttcctggtgtatatcatgtgatctttatctactgcgcggtaaaaggccaccggggcttccagttcttttacctgccatatttcgagaaatag

SEQ ID NO: 217927 - DNA, 588 bp, Artificial Sequence
  derived and/or modified sequence
atgtctgctgcccggccccagttcagcattgatgatgcctttgagctgagcctggaggatggcggccctggccctgagagcagcggcgtggccaggtttggccccctgcactttgagcggcgggccaggtttgaggtggctgatgaggacaagcagagccggctgcgctaccagaacctggagaatgatgaagatggagcccaggccagccctgagccagatggcggcgtgggcacccgggacagcagcaggaccagcatccgcagcagccagtggagcttcagcaccatcagcagcagcacccagaggagctacaacacctgctgctcctggacccagcaccccctcatccagaagaacagaagagtggtgctggccagcttcctgctgctgctgctgggcctggtgctgatcctggtgggcgtgggcctggaggccacccccagccctggggtgagcagcgccatcttctttgtgcccggcttcctgctgctggtgcctggggtgtaccacgtgatcttcatctactgtgctgtgaagggccaccggggcttccagttcttctacctgccctactttgagaagtag

SEQ ID NO: 217928 - DNA, 588 bp, Artificial Sequence
  derived and/or modified sequence
atgagcgccgcccggccccagttcagcatcgacgacgccttcgagctgtcactagaggatggcggaccaggtccggagagtagcggtgtggcgcggtttggcccccttcatttcgaacgccgggcgcggtttgaagtagccgatgaagataagcagagtcggcttcggtatcaaaatctcgaaaacgatgaggacggtgcccaggccagtcccgaacccgacggcggggtcggtaccagagacagctcgcgcactagcatcaggtccagccagtggtccttttcgacaatcagctcatccacacaaaggagttataacacctgctgcagttggacccagcaccccctcatacaaaaaaatagaagagtcgtgttggcgtcttttcttctacttctcctgggattggtgctgattctagtgggggtgggacttgaggccactcccagcccaggtgtgagctccgcaatcttcttcgtgcccggattcttattgctcgtgccaggtgtgtatcacgttatctttatctactgcgccgtgaaaggacatcgcgggtttcagtttttttacctgccctactttgagaaatag

SEQ ID NO: 217929 - DNA, 588 bp, Artificial Sequence
  derived and/or modified sequence
atgagtgccgcacgaccacagttcagcatcgacgacgccttcgagttatccttagaagatggcggacctggcccagaatcatctggggtggcgcgatttggaccgctgcatttcgagcgcagggccagattcgaggtggcggatgaggacaaacagtcccgtttgcggtaccagaacttagaaaatgacgaagacggcgctcaagcgtcaccagagccagatggaggtgtagggacacgggactctagtagaacgagtattagatccagtcagtggagcttttcgaccatttcctcctcaacccagcgcagctataatacatgctgtagctggacacagcatcctctaatccagaagaaccggagggtggtgttagcatcgttccttttactgctgttgggcctggtgttaattctggtcggggtgggcctcgaagccaccccatctcccggagtttcgtccgcgatctttttcgtgcctgggtttcttctgctggtgcctggtgtgtaccacgttattttcatttattgtgccgttaagggacatcggggtttccaattcttttatttgccctactttgaaaagtag

SEQ ID NO: 217930 - DNA, 807 bp, Artificial Sequence
  derived and/or modified sequence
cgcagatggcggcggcgcacggcgcctgagcgggccggggccatgagcgccgcccggccccagttcagcattgatgatgccttcgagctgtccctggaggacgggggccctgggcccgagtccagcggggtcgcgcgctttgggccgctgcacttcgagcgtcgggcccggttcgaggtggctgacgaggacaagcagtcccggctgcgctaccagaacctggagaacgatgaggatggagcccaggcctctccggagccggatgggggagtcggcaccagggattccagccgaacttccatccgcagctcccagtggtccttcagcaccatcagcagcagcacccagcgctcctacaacacctgctgcagctggacccaacaccctttgatccagaagaaccgccgagtggtgctggcctccttcctgctcctgctgctggggctggtgctgatcctggtcggcgtgggactggaggcgaccccctctccaggtgtctccagcgccatcttcttcgtgccgggcttcctgttgttggtgcctggagtctatcacgtgatcttcatctactgcgcggtcaagggccaccggggcttccagttcttctacctgccctacttcgagaagtgatcgcggcgcagcgtggaccccttgcgcccatgggggcgcccctcttgccctgttccgttcccctcatctcaagggaagaggccctccaggaccctcgaaaccccagcccctagggagtttgctcaggaagttcggggcatgcaggcctggccctgggaaagccgcccgtcgcctgct

SEQ ID NO: 217931 - protein, 372 aa, Artificial Sequence
  derived and/or modified sequence
MKAGATSMWASCCGLLNEVMGTGAVRGQQSAFAGATGPFRFTPNPEFSTYPPAATEGPNIVCKACGLSFSVFRKKHVCCDCKKDFCSVCSVLQENLRRCSTCHLLQETAFQRPQLMRLKVKDLRQYLILRNIPIDTCREKEDLVDLVLCHHGLGSEDDMDTSSLNSSRSQTSSFFTRSFFSNYTAPSATMSSFQGELMDGDQTSRSGVPAQVQSEITSANTEDDDDDDDEDDDDEEENAEDRNPGLSKERVRASLSDLSSLDDVEGMSVRQLKEILARNFVNYSGCCEKWELVEKVNRLYKENEENQKSYGERLQLQDEEDDSLCRICMDAVIDCVLLECGHMVTCTKCGKRMSECPICRQYVVRAVHVFKS

SEQ ID NO: 217932 - DNA, 1119 bp, Artificial Sequence
  derived and/or modified sequence
atgaaagctggtgcaacttctatgtgggcatcctgttgcggattattgaacgaagtcatgggaacaggtgctgtgaggggacagcaaagcgcattcgctggtgctaccggcccattccggtttaccccaaatcctgagtttagcacttacccacccgccgcgacggaaggacccaacatcgtatgtaaggcttgcgggttgtcttttagtgtgttcaggaagaagcatgtgtgttgcgattgtaaaaaggatttctgcagcgtgtgctccgtgctgcaggagaaccttaggaggtgtagtacatgccatctcctacaagagactgcttttcagcgcccacagttaatgagacttaaggtaaaagacctgcggcagtatttgattctcaggaacatccccatcgacacctgtcgcgaaaaggaggacctagtagatctggttctctgtcaccatggccttggcagtgaggacgacatggataccagttccctgaactctagtagaagccagacttcaagcttcttcacccgaagctttttctctaactataccgctcccagcgccacaatgtcctccttccagggagagctaatggacggcgatcagacaagccgaagtggggtgcccgcccaggtccaatcagaaatcacatccgcgaatacagaggatgacgatgatgatgatgatgaagacgacgatgatgaggaggagaacgctgaggacaggaatccggggctgagtaaagagagggtccgcgcgtcactaagtgatttgagcagcctcgacgatgtagaagggatgtcggtgcgccagctgaaagagattctcgcccggaacttcgtgaattactctggctgctgtgaaaagtgggagctggtggagaaggttaaccgtctgtacaaagagaacgaggagaaccagaaatcttacggcgaaagacttcagttacaggatgaagaggacgattcactctgcagaatctgcatggacgctgtcatagactgtgtcctgctcgaatgtggccacatggtcacttgcacgaagtgcggtaaaaggatgagcgagtgccccatctgtcgccagtacgtggtacgagcggtgcacgtttttaaatcctag

SEQ ID NO: 217933 - DNA, 1119 bp, Artificial Sequence
  derived and/or modified sequence
atgaaggccggggccacctccatgtgggccagctgctgcggcctgctgaatgaggtgatgggcaccggggctgtgcggggccagcagagcgcctttgctggggccaccggccccttccgcttcacccccaaccctgagttcagcacctacccacctgctgccacagagggccccaacatcgtgtgcaaggcctgtggcctgtccttcagcgtcttcaggaagaagcacgtgtgctgtgactgcaagaaggacttctgcagcgtgtgcagcgtgctgcaggagaacctgcggcgctgcagcacctgccacctgctgcaggagacagccttccagaggccccagctgatgaggctgaaggtgaaggacctgcggcagtacctgatcctgaggaacatccccatcgacacctgccgggagaaggaggacctggtggacctggtgctgtgccaccacggcctgggctctgaagatgacatggacaccagcagcctgaacagcagccgcagccagaccagcagcttcttcaccaggagcttcttcagcaactacacagcccccagcgccaccatgagcagcttccagggcgagctgatggatggagaccagaccagccgcagcggcgtgcctgcccaggtgcagagcgagatcaccagcgccaacacagaagatgatgatgatgatgatgatgaagatgatgatgatgaggaggagaatgctgaggacaggaaccctggcctgagcaaggagcgggtgcgggccagcctgagtgacctgagcagcctggatgatgtggagggcatgtctgtgcggcagctgaaggagatcctggccaggaactttgtgaactacagcggctgctgtgagaagtgggagctggtggagaaggtgaacagactctacaaggaaaatgaggagaaccagaagagctatggagagcggctgcagctgcaggatgaggaggatgacagcctgtgccgcatctgcatggatgctgtgattgactgtgtgctgctggagtgtggccacatggtgacctgcaccaagtgtgggaagaggatgtctgaatgtcccatctgccggcagtatgtggtgcgggctgtgcacgtgttcaagagctag

SEQ ID NO: 217934 - DNA, 1119 bp, Artificial Sequence
  derived and/or modified sequence
atgaaggccggcgccaccagcatgtgggccagctgctgcggcctgctaaacgaggtgatggggactggcgcagtgaggggccaacagtctgccttcgctggagccacgggtcccttccgctttacaccgaacccggagttctctacgtacccacctgctgccacagagggccccaatatcgtgtgtaaagcctgtggacttagcttctcggtgtttagaaaaaagcacgtgtgctgcgactgcaagaaggacttctgttcagtgtgcagtgttcttcaagagaacttacgacgctgtagtacatgtcacctcctacaggaaaccgcgtttcagagacctcagctgatgagactaaaagtaaaggatctacgacagtatctcatcctgcgcaacattccaatcgatacctgtagagaaaaggaagacctggtggacttagtgctgtgccatcatggactggggtccgaagacgatatggacacttcctctttgaatagctcccgcagccaaacgagctcctttttcacaaggtcgtttttttccaactataccgcccctagcgcaaccatgtcctcatttcagggggagctcatggacggcgatcagactagcagatcaggcgtacccgcacaggtgcaatccgagataacctctgctaacacagaagacgacgatgacgatgacgatgaggatgacgacgatgaggaagagaacgcagaggaccggaacccaggattaagcaaagaaagggttcgggcctcgctgtccgatctctccagcctggacgacgtcgaggggatgtctgtgaggcagttaaaagagatacttgccagaaactttgtcaattactctggttgctgtgaaaaatgggaattggtagagaaggttaacagattgtacaaggagaacgaggaaaaccagaaaagttatggcgaaagactccagcttcaggacgaagaagacgactctctgtgcaggatatgtatggatgcagtgatcgactgtgtgcttctcgagtgcggccacatggtgacctgcactaagtgcggcaaaagaatgagcgaatgccccatatgccgacagtacgtggtgagagcagtgcatgtattcaaatcatag

SEQ ID NO: 217935 - DNA, 1119 bp, Artificial Sequence
  derived and/or modified sequence
atgaaagccggagctacatccatgtgggcttcctgctgcgggctgttaaatgaggtgatgggcaccggcgcagtaaggggccagcaatcggctttcgctggggctactggacccttcagatttactcctaatccagagttcagtacatatcctcctgcagctacagagggcccaaacatcgtctgcaaagcctgtggtctatccttctctgtattccgcaaaaaacacgtctgctgcgactgcaaaaaagacttctgtagtgtgtgctcagtactccaagagaacctgcgacggtgtagcacatgccaccttttacaagagaccgcttttcagagaccacagcttatgcgcctaaaggttaaagatttgcggcagtacctgattctgaggaacatccccattgatacttgtagggagaaggaggacctagttgacctggtgctttgtcatcatggcctgggttcagaagatgatatggacactagttctctgaattcatcccgaagtcagacctcatcattctttacaagatcttttttctccaattatactgcccctagtgctaccatgtctagctttcagggcgaactgatggatggggaccagacgagccggtcgggagtgcctgcccaggtgcagagcgagatcacttctgcgaatacagaggacgacgacgacgatgatgacgaggatgacgacgatgaagaagaaaatgctgaggatagaaatcctggcctatccaaggaaagagtcagagccagtcttagcgatctctcaagtctggatgacgtcgagggtatgtccgtcagacaactgaaagaaatcctggcacgaaactttgtgaactacagcggctgctgtgaaaaatgggaactcgtcgaaaaggtgaatagactgtacaaggagaacgaggaaaaccaaaagtcatacggtgagcggctccagctccaggatgaggaggatgatagcctctgtcgtatttgcatggatgcagtgattgattgtgtcctgcttgaatgtggccatatggtgacatgcacaaaatgcgggaagagaatgagtgaatgcccgatctgtcggcagtatgtcgtgagagcagtgcatgtgtttaaatcctag

SEQ ID NO: 217936 - DNA, 2066 bp, Artificial Sequence
  derived and/or modified sequence
gcgcttttaccggggcacgcggcgagcgtgaccacgccccttacgtccggacgctcggtcgcctcccggggcgcggtaatcaccgcccagagggaaggaggtcggcagtgtgaggagctgctatggtgctgagtttcctggtagagccggccgagctgaggcggtcgcggccatgaaggcgggtgccacgtctatgtgggcttcgtgctgtgggctgctgaatgaagtcatgggaactggagctgtcaggggccagcagtcagcatttgcaggagccaccggtccattcagatttacaccaaaccctgagttttccacctacccaccagcagctacggaagggcccaacatagtttgtaaagcctgtgggctttcattttcagtctttagaaagaagcatgtttgctgtgactgcaagaaggatttttgctccgtttgttcagtcttacaagaaaatctccgtagatgttctacttgtcacttattacaagagacagcatttcagcgccctcagttaatgcgactgaaggtgaaggacctgcggcagtatctcattctgagaaatatacccatagatacttgtcgtgagaaagaagacttggtggatctagtactgtgccatcatggactaggctctgaggacgacatggacacaagcagtctgaattcttcaaggtcccagacttctagcttttttacacgttcgtttttttcaaactatacagccccctctgctactatgtcttcgtttcagggagagcttatggatggagaccaaacatccagatctggagtgccggcacaggtacaaagtgaaatcacttcagcaaacacagaagatgatgatgacgacgatgatgaggatgatgatgatgaagaagaaaacgcagaggatcggaaccccgggctctccaaggagagagtgagagcttcactgtctgacttgtcaagccttgatgatgtggaaggaatgagcgtgcgccagctgaaggaaattctggctcggaattttgtcaactattctggctgttgtgaaaaatgggaactggtagagaaagtaaaccggttatacaaagagaatgaagaaaaccaaaagtcctatggcgagcggctgcagctgcaggatgaggaagacgacagcctgtgtcgcatctgcatggatgccgtcatcgactgtgtcctactggagtgtgggcacatggttacctgcaccaagtgcggcaagcgcatgagtgagtgtcccatctgccggcagtatgtggtgcgagccgtgcacgtgttcaagtcctgaaacaggctcccctcaccaggacagtcacccccaaacttgacccccaacatttcaatgcacagaagggactggaaagttatgttcaaaggctgaagctattttaaaacattattttgactactaagtggggacagaaagatccatcctgagttgtggaaacattggtccatgccgtgagcctgtctgcctgtggacacgtgagcttcccgggctcagctgggctttatcacacatcccgtgaacactcattgaagtcagcctgtttgcgccatgtgggcatcagccactgctgtcttgggaggacacttatcctgttctcttatttccccttcatcctatttttaacttaaactgctcagatgtttgaaacttctgtcctctttggatgagatcagtgtccacaagtggccgacatggaacatgctgagcagtggctcctctgaatgttcactttattagtcatgtatattttaaatgctaacatttgatgaatgtaagtttccacattgttgctgtttctgcatttaaacataattgggaacaactgacattctctagtcgactgccagggccttagactccacatgtccatttttgttcaggtatagctttttatagcaagggctgcatctagcttcttttattagaagtgtgtgtgctaaattccttattaatgtgtaatcagtttacattgttttgtatagtgaaggtgtattttcagtgctacccgctagctgattttaactttaggaataaaattagttttaaaagcttt

SEQ ID NO: 217937 - DNA, 1119 bp, Artificial Sequence
  derived and/or modified sequence
atgaaggccggcgccaccagcatgtgggccagctgctgcggcctgctgaacgaggtgatgggcaccggcgccgtgagaggccagcagagcgccttcgccggcgccaccggccccttcagattcacccccaaccccgagttcagcacctacccccccgccgccaccgagggccccaacatcgtgtgcaaggcctgcggcctgagcttcagcgtgttcagaaagaagcacgtgtgctgcgactgcaagaaggacttctgcagcgtgtgcagcgtgctgcaggagaacctgagaagatgcagcacctgccacctgctgcaggagaccgccttccagagaccccagctgatgagactgaaggtgaaggacctgagacagtacctgatcctgagaaacatccccatcgacacctgcagagagaaggaggacctggtggacctggtgctgtgccaccacggcctgggcagcgaggacgacatggacaccagcagcctgaacagcagcagaagccagaccagcagcttcttcaccagaagcttcttcagcaactacaccgcccccagcgccaccatgagcagcttccagggcgagctgatggacggcgaccagaccagcagaagcggcgtgcccgcccaggtgcagagcgagatcaccagcgccaacaccgaggacgacgacgacgacgacgacgaggacgacgacgacgaggaggagaacgccgaggacagaaaccccggcctgagcaaggagagagtgagagccagcctgagcgacctgagcagcctggacgacgtggagggcatgagcgtgagacagctgaaggagatcctggccagaaacttcgtgaactacagcggctgctgcgagaagtgggagctggtggagaaggtgaacagactgtacaaggagaacgaggagaaccagaagagctacggcgagagactgcagctgcaggacgaggaggacgacagcctgtgcagaatctgcatggacgccgtgatcgactgcgtgctgctggagtgcggccacatggtgacctgcaccaagtgcggcaagagaatgagcgagtgccccatctgcagacagtacgtggtgagagccgtgcacgtgttcaagagctag

SEQ ID NO: 217938 - protein, 418 aa, Artificial Sequence
  derived and/or modified sequence
MGEEGTGGTVHLLCLAASSGVPLFCRSSRGGAPARQQLPFSVIGSLNGVHMFGQNLEVQLSSARTENTTVVWKSFHDSITLIVLSSEVGISELRLERLLQMVFGAMVLLVGLEELTNIRNVERLKKDLRASYCLIDSFLGDSELIGDLTQCVDCVIPPEGSLLQEALSGFAEAAGTTFVSLVVSGRVVAATEGWWRLGTPEAVLLPWLVGSLPPQTARDYPVYLPHGSPTVPHRLLTLTLLPSLELCLLCGPSPPLSQLYPQLLERWWQPLLDPLRACLPLGPRALPSGFPLHTDILGLLLLHLELKRCLFTVEPLGDKEPSPEQRRRLLRNFYTLVTSTHFPPEPGPPEKTEDEVYQAQLPRACYLVLGTEEPGTGVRLVALQLGLRRLLLLLSPQSPTHGLRSLATHTLHALTPLL

SEQ ID NO: 217939 - protein, 387 aa, Artificial Sequence
  derived and/or modified sequence
MGEEGTGGTVHLLCLAASSGVPLFCRSSRGGAPARQQLPFSVIGSLNGVHMFGQNLEVQLSSARTENTTVVWKSFHDSITLIVLSSEVGISELRLERLLQMVFGAMVLLVGLEELTNIRNVERLKKDLRASYCLIDSFLGDSELIGDLTQCVDCVIPPEGSLLQEALSGFAEAAGTTFVSLVVSGRVVAATEGWWRLGTPEAVLLPWLVGSLPPQTARDYPVYLPHGSPTVPHRLLTLTLLPSLELCLLCGPSPPLSQLYPQLLERWWQPLLDPLRACLPLGPRALPSGFPLHTDILGLLLLHLELKRCLFTVEPLGDKEPSPEQRRRLLRNFYTLVTSTHFPPEPGPPEKTEDEVYQAQLPRACYLVMGDGHRHGAVSVSLFIRSQ

SEQ ID NO: 217940 - DNA, 1675 bp, Artificial Sequence
  derived and/or modified sequence
tgtttgagttgggtgaagaaggcgggaagttaatcctcttccaatcagctccccatctcgccctctggcggctccggaccacaggccgagttactctgattaccgccatgctccaagacccgcactgacagtccccacgtgagggaccgcggtgggagtcctaaatgggggaggaggggacgggcggcactgtgcatctgctgtgcctcgcggcctccagcggggtccccctattctgcaggagcagtcgcggcggcgcccccgcccgtcagcagctcccgttctctgtcatcggttccctcaatggagtccacatgtttgggcagaatctggaggtgcagctgagctctgcgaggaccgagaacacgactgtggtgtggaaaagcttccatgacagcatcaccctcattgttctgtcatctgaggtgggcatctctgagctgaggctggagagactactccaaatggtgtttggagccatggtccttcttgtgggacttgaagaactgaccaatatccgcaacgtggagagactgaagaaggacttgagggccagttattgcctcatcgacagcttcctgggggactcggagctcatcggggacctgacccagtgtgtggactgcgtgattcctccagaggggtccctcttgcaggaagccctctccgggttcgctgaggccgcgggcacgaccttcgtcagtctggtggtgtccggccgggtggtggcagcaacagagggttggtggcggctggggacgcccgaggccgtgctgctcccctggctggtggggtccctgccgccgcagaccgctcgcgactacccggtgtacctgccgcacgggagccccacggtcccacaccggctcctgaccctgactctgctgccgagcctggagctgtgtctactctgcgggccgagcccacccctcagccagttgtatccacagcttctggagcgctggtggcagccactgctggacccgttgcgggcctgtctgccgttgggaccccgggcgctgcccagtggcttcccccttcacacagacatcctcgggctgctgctcctccacctggaactgaagcgctgcctcttcaccgtggagcccttgggggataaagagccttcaccagaacagcgccggcgcctcctccgaaacttctataccctggtcacctccacgcacttcccaccagagccagggccaccagagaagacagaagatgaggtctaccaggcccagctgcccagagcttgctacctggtgttggggactgaggaaccaggcacaggagtgcgtctggtggccttgcagctggggcttcggcggctgctgctgctgctgtctccccagagtcccacccatgggctgcgaagcctggccacccacactctgcatgccctcaccccacttctttgactacctagcagtgggtgatggacacagacatggggctgttagcgtctctctgtttattcgctcacaataatacacagcccctggatggggagggggtaggaggggctacaacagggtggggtgggaggggaggagacatccacttccctggcccctctcccctctgtgcttgggggggaaagggagggagggggactccccctaaccccccagaatgtaaacagcagcagatgaacaaaaataaaaatacaaaa

SEQ ID NO: 217941 - DNA, 1368 bp, Artificial Sequence
  derived and/or modified sequence
aatgggtttgggggaggtgcctgaatagggtttgagggtctgtttgagttgggtgaagaaggcgggaagttaatcctcttccaatcagctccccatctcgccctctggcggctccggaccacaggccgagttactctgattaccgccatgctccaagacccgcactgacagtccccacgtgagggaccgcggtgggagtcctaaatgggggaggaggggacgggcggcactgtgcatctgctgtgcctcgcggcctccagcggggtccccctattctgcaggagcagtcgcggcggcgcccccgcccgtcagcagctcccgttctctgtcatcggttccctcaatggagtccacatgtttgggcagaatctggaggtgcagctgagctctgcgaggaccgagaacacgactgtggtgtggaaaagcttccatgacagcatcaccctcattgttctgtcatctgaggtgggcatctctgagctgaggctggagagactactccaaatggtgtttggagccatggtccttcttgtgggacttgaagaactgaccaatatccgcaacgtggagagactgaagaaggacttgagggccagttattgcctcatcgacagcttcctgggggactcggagctcatcggggacctgacccagtgtgtggactgcgtgattcctccagaggggtccctcttgcaggaagccctctccgggttcgctgaggccgcgggcacgaccttcgtcagtctggtggtgtccggccgggtggtggcagcaacagagggttggtggcggctggggacgcccgaggccgtgctgctcccctggctggtggggtccctgccgccgcagaccgctcgcgactacccggtgtacctgccgcacgggagccccacggtcccacaccggctcctgaccctgactctgctgccgagcctggagctgtgtctactctgcgggccgagcccacccctcagccagttgtatccacagcttctggagcgctggtggcagccactgctggacccgttgcgggcctgtctgccgttgggaccccgggcgctgcccagtggcttcccccttcacacagacatcctcgggctgctgctcctccacctggaactgaagcgctgcctcttcaccgtggagcccttgggggataaagagccttcaccagaacagcgccggcgcctcctccgaaacttctataccctggtcacctccacgcacttcccaccagagccagggccaccagagaagacagaagatgaggtctaccaggcccagctgcccagagcttgctacctggtgatgggtgatggacacagacatggggctgttagcgtctctctgtttattcgctcacaataa

SEQ ID NO: 217942 - DNA, 1257 bp, Artificial Sequence
  derived and/or modified sequence
atgggggaggagggtaccggcgggaccgtgcatctgctttgtctagccgcctcatccggagttccactcttttgcagatctagccgcgggggggcccccgcacgtcagcagctgccattttccgtcatcggcagcctgaacggggttcacatgttcggacagaatctcgaagttcaactgtccagcgcccgcaccgagaacacgacagtcgtttggaaatcattccacgatagcatcaccctcatagtgctgtcctccgaagtgggcatttccgagctgagactcgagagattgctgcagatggtgttcggcgccatggttcttctggtcggacttgaggaactgactaatattagaaacgtcgaaagactcaagaaggacctccgagccagctactgcctgatcgacagttttctgggggactctgaacttattggcgacctgactcagtgtgtggattgcgtaattcctcccgaaggttcactcctccaggaggccctgtcaggatttgccgaagccgcaggtaccacctttgtctccctcgttgtgtcaggcagggttgtcgcagctacagagggctggtggcgactgggaactcctgaagccgttcttctcccgtggctggtggggtccttgccgccccagaccgcccgcgactaccccgtataccttccacatggatcccccacagtgccacaccggctcctcacactcacgctgttgccttccctcgaactgtgtcttttgtgtggcccaagtccacctctaagtcagttatacccccagctgctagagcgctggtggcagcccctgttagatccattacgcgcctgcttacctctgggaccacgcgccctgccatcgggttttcccctgcataccgatatcctcgggcttcttctcctgcacttagagctgaaacgctgtttatttaccgtggagcccctgggggacaaagagcccagccctgaacagcgcagaagattactccggaatttttacacactggtgactagtacccactttccacccgaaccggggcccccagagaagacagaagatgaggtctatcaagcgcagctgcctcgggcttgctatctagtgttggggactgaagaaccaggcactggcgtgcgcttagttgccctgcagctgggcctgcggcgcctgctgctcctgcttagtccccagtcgccaacacacgggctcagaagcttggcaactcacaccctccacgccttgacacctctcttgtag

SEQ ID NO: 217943 - DNA, 1164 bp, Artificial Sequence
  derived and/or modified sequence
atgggggaggagggaacgggcggcactgtccacttgttatgtctggcagcctccagtggagtacccctattttgcagatcctctcggggaggggccccagctcggcagcagctacccttctccgttattggctcacttaacggcgtacacatgtttggccagaacctggaggtgcagctctcctctgcaaggaccgaaaatactaccgtggtttggaagtcttttcatgattcaatcaccctgattgtccttagctccgaagtgggaatttctgaattgcggcttgagaggctgctgcagatggtgtttggcgccatggtcctgctcgtgggtttggaagaactcacaaacattcgtaacgtggagcggttaaagaaggacttgcgcgcctcttattgcctgatcgacagcttcctgggcgattctgagcttatcggtgacttaactcaatgtgtagattgcgttattccaccagaaggtagtctgttacaggaggcgctgtcaggatttgctgaggccgctggtactacattcgtttctttggtcgtgagcgggagagtggtggccgccaccgaagggtggtggaggctcggcacccctgaagccgtgctactgccctggttagtcgggtctctgcctccccagactgcgcgagactatcccgtatacttacctcatgggtcacccaccgtcccacaccgacttctgaccctcaccttactcccttcattggaactgtgcttgctttgcggaccttcccctcctctgagtcaactgtaccctcagctcctagagagatggtggcagccactcttggaccccttgagagcctgtctccctttaggcccccgggctttgccttcgggcttccctctacacacagacattctgggattacttctgcttcacttagagcttaagcggtgtctcttcacagtagagccactcggtgataaagagcctagtcccgagcagagacgccggctacttcgaaacttctacacactggtaacaagtacccacttccccccggaacctggcccaccggagaaaacagaggatgaggtatatcaagcacagctcccccgtgcatgttatctcgtgatgggggacggccacaggcacggggccgttagtgtgtcactctttatacgatctcagtag

SEQ ID NO: 217944 - DNA, 1257 bp, Artificial Sequence
  derived and/or modified sequence
atgggagaggagggcaccggcggcaccgtgcacctgctgtgcctggccgccagcagtggagtgcccctcttctgccgcagcagccggggcggggccccagcccggcagcagctgcccttctctgtgattggcagcctgaatggagtgcacatgtttggccagaacctggaggtgcagctgagcagcgccaggacagagaacaccaccgtggtgtggaagagcttccatgacagcatcaccctcatcgtgctgagcagcgaggtgggcatcagcgagctgcggctggagcggctgctgcagatggtgtttggagccatggtgctgctggtgggcctggaggagctgaccaacatcagaaatgtggagcggctgaagaaggacctgcgggccagctactgcctgattgacagcttcctgggggacagcgagctgattggagacctgacccagtgtgtggactgtgtgattcctcctgagggcagcctgctgcaggaggccctgagcggctttgctgaggccgccggcaccacctttgtgtccctggtggtgtctggccgggtggtggccgccacagagggctggtggaggctgggcaccccagaggccgtgctgctgccctggctggtgggcagcctgcccccccagacagcccgggactaccctgtgtacctgccccacggcagccccaccgtgccccaccggctgctgaccctgaccctgctgcccagcctggagctgtgcctgctgtgtggccccagcccccccctgagccagctgtacccccagctgctggagcgctggtggcagcccctgctggaccccctgcgggcctgcctgcccctgggcccccgggccctgcccagcggcttccccctgcacacagacatcctgggcctgctgctgctgcacctggagctgaagcgctgcctcttcaccgtggagcccctgggggacaaggagcccagccctgagcagaggcggcggctgctgaggaacttctacaccctggtgaccagcacccacttccccccagagcccggccccccagagaagacagaagatgaggtgtaccaggcccagctgccccgggcctgctacctggtgctgggcacagaggagcccggcaccggggtgcggctggtggccctgcagctgggcctgcggcggctgctgctgctgctgagcccccagagccccacccacggcctgcggagcctggccacccacaccctgcacgccctgacccccctgctgtag

SEQ ID NO: 217945 - DNA, 1164 bp, Artificial Sequence
  derived and/or modified sequence
atgggagaggagggcaccggcggcaccgtgcacctgctgtgcctggccgccagcagtggagtgcccctcttctgccgcagcagccggggcggggccccagcccggcagcagctgcccttctctgtgattggcagcctgaatggagtgcacatgtttggccagaacctggaggtgcagctgagcagcgccaggacagagaacaccaccgtggtgtggaagagcttccatgacagcatcaccctcatcgtgctgagcagcgaggtgggcatcagcgagctgcggctggagcggctgctgcagatggtgtttggagccatggtgctgctggtgggcctggaggagctgaccaacatcagaaatgtggagcggctgaagaaggacctgcgggccagctactgcctgattgacagcttcctgggggacagcgagctgattggagacctgacccagtgtgtggactgtgtgattcctcctgagggcagcctgctgcaggaggccctgagcggctttgctgaggccgccggcaccacctttgtgtccctggtggtgtctggccgggtggtggccgccacagagggctggtggaggctgggcaccccagaggccgtgctgctgccctggctggtgggcagcctgcccccccagacagcccgggactaccctgtgtacctgccccacggcagccccaccgtgccccaccggctgctgaccctgaccctgctgcccagcctggagctgtgcctgctgtgtggccccagcccccccctgagccagctgtacccccagctgctggagcgctggtggcagcccctgctggaccccctgcgggcctgcctgcccctgggcccccgggccctgcccagcggcttccccctgcacacagacatcctgggcctgctgctgctgcacctggagctgaagcgctgcctcttcaccgtggagcccctgggggacaaggagcccagccctgagcagaggcggcggctgctgaggaacttctacaccctggtgaccagcacccacttccccccagagcccggccccccagagaagacagaagatgaggtgtaccaggcccagctgccccgggcctgctacctggtgatgggagatggccacagacatggagctgtgtctgtgtccctcttcatccgcagccagtag

SEQ ID NO: 217946 - DNA, 1257 bp, Artificial Sequence
  derived and/or modified sequence
atgggcgaggagggcaccggcggcaccgtgcacctgctgtgcctggctgcctcttcaggtgttccactgttctgcaggagtagcaggggcggggctcccgcgcggcagcagctccctttttcagtcataggtagtctgaatggggttcacatgttcggacagaatcttgaagtccagctgagctctgcacgaacagagaatacgaccgttgtctggaagtcctttcatgactctataacgctgattgtattgtcaagtgaggtgggcatcagtgagctgagactggagcggttgctgcagatggtgttcggcgcaatggttctgcttgttggacttgaggaactcacgaacatcaggaacgtggagaggctgaaaaaagacctgcgtgcctcttactgcctcattgattctttcctgggggactctgagctgatcggcgacctgacgcaatgtgtggattgcgtcataccgccggaagggtctctgctgcaggaggcccttagcggcttcgcagaggcggcaggaactacattcgtcagcttagtggtcagcgggcgcgtcgtggccgccacagaaggctggtggcgcctggggacccccgaggccgtgctgctgccatggctggtcggtagtttacctccccagacggcaagagactaccctgtatatctcccacacgggtcgcccacagtccctcaccgattgctgacactgactcttctgccctcgctagagctctgcctactgtgtggtccaagcccacccttatcccaactgtacccacagctactggagcgctggtggcagcctctcctggacccactgagagcttgtctgcccctaggacctagggcgttacctagcggattccctctccatacagatatcctgggtctcctgttgctccatctcgaactgaaacgatgtctgtttactgtggaaccgctgggggacaaagagccttccccagaacaacgtcgacgcctgttgaggaacttctacacgctcgtcacgagcacccacttccctcccgagcccggtccacccgaaaagactgaggacgaagtgtatcaggctcagctaccccgagcctgctacttagtgctcggaacagaagagcccggaacaggcgtccgactagtggctctgcagctggggcttcggcggctgctgctgctgctctcaccacagtcccctactcacggactgcggtcactggctacacacaccttacacgcgcttaccccactgctttag

SEQ ID NO: 217947 - DNA, 1164 bp, Artificial Sequence
  derived and/or modified sequence
atgggcgaggagggcaccggcggcaccgtgcacctgctgtgcctggcagcatcttctggggtgccattgttttgtagatctagtcggggaggtgcacccgcccgacagcaattgcccttttcggtgatcggctccctcaacggcgtccatatgttcggccagaacctagaggtccaactgagcagcgcacggacagaaaataccacagttgtgtggaaatcttttcacgatagcattaccctgatcgtgctgtccagcgaggtggggatttctgagctcaggctggagcgactacttcagatggtctttggggctatggttctgttagtgggtctagaggagctgactaacattcggaatgtcgaaaggctcaaaaaggacctgcgagcttcctactgcttgatagattccttcctcggtgattcagagttgataggggacctcacacagtgtgttgactgcgttatcccccctgaaggcagtttgcttcaggaagcgctctctggctttgccgaggcggctggcacgacatttgtcagcttggtggtgtctggtcgcgtcgtcgcggctacagagggctggtggagactgggcactcccgaagcagtgttacttccttggctagtcggaagcttaccaccacaaacagcccgggactatccagtgtacctgcctcacggatcccctaccgtgccgcacaggctgctcacattgacacttctgcccagtctggagctttgtctcctctgcgggcccagcccacctctgtcccagttatatccacaactgctggagcgttggtggcaacctctcctggacccgctcagggcctgtctccctctgggccctcgcgccctgccctcgggctttcctctgcacaccgacatcctgggtcttctcctgctccacctcgagctgaaacggtgcctgttcaccgttgagccattgggtgacaaggagccctcccctgagcagcggcggcggctccttcgcaatttttacactctggtcacatcaacacacttcccccccgagcccgggccacccgagaagaccgaagacgaggtatatcaggctcaactgcctagggcctgttatctggtgatgggggatggccatcgacacggggcagtgtctgtaagcctcttcatccgttcccagtag

SEQ ID NO: 217948 - DNA, 1257 bp, Artificial Sequence
  derived and/or modified sequence
atgggagaggagggcacaggcggtactgtccatttgctgtgcttggctgccagctccggcgtgcctctgttctgccggtccagccggggaggagcaccagctcgtcagcaactgcccttttctgtcattgggtccctgaacggagtacatatgtttggacagaatcttgaggtgcaattatcctctgcacgtactgagaacactacagtggtgtggaagtcatttcacgactctatcacactgatcgtcttgtcaagtgaggtggggatctctgaactaagacttgagagactgttacagatggtatttggcgcaatggtgctacttgtcggcctggaggaactgactaatatccggaacgtcgagcggctgaagaaggacctgcgggcatcctactgtcttatcgattccttcctgggcgatagtgagttgatcggcgacttgacacagtgcgtggattgcgtgattccacctgaaggaagccttctacaagaggccctttctggctttgccgaggccgcaggcacaaccttcgtgtcactcgtggtttccggtcgggtggtagctgccactgagggctggtggcggctgggaaccccggaggcagttcttctgccttggttagtcgggagtctaccaccccaaacggccagggactaccccgtctacctgcctcatggatctccaaccgtgcctcatcgactgctcacgttgacactgttacctagtctggagttgtgtctgctgtgcggcccttctccacccttaagtcagctgtacccccaactgctggagcgttggtggcaaccacttctggacccgctccgggcttgtcttccattggggccacgggctctacccagcggttttccgctccacacagacattcttggactcttgctgctccacctcgagctcaagcggtgtctgttcactgtcgaacccttgggcgataaggagccctcacccgaacagagacgaaggttgctgaggaacttttatactctggttacctctacccacttcccgccagaacccggtccccctgagaagaccgaggatgaagtctatcaggcacagctccccagggcatgctacctggtgctggggaccgaggagcctggaaccggggtgagactcgtggcattgcagctggggttgcgaagactcctgctgctgttaagtccccagtcccccacgcatggattacgttcccttgccacacacaccctgcacgcccttactcctctcttgtag

SEQ ID NO: 217949 - DNA, 1164 bp, Artificial Sequence
  derived and/or modified sequence
atgggggaggaaggaacaggcggaacagttcatctcctttgccttgcagcttctagtggtgttcccctcttctgccggagttcacgtgggggtgcaccagcgaggcagcaactacctttttctgtcatagggtccctaaacggagttcacatgtttggtcaaaacttagaggtgcagctctcctcagccaggaccgagaacacaaccgtcgtttggaaaagttttcacgactcgattacattgatcgtcttgtcttctgaggtgggaatatcagagctccggctagaacgcctcctccagatggtgtttggggctatggtgctgctcgtgggactggaagagctcacaaatattcgtaatgtcgaacggttgaagaaagatctgcgcgctagctactgtctcatcgactcgttcctgggggactccgaactgatcggagacctaacgcaatgtgtggattgcgttattcctcccgagggatccttactccaggaggccttgtccggttttgccgaggccgcagggaccacatttgtgtcacttgtggtaagcggcagagtggtagctgcgacagagggctggtggaggttaggcactccggaagcggttctacttccatggttggttggctcccttcctccacagactgcccgagattacccagtttatctgccccacggctcacctacagtgccccaccgcctcctcacactgaccttgctccctagcctcgaattgtgtcttttgtgtggaccctctccccctctctcgcagttgtatccccagcttctagagcgctggtggcagcccctattggacccgttgagagcctgtctgcccctgggaccgagagctctgcccagtggtttcccacttcacactgatatcctgggactactgcttctgcatttagaacttaagcgctgcctcttcaccgtggagcctctcggagataaggagcctagccctgagcagcggaggcgacttctgcgcaacttctataccttagtgactagtacccacttccccccagaaccgggacctccagagaaaactgaagacgaagtgtaccaggcccaattgccacgcgcatgctacctggtaatgggcgacggccaccggcacggggctgtgtccgttagccttttcattcgcagccagtag

SEQ ID NO: 217950 - DNA, 1257 bp, Artificial Sequence
  derived and/or modified sequence
atgggcgaggagggcaccggcggcaccgtgcacctgctgtgcctggccgccagcagcggcgtgcccctgttctgcagaagcagcagaggcggcgcccccgccagacagcagctgcccttcagcgtgatcggcagcctgaacggcgtgcacatgttcggccagaacctggaggtgcagctgagcagcgccagaaccgagaacaccaccgtggtgtggaagagcttccacgacagcatcaccctgatcgtgctgagcagcgaggtgggcatcagcgagctgagactggagagactgctgcagatggtgttcggcgccatggtgctgctggtgggcctggaggagctgaccaacatcagaaacgtggagagactgaagaaggacctgagagccagctactgcctgatcgacagcttcctgggcgacagcgagctgatcggcgacctgacccagtgcgtggactgcgtgatcccccccgagggcagcctgctgcaggaggccctgagcggcttcgccgaggccgccggcaccaccttcgtgagcctggtggtgagcggcagagtggtggccgccaccgagggctggtggagactgggcacccccgaggccgtgctgctgccctggctggtgggcagcctgcccccccagaccgccagagactaccccgtgtacctgccccacggcagccccaccgtgccccacagactgctgaccctgaccctgctgcccagcctggagctgtgcctgctgtgcggccccagcccccccctgagccagctgtacccccagctgctggagagatggtggcagcccctgctggaccccctgagagcctgcctgcccctgggccccagagccctgcccagcggcttccccctgcacaccgacatcctgggcctgctgctgctgcacctggagctgaagagatgcctgttcaccgtggagcccctgggcgacaaggagcccagccccgagcagagaagaagactgctgagaaacttctacaccctggtgaccagcacccacttcccccccgagcccggcccccccgagaagaccgaggacgaggtgtaccaggcccagctgcccagagcctgctacctggtgctgggcaccgaggagcccggcaccggcgtgagactggtggccctgcagctgggcctgagaagactgctgctgctgctgagcccccagagccccacccacggcctgagaagcctggccacccacaccctgcacgccctgacccccctgctgtag

SEQ ID NO: 217951 - DNA, 1164 bp, Artificial Sequence
  derived and/or modified sequence
atgggcgaggagggcaccggcggcaccgtgcacctgctgtgcctggccgccagcagcggcgtgcccctgttctgcagaagcagcagaggcggcgcccccgccagacagcagctgcccttcagcgtgatcggcagcctgaacggcgtgcacatgttcggccagaacctggaggtgcagctgagcagcgccagaaccgagaacaccaccgtggtgtggaagagcttccacgacagcatcaccctgatcgtgctgagcagcgaggtgggcatcagcgagctgagactggagagactgctgcagatggtgttcggcgccatggtgctgctggtgggcctggaggagctgaccaacatcagaaacgtggagagactgaagaaggacctgagagccagctactgcctgatcgacagcttcctgggcgacagcgagctgatcggcgacctgacccagtgcgtggactgcgtgatcccccccgagggcagcctgctgcaggaggccctgagcggcttcgccgaggccgccggcaccaccttcgtgagcctggtggtgagcggcagagtggtggccgccaccgagggctggtggagactgggcacccccgaggccgtgctgctgccctggctggtgggcagcctgcccccccagaccgccagagactaccccgtgtacctgccccacggcagccccaccgtgccccacagactgctgaccctgaccctgctgcccagcctggagctgtgcctgctgtgcggccccagcccccccctgagccagctgtacccccagctgctggagagatggtggcagcccctgctggaccccctgagagcctgcctgcccctgggccccagagccctgcccagcggcttccccctgcacaccgacatcctgggcctgctgctgctgcacctggagctgaagagatgcctgttcaccgtggagcccctgggcgacaaggagcccagccccgagcagagaagaagactgctgagaaacttctacaccctggtgaccagcacccacttcccccccgagcccggcccccccgagaagaccgaggacgaggtgtaccaggcccagctgcccagagcctgctacctggtgatgggcgacggccacagacacggcgccgtgagcgtgagcctgttcatcagaagccagtag

SEQ ID NO: 217952 - protein, 917 aa, Artificial Sequence
  derived and/or modified sequence
MFAVHLMAFYFSKLKEDQIKKVDRFLYHMRLSDDTLLDIMRRFRAEMEKGLAKDTNPTAAVKMLPTFVRAIPDGSENGEFLSLDLGGSKFRVLKVQVAEEGKRHVQMESQFYPTPNEIIRGNGTELFEYVADCLADFMKTKDLKHKKLPLGLTFSFPCRQTKLEEGVLLSWTKKFKARGVQDTDVVSRLTKAMRRHKDMDVDILALVNDTVGTMMTCAYDDPYCEVGVIIGTGTNACYMEDMSNIDLVEGDEGRMCINTEWGAFGDDGALEDIRTEFDRELDLGSLNPGKQLFEKMISGLYLGELVRLILLKMAKAGLLFGGEKSSALHTKGKIETRHVAAMEKYKEGLANTREILVDLGLEPSEADCIAVQHVCTIVSFRSANLCAAALAAILTRLRENKKVERLRTTVGMDGTLYKIHPQYPKRLHKVVRKLVPSCDVRFLLSESGSTKGAAMVTAVASRVQAQRKQIDRVLALFQLTREQLVDVQAKMRAELEYGLKKKSHGLATVRMLPTYVCGLPDGTEKGKFLALDLGGTNFRVLLVKIRSGRRSVRMYNKIFAIPLEIMQGTGEELFDHIVQCIADFLDYMGLKGASLPLGFTFSFPCRQMSIDKGTLIGWTKGFKATDCEGEDVVDMLREAIKRRNEFDLDIVAVVNDTVGTMMTCGYEDPNCEIGLIAGTGSNMCYMEDMRNIEMVEGGEGKMCINTEWGGFGDNGCIDDIWTRYDTEVDEGSLNPGKQRYEKMTSGMYLGEIVRQILIDLTKQGLLFRGQISERLRTRGIFETKFLSQIESDRLALLQVRRILQQLGLDSTCEDSIVVKEVCGAVSRRAAQLCGAGLAAIVEKRREDQGLEHLRITVGVDGTLYKLHPHFSRILQETVKELAPRCDVTFMLSEDGSGKGAALITAVAKRLQQAQKEN

SEQ ID NO: 217953 - protein, 806 aa, Artificial Sequence
  derived and/or modified sequence
MFAVHLMAFYFSKLKEDQIKKVDRFLYHMRLSDDTLLDIMRRFRAEMEKGLAKDTNPTAAVKMLPTFVRAIPDGSENGEFLSLDLGGSKFRVLKVQVAEEGKRHVQMESQFYPTPNEIIRGNGTELFEYVADCLADFMKTKDLKHKKLPLGLTFSFPCRQTKLEEGVLLSWTKKFKARGVQDTDVVSRLTKAMRRHKDMDVDILALVNDTVGTMMTCAYDDPYCEVGVIIGTGTNACYMEDMSNIDLVEGDEGRMCINTEWGAFGDDGALEDIRTEFDRELDLGSLNPGKQLFEKMISGLYLGELVRLILLKMAKAGLLFGGEKSSALHTKGKIETRHVAAMEKYKEGLANTREILVDLGLEPSEADCIAVQHVCTIVSFRSANLCAAALAAILTRLRENKKVERLRTTVGMDGTLYKIHPQYPKRLHKVVRKLVPSCDVRFLLSESGSTKGAAMVTAVASRVQAQRKQIDRVLALFQLTREQLVDVQAKMRAELEYGLKKKSHGLATVRMLPTYVCGLPDGTEKGKFLALDLGGTNFRVLLVKIRSGRRSVRMYNKIFAIPLEIMQGTGEELFDHIVQCIADFLDYMGLKGASLPLGFTFSFPCRQMSIDKGTLIGWTKGFKATDCEGEDVVDMLREAIKRRNEFDLDIVAVVNDTVGTMMTCGYEDPNCEIGLIAGTGSNMCYMEDMRNIEMVEGGEGKMCINTEWGGFGDNGCIDDIWTRYDTEVDEGSLNPGKQRYEKMTSGMYLGEIVRQILIDLTKQGLLFRGQISERLRTRGIFETKFLSQIERMLSVIDAYCLDLLFH

SEQ ID NO: 217954 - protein, 736 aa, Artificial Sequence
  derived and/or modified sequence
MFAVHLMAFYFSKLKEDQIKKVDRFLYHMRLSDDTLLDIMRRFRAEMEKGLAKDTNPTAAVKMLPTFVRAIPDGSENGEFLSLDLGGSKFRVLKVQVAEEGKRHVQMESQFYPTPNEIIRGNGTELFEYVADCLADFMKTKDLKHKKLPLGLTFSFPCRQTKLEEGVLLSWTKKFKARGVQDTDVVSRLTKAMRRHKDMDVDILALVNDTVGTMMTCAYDDPYCEVGVIIGTGTNACYMEDMSNIDLVEGDEGRMCINTEWGAFGDDGALEDIRTEFDRELDLGSLNPGKQLFEKMISGLYLGELVRLILLKMAKAGLLFGGEKSSALHTKGKIETRHVAAMEKYKEGLANTREILVDLGLEPSEADCIAVQHVCTIVSFRSANLCAAALAAILTRLRENKKVERLRTTVGMDGTLYKIHPQYPKRLHKVVRKLVPSCDVRFLLSESGSTKGAAMVTAVASRVQAQRKQIDRVLALFQLTREQLVDVQAKMRAELEYGLKKKSHGLATVRMLPTYVCGLPDGTEKGKFLALDLGGTNFRVLLVKIRSGRRSVRMYNKIFAIPLEIMQGTGEELFDHIVQCIADFLDYMGLKGASLPLGFTFSFPCRQMSIDKGTLIGWTKGFKATDCEGEDVVDMLREAIKRRNEFDLDIVAVVNDTVGTMMTCGYEDPNCEIGLIAGTGSNMCYMEDMRNIEMVEGGEGKMCICFSFCLWFVLQVLIVVLRIVRYRKSSKLIKKF

SEQ ID NO: 217955 - DNA, 2754 bp, Artificial Sequence
  derived and/or modified sequence
atgttcgccgtgcacctgatggccttctacttcagcaagctgaaggaggaccagatcaagaaggtggacagattcctgtaccacatgagactgagcgacgacaccctgctggacatcatgagaagattcagagccgagatggagaagggcctggccaaggacaccaaccccaccgccgccgtgaagatgctgcccaccttcgtgagagccatccccgacggcagcgagaacggcgagttcctgagcctggacctgggcggcagcaagttcagagtgctgaaggtgcaggtggccgaggagggcaagagacacgtgcagatggagagccagttctaccccacccccaacgagatcatcagaggcaacggcaccgagctgttcgagtacgtggccgactgcctggccgacttcatgaagaccaaggacctgaagcacaagaagctgcccctgggcctgaccttcagcttcccctgcagacagaccaagctggaggagggcgtgctgctgagctggaccaagaagttcaaggccagaggcgtgcaggacaccgacgtggtgagcagactgaccaaggccatgagaagacacaaggacatggacgtggacatcctggccctggtgaacgacaccgtgggcaccatgatgacctgcgcctacgacgacccctactgcgaggtgggcgtgatcatcggcaccggcaccaacgcctgctacatggaggacatgagcaacatcgacctggtggagggcgacgagggcagaatgtgcatcaacaccgagtggggcgccttcggcgacgacggcgccctggaggacatcagaaccgagttcgacagagagctggacctgggcagcctgaaccccggcaagcagctgttcgagaagatgatcagcggcctgtacctgggcgagctggtgagactgatcctgctgaagatggccaaggccggcctgctgttcggcggcgagaagagcagcgccctgcacaccaagggcaagatcgagaccagacacgtggccgccatggagaagtacaaggagggcctggccaacaccagagagatcctggtggacctgggcctggagcccagcgaggccgactgcatcgccgtgcagcacgtgtgcaccatcgtgagcttcagaagcgccaacctgtgcgccgccgccctggccgccatcctgaccagactgagagagaacaagaaggtggagagactgagaaccaccgtgggcatggacggcaccctgtacaagatccacccccagtaccccaagagactgcacaaggtggtgagaaagctggtgcccagctgcgacgtgagattcctgctgagcgagagcggcagcaccaagggcgccgccatggtgaccgccgtggccagcagagtgcaggcccagagaaagcagatcgacagagtgctggccctgttccagctgaccagagagcagctggtggacgtgcaggccaagatgagagccgagctggagtacggcctgaagaagaagagccacggcctggccaccgtgagaatgctgcccacctacgtgtgcggcctgcccgacggcaccgagaagggcaagttcctggccctggacctgggcggcaccaacttcagagtgctgctggtgaagatcagaagcggcagaagaagcgtgagaatgtacaacaagatcttcgccatccccctggagatcatgcagggcaccggcgaggagctgttcgaccacatcgtgcagtgcatcgccgacttcctggactacatgggcctgaagggcgccagcctgcccctgggcttcaccttcagcttcccctgcagacagatgagcatcgacaagggcaccctgatcggctggaccaagggcttcaaggccaccgactgcgagggcgaggacgtggtggacatgctgagagaggccatcaagagaagaaacgagttcgacctggacatcgtggccgtggtgaacgacaccgtgggcaccatgatgacctgcggctacgaggaccccaactgcgagatcggcctgatcgccggcaccggcagcaacatgtgctacatggaggacatgagaaacatcgagatggtggagggcggcgagggcaagatgtgcatcaacaccgagtggggcggcttcggcgacaacggctgcatcgacgacatctggaccagatacgacaccgaggtggacgagggcagcctgaaccccggcaagcagagatacgagaagatgaccagcggcatgtacctgggcgagatcgtgagacagatcctgatcgacctgaccaagcagggcctgctgttcagaggccagatcagcgagagactgagaaccagaggcatcttcgagaccaagttcctgagccagatcgagagcgacagactggccctgctgcaggtgagaagaatcctgcagcagctgggcctggacagcacctgcgaggacagcatcgtggtgaaggaggtgtgcggcgccgtgagcagaagagccgcccagctgtgcggcgccggcctggccgccatcgtggagaagagaagagaggaccagggcctggagcacctgagaatcaccgtgggcgtggacggcaccctgtacaagctgcacccccacttcagcagaatcctgcaggagaccgtgaaggagctggcccccagatgcgacgtgaccttcatgctgagcgaggacggcagcggcaagggcgccgccctgatcaccgccgtggccaagagactgcagcaggcccagaaggagaactag

SEQ ID NO: 217956 - DNA, 2421 bp, Artificial Sequence
  derived and/or modified sequence
atgttcgccgtgcacctgatggccttctacttcagcaagctgaaggaggaccagatcaagaaggtggacagattcctgtaccacatgagactgagcgacgacaccctgctggacatcatgagaagattcagagccgagatggagaagggcctggccaaggacaccaaccccaccgccgccgtgaagatgctgcccaccttcgtgagagccatccccgacggcagcgagaacggcgagttcctgagcctggacctgggcggcagcaagttcagagtgctgaaggtgcaggtggccgaggagggcaagagacacgtgcagatggagagccagttctaccccacccccaacgagatcatcagaggcaacggcaccgagctgttcgagtacgtggccgactgcctggccgacttcatgaagaccaaggacctgaagcacaagaagctgcccctgggcctgaccttcagcttcccctgcagacagaccaagctggaggagggcgtgctgctgagctggaccaagaagttcaaggccagaggcgtgcaggacaccgacgtggtgagcagactgaccaaggccatgagaagacacaaggacatggacgtggacatcctggccctggtgaacgacaccgtgggcaccatgatgacctgcgcctacgacgacccctactgcgaggtgggcgtgatcatcggcaccggcaccaacgcctgctacatggaggacatgagcaacatcgacctggtggagggcgacgagggcagaatgtgcatcaacaccgagtggggcgccttcggcgacgacggcgccctggaggacatcagaaccgagttcgacagagagctggacctgggcagcctgaaccccggcaagcagctgttcgagaagatgatcagcggcctgtacctgggcgagctggtgagactgatcctgctgaagatggccaaggccggcctgctgttcggcggcgagaagagcagcgccctgcacaccaagggcaagatcgagaccagacacgtggccgccatggagaagtacaaggagggcctggccaacaccagagagatcctggtggacctgggcctggagcccagcgaggccgactgcatcgccgtgcagcacgtgtgcaccatcgtgagcttcagaagcgccaacctgtgcgccgccgccctggccgccatcctgaccagactgagagagaacaagaaggtggagagactgagaaccaccgtgggcatggacggcaccctgtacaagatccacccccagtaccccaagagactgcacaaggtggtgagaaagctggtgcccagctgcgacgtgagattcctgctgagcgagagcggcagcaccaagggcgccgccatggtgaccgccgtggccagcagagtgcaggcccagagaaagcagatcgacagagtgctggccctgttccagctgaccagagagcagctggtggacgtgcaggccaagatgagagccgagctggagtacggcctgaagaagaagagccacggcctggccaccgtgagaatgctgcccacctacgtgtgcggcctgcccgacggcaccgagaagggcaagttcctggccctggacctgggcggcaccaacttcagagtgctgctggtgaagatcagaagcggcagaagaagcgtgagaatgtacaacaagatcttcgccatccccctggagatcatgcagggcaccggcgaggagctgttcgaccacatcgtgcagtgcatcgccgacttcctggactacatgggcctgaagggcgccagcctgcccctgggcttcaccttcagcttcccctgcagacagatgagcatcgacaagggcaccctgatcggctggaccaagggcttcaaggccaccgactgcgagggcgaggacgtggtggacatgctgagagaggccatcaagagaagaaacgagttcgacctggacatcgtggccgtggtgaacgacaccgtgggcaccatgatgacctgcggctacgaggaccccaactgcgagatcggcctgatcgccggcaccggcagcaacatgtgctacatggaggacatgagaaacatcgagatggtggagggcggcgagggcaagatgtgcatcaacaccgagtggggcggcttcggcgacaacggctgcatcgacgacatctggaccagatacgacaccgaggtggacgagggcagcctgaaccccggcaagcagagatacgagaagatgaccagcggcatgtacctgggcgagatcgtgagacagatcctgatcgacctgaccaagcagggcctgctgttcagaggccagatcagcgagagactgagaaccagaggcatcttcgagaccaagttcctgagccagatcgagagaatgctgagcgtgatcgacgcctactgcctggacctgctgttccactag

SEQ ID NO: 217957 - DNA, 2754 bp, Artificial Sequence
  derived and/or modified sequence
atgtttgcggtccacctgatggcattctattttagtaagctcaaggaagaccagattaaaaaggttgatagattcctctatcacatgcggctttccgatgataccttacttgacataatgaggcggttcagggctgagatggagaagggcctggcaaaggatacaaatcccactgcagcagtcaaaatgctgcccacattcgtgcgcgcaattcctgacggaagtgagaatggcgaatttcttagccttgacctggggggatccaaattcagggtccttaaggtacaggtggcagaggagggtaaacgccacgtccagatggaaagtcagttttatcctacgccaaatgaaatcatccgcgggaatgggaccgaactttttgaatatgtggctgactgtcttgcagatttcatgaagactaaggacctcaaacataagaagcttcctctgggcctgacctttagctttccatgcagacagaccaagctagaagagggagttttattgagctggactaagaagttcaaggccaggggcgtccaggataccgacgtggtgagccgcttaacaaaagccatgaggcgacacaaagacatggatgtagatatccttgctctcgtgaacgacactgtgggcacaatgatgacttgcgcctacgatgacccttactgtgaggtgggggtgataataggcaccggaactaatgcctgttatatggaggatatgtcgaacatagacttggtggagggtgatgaaggccgcatgtgtatcaatacagaatggggagcatttggtgacgacggtgcccttgaggacataagaactgagttcgatcgggagctggatttgggctcgctcaacccaggtaagcagctgttcgagaaaatgatctccggtctttacctgggggaactcgtgcggctgatcctcctcaaaatggcgaaggcaggcctactttttgggggcgaaaaaagcagcgccctccatactaagggcaagattgagacaagacacgtggccgcaatggagaaatataaagagggcctggcgaacacccgagagattctggtggacttggggttagagcctagcgaggccgattgtatagccgtgcaacacgtgtgcacgatcgtttcttttcgcagcgccaacctctgcgctgctgctctggcagcaatcctgacccggctgcgagaaaataaaaaggtggaacggctgcgtactactgtcggaatggacggtaccctgtataaaatccatccccagtacccaaaacggctccacaaagtagtacgcaaactagtgccatcctgcgatgtaagattcctattgtcagagtccggatccacgaagggcgccgcaatggtgactgcagtggcttcccgagtccaggcccagcgcaagcagatagaccgagtgctcgccctatttcagctgacccgagagcaattggtagacgtccaggctaagatgagagcagagttagagtacgggttgaagaaaaagtctcacggattggcaacagtgcggatgcttcctacctatgtgtgcggtcttcccgatggcacagagaaaggaaaatttctagcccttgatctgggcggcacaaactttcgggtgctcctggtcaagattagatccggacgtaggagcgtgcggatgtacaacaaaatcttcgcgatccccctcgagatcatgcagggcaccggagaagaattgtttgatcacattgtccagtgtatcgctgactttttagactacatgggactgaagggagcctcgcttccattgggatttacattctcatttccttgccggcagatgtctattgacaaagggacgctgatcggatggactaagggcttcaaggccaccgattgtgaaggagaggacgtcgtcgacatgttacgagaagcaataaagagaagaaacgagtttgacctcgatatagtggcagtggtcaatgatacagttggtaccatgatgacatgtggatatgaggatccgaactgtgaaattggcctgatagccgggaccggtagcaacatgtgttacatggaagacatgcgaaacatcgaaatggtggaaggaggtgaagggaaaatgtgtatcaacacagaatggggcgggtttggagataatggttgtatcgatgacatctggacaagatacgacactgaagttgatgaaggatcactgaatcctggcaagcagcgatatgaaaagatgaccagcgggatgtacctgggcgagattgtacgacaaatccttatcgatctgactaaacagggtttgctgttcagaggacagatctctgagaggctgcgcacacggggtatcttcgagactaagttcctgtcacagatcgaaagtgatcgcctggccctcctccaggtgagaagaatcctgcagcagctcggcctagattccacgtgtgaagattcaatagttgtcaaagaagtgtgcggcgccgtttcaaggcgggcagcccagctgtgtggcgctggcctcgccgcaatcgttgagaagcgcagagaagaccagggactggagcacctgcgcataaccgtgggcgtcgatggcaccttgtacaaactacaccctcatttctcacgcatactgcaggagacagtcaaggaattggctcctaggtgcgatgtaaccttcatgctgtccgaggatggctccggcaagggagctgcgctgatcaccgcagtggcaaagcgcctgcagcaagcccaaaaagaaaattag

SEQ ID NO: 217958 - DNA, 2421 bp, Artificial Sequence
  derived and/or modified sequence
atgttcgcggtgcatctgatggccttctatttctcgaaactgaaggaggatcaaataaaaaaagtcgacagatttctctaccatatgcgactgagcgatgatacactgctcgacattatgcgccgcttccgcgcggaaatggagaagggtctagcaaaagataccaatcctacggctgcagtaaagatgctgccaacattcgtgcgggctattcccgatggatcagaaaacggggagtttctctcattggatctcggcggctccaaatttcgggttctgaaagtgcaagtcgctgaggagggcaagcggcatgtgcagatggaatctcaattttatcctaccccaaacgagataatccggggaaacggcaccgagctcttcgaatacgtcgccgactgcctggccgacttcatgaaaacaaaggatctgaaacacaagaaactgccattgggactgacatttagcttcccatgccggcagaccaagctggaagagggtgtgttgctgtcgtggaccaaaaagttcaaggcacgtggagtgcaggacacagacgtcgtgtcacgcctcaccaaagccatgcggcgacataaagacatggacgtcgatatactcgctttggtaaatgacaccgtagggaccatgatgacatgcgcctacgacgatccgtactgtgaagtgggtgtgataatcgggacgggtactaatgcctgttatatggaggatatgagcaatatcgacctggttgaaggcgatgaaggccggatgtgcattaacacagaatggggggcattcggagacgacggcgcactcgaggacatccgcaccgagttcgatagagaactcgatttaggcagtctgaatcctggtaagcagctcttcgagaagatgatctcaggactctatctaggagagttagtgagactgattctgctgaaaatggccaaggcaggactgctctttggaggggaaaagtcttcagcgctccataccaaaggcaagatcgagaccaggcatgtggctgcaatggaaaagtacaaagaaggactggccaatacaagagagatcttggtggacctagggctggagccaagcgaggccgattgcatcgctgtgcaacacgtgtgtactattgtttcttttcgatccgccaatctgtgtgcagcagcgctggcggcgattcttacccgtctccgggaaaacaagaaggtcgagcgcctgcgtaccactgtggggatggatggtacattgtacaaaatccacccccagtatcccaaacgtcttcataaggtggttcgcaaactagtgccatcctgcgacgtgagatttttgttgtccgaatctggttcaactaagggtgccgctatggtgaccgcggtcgcctccagggtccaagcccagcgtaagcagatcgatcgcgttctggcactgttccagttgacacgggagcagctggttgacgttcaggctaagatgagggccgaactcgagtatggacttaaaaagaaatcccacggactggcaaccgtgcgcatgctcccaacctatgtgtgtggcttgccagatggcacagagaagggtaagttcttagctttggatctgggggggaccaacttcagggttttattagtgaagattagatcaggaaggaggtcggttagaatgtacaacaaaatattcgctattcccttagagatcatgcagggcaccggagaggagctgtttgaccatatcgtgcaatgtatcgctgactttctcgactacatgggacttaagggggcctctctccccctgggctttaccttttcatttccttgccgacagatgagtatcgacaaggggacacttatcggctggacaaaggggtttaaggccactgactgcgaaggcgaggacgtcgtcgacatgctgcgtgaggccatcaagcgacgtaatgagtttgacctggacatagtcgcagtggtcaacgacactgtcggtactatgatgacctgcggatacgaggatcctaactgtgaaatcggcctgattgcaggcacgggcagtaatatgtgttacatggaggacatgcggaacatcgaaatggttgaaggcggggagggcaaaatgtgtatcaacaccgaatggggcgggtttggagataatggctgcatcgacgacatctggaccaggtacgatactgaggtggatgagggaagcttgaaccccggcaagcagagatacgaaaaaatgaccagcggaatgtacttaggggagatcgtgcggcagatcctcatcgacctgaccaaacaggggttgctgttcagaggacagatcagtgaacggctaaggacacgggggatctttgaaactaaatttttatcacagattgaacgaatgctgagtgttattgacgcctactgccttgatctgctctttcattag

SEQ ID NO: 217959 - DNA, 3689 bp, Artificial Sequence
  derived and/or modified sequence
atttagtccgcaacacctcgctccccaggaggtctgccagcctggactggaagcgtgcaacactccagagtcgtaggagtgaacactgcacaggaatctctgcccatctcaggagaaaccaaacttggggaaaatgtttgcggtccacttgatggcattttacttcagcaagctgaaggaggaccagatcaagaaggtggacaggttcctgtatcacatgcggctctccgatgacacccttttggacatcatgaggcggttccgggctgagatggagaagggcctggcaaaggacaccaaccccacggctgcagtgaagatgttgcccaccttcgtcagggccattcccgatggttccgaaaatggggagttcctttccctggatctcggagggtccaagttccgagtgctgaaggtgcaagtcgctgaagaggggaagcgacacgtgcagatggagagtcagttctacccaacgcccaatgaaatcatccgcgggaacggcacagagctgtttgaatatgtagctgactgtctggcagatttcatgaagaccaaagatttaaagcataagaaattgccccttggcctaactttttctttcccctgtcgacagactaaactggaagagggtgtcctactttcgtggacaaaaaagtttaaggcacgaggagttcaggacacggatgtggtgagccgtctgaccaaagccatgagaagacacaaggacatggacgtggacatcctggccctggtcaatgacaccgtggggaccatgatgacctgtgcctatgacgacccctactgcgaagttggtgtcatcatcggaactggcaccaatgcgtgttacatggaggacatgagcaacattgacctggtggagggcgacgagggcaggatgtgcatcaacacagagtggggggccttcggggacgacggggccctggaggacattcgcactgagttcgacagggagctggacctcggctctctcaacccaggaaagcaactgttcgagaagatgatcagtggcctgtacctgggggagcttgtcaggcttatcttgctgaagatggccaaggctggcctcctgtttggtggtgagaaatcttctgctctccacactaagggcaagatcgaaacacggcacgtggctgccatggagaagtataaagaaggccttgctaatacaagagagatcctggtggacctgggtctggaaccgtctgaggctgactgcattgccgtccagcatgtctgtaccatcgtctccttccgctcggccaatctctgtgcagcagctctggcggccatcctgacacgcctccgggagaacaagaaggtggaacggctccggaccacagtgggcatggacggcaccctctacaagatacaccctcagtacccaaaacgcctgcacaaggtggtgaggaaactggtcccaagctgtgatgtccgcttcctcctgtcagagagtggcagcaccaagggggccgccatggtgaccgcggtggcctcccgcgtgcaggcccagcggaagcagatcgacagggtgctggctttgttccagctgacccgagagcagctcgtggacgtgcaggccaagatgcgggctgagctggagtatgggctgaagaagaagagccacgggctggccacggtcaggatgctgcccacctacgtctgcgggctgccggacggcacagagaaaggaaagtttctcgccctggatcttgggggaaccaacttccgggtcctcctggtgaagatcagaagtggacggaggtcagtgcgaatgtacaacaagatcttcgccatccccctggagatcatgcagggcactggtgaggagctctttgatcacattgtgcagtgcatcgccgacttcctggactacatgggcctcaagggagcctccctacctttgggcttcacattctcatttccctgcaggcagatgagcattgacaagggaacactcatagggtggaccaaaggtttcaaggccactgactgtgaaggggaggacgtggtggacatgctcagggaagccatcaagaggagaaacgagtttgacctggacattgttgcagtcgtgaatgatacagtggggaccatgatgacctgtggctatgaagatcctaattgtgagattggcctgattgcaggaacaggcagcaacatgtgctacatggaggacatgaggaacatcgagatggtggaggggggtgaagggaagatgtgcatcaatacagagtggggaggatttggagacaatggctgcatagatgacatctggacccgatacgacacggaggtggatgaggggtccttgaatcctggcaagcagagatacgagaaaatgaccagtgggatgtacttgggggagattgtgcggcagatcctgatcgacctgaccaagcagggtctcctcttccgagggcagatttcagagcgtctccggaccaggggcatcttcgaaaccaagttcctgtcccagatcgaaagcgatcggctggcccttctccaggtcaggaggattctgcagcagctgggcctggacagcacgtgtgaggacagcatcgtggtgaaggaggtgtgcggagccgtgtcccggcgggcggcccagctctgcggtgctggcctggccgctatagtggaaaaaaggagagaagaccaggggctagagcacctgaggatcactgtgggtgtggacggcaccctgtacaagctgcaccctcacttttctagaatattgcaggaaactgtgaaggaactagcccctcgatgtgatgtgacattcatgctgtcagaagatggcagtggaaaaggggcagcactgatcactgctgtggccaagaggttacagcaggcacagaaggagaactaggaacccctgggattggacctgatgcatcttggatactgaacagcttttcctctggcagatcagttggtcagagaccaatgggcaccctcctggctgacctcaccttctggatggccgaaagagaaccccaggttctcgggtactcttagtatcttgtactggatttgcagtgacattacatgacatctctatttggtatatttgggccaaaatgggccaacttatgaaatcaaagtgtctgtcctgagagatcccctttcaacacattgttcaggtgaggcttgagctgtcaattctctatggctttcagtcttgtggctgcgggacttggaaatatatagaatctgcccatgtggctggcaggctgtttccccattgggatgcttaagccatctcttataggggattggaccctgtacttgtggatgaacattggagagcaagaggaactcacgttatgaactagggggatctcatctaacttgtccttaacttgccatgttgacttcaaacctattaagagaacaaagactttgaagtatccagccccagggtgcagagaggttgattgccagggagcactgcaggaatcattgcatgcttaaagcgagttatgtcagcaccctgtaggattttgttccttattaagtgtgtgccatgtggtggggtgctgtctggggcatctgtttttcattttgcctgtggtttgtgttgcaggtgttgatagttgttttaaggattgttaggtataggaaatccagtaaattaataaaaaaattttgattttccaataaactttgca

SEQ ID NO: 217960 - DNA, 2554 bp, Artificial Sequence
  derived and/or modified sequence
atttagtccgcaacacctcgctccccaggaggtctgccagcctggactggaagcgtgcaacactccagagtcgtaggagtgaacactgcacaggaatctctgcccatctcaggagaaaccaaacttggggaaaatgtttgcggtccacttgatggcattttacttcagcaagctgaaggaggaccagatcaagaaggtggacaggttcctgtatcacatgcggctctccgatgacacccttttggacatcatgaggcggttccgggctgagatggagaagggcctggcaaaggacaccaaccccacggctgcagtgaagatgttgcccaccttcgtcagggccattcccgatggttccgaaaatggggagttcctttccctggatctcggagggtccaagttccgagtgctgaaggtgcaagtcgctgaagaggggaagcgacacgtgcagatggagagtcagttctacccaacgcccaatgaaatcatccgcgggaacggcacagagctgtttgaatatgtagctgactgtctggcagatttcatgaagaccaaagatttaaagcataagaaattgccccttggcctaactttttctttcccctgtcgacagactaaactggaagagggtgtcctactttcgtggacaaaaaagtttaaggcacgaggagttcaggacacggatgtggtgagccgtctgaccaaagccatgagaagacacaaggacatggacgtggacatcctggccctggtcaatgacaccgtggggaccatgatgacctgtgcctatgacgacccctactgcgaagttggtgtcatcatcggaactggcaccaatgcgtgttacatggaggacatgagcaacattgacctggtggagggcgacgagggcaggatgtgcatcaacacagagtggggggccttcggggacgacggggccctggaggacattcgcactgagttcgacagggagctggacctcggctctctcaacccaggaaagcaactgttcgagaagatgatcagtggcctgtacctgggggagcttgtcaggcttatcttgctgaagatggccaaggctggcctcctgtttggtggtgagaaatcttctgctctccacactaagggcaagatcgaaacacggcacgtggctgccatggagaagtataaagaaggccttgctaatacaagagagatcctggtggacctgggtctggaaccgtctgaggctgactgcattgccgtccagcatgtctgtaccatcgtctccttccgctcggccaatctctgtgcagcagctctggcggccatcctgacacgcctccgggagaacaagaaggtggaacggctccggaccacagtgggcatggacggcaccctctacaagatacaccctcagtacccaaaacgcctgcacaaggtggtgaggaaactggtcccaagctgtgatgtccgcttcctcctgtcagagagtggcagcaccaagggggccgccatggtgaccgcggtggcctcccgcgtgcaggcccagcggaagcagatcgacagggtgctggctttgttccagctgacccgagagcagctcgtggacgtgcaggccaagatgcgggctgagctggagtatgggctgaagaagaagagccacgggctggccacggtcaggatgctgcccacctacgtctgcgggctgccggacggcacagagaaaggaaagtttctcgccctggatcttgggggaaccaacttccgggtcctcctggtgaagatcagaagtggacggaggtcagtgcgaatgtacaacaagatcttcgccatccccctggagatcatgcagggcactggtgaggagctctttgatcacattgtgcagtgcatcgccgacttcctggactacatgggcctcaagggagcctccctacctttgggcttcacattctcatttccctgcaggcagatgagcattgacaagggaacactcatagggtggaccaaaggtttcaaggccactgactgtgaaggggaggacgtggtggacatgctcagggaagccatcaagaggagaaacgagtttgacctggacattgttgcagtcgtgaatgatacagtggggaccatgatgacctgtggctatgaagatcctaattgtgagattggcctgattgcaggaacaggcagcaacatgtgctacatggaggacatgaggaacatcgagatggtggaggggggtgaagggaagatgtgcatcaatacagagtggggaggatttggagacaatggctgcatagatgacatctggacccgatacgacacggaggtggatgaggggtccttgaatcctggcaagcagagatacgagaaaatgaccagtgggatgtacttgggggagattgtgcggcagatcctgatcgacctgaccaagcagggtctcctcttccgagggcagatttcagagcgtctccggaccaggggcatcttcgaaaccaagttcctgtcccagatcgaaaggatgttatcagtcattgatgcatattgcctggatctattatttcactag

SEQ ID NO: 217961 - DNA, 2754 bp, Artificial Sequence
  derived and/or modified sequence
atgtttgctgtgcacctgatggccttctacttcagcaagctgaaggaggaccagatcaagaaggtggaccgcttcctgtaccacatgaggctgagtgatgacaccctgctggacatcatgaggcgcttccgggcagagatggagaagggcctggccaaggacaccaaccccacagctgctgtgaagatgctgcccacctttgtgcgggccatcccagatggctctgaaaatggagagttcctgagcctggacctgggcggcagcaagttccgggtgctgaaggtgcaggtggccgaggagggcaagagacatgtgcagatggagagccagttctaccccaccccaaatgagatcatcagaggaaatggaacagagctgtttgaatatgtggccgactgcctggccgacttcatgaagaccaaggacctgaagcacaagaagctgcccctgggcctgaccttctccttcccctgccggcagaccaagctggaggagggcgtgctgctgtcctggaccaagaagttcaaggcccggggcgtgcaggacacagatgtggtgtcccggctgaccaaggccatgaggaggcacaaggacatggatgtggacatcctggccctggtgaatgacacagtgggcaccatgatgacctgtgcctatgatgacccctactgtgaggtgggcgtcatcatcggcaccggcaccaatgcctgctacatggaggacatgagcaacatcgacctggtggagggagatgagggccgcatgtgcatcaacacagagtggggcgcctttggagatgatggagccctggaggacatcagaacagaatttgaccgggagctggacctgggcagcctgaaccctgggaagcagctgtttgagaagatgatcagcggcctgtacctgggggagctggtgcggctcatcctgctgaagatggccaaggccggcctgctgtttggaggagagaagagcagcgccctgcacaccaagggcaagattgagaccaggcatgtggccgccatggagaagtacaaggagggcctggccaacacccgggagatcctggtggacctgggcctggagcccagcgaggccgactgcatcgctgtgcagcacgtgtgcaccatcgtgtccttccgcagcgccaacctgtgtgccgccgccctggccgccatcctgacccggctgcgggagaacaagaaggtggagcggctgcggaccaccgtgggcatggatggcaccctgtacaagatccacccccagtaccccaagaggctgcacaaggtggtgaggaagctggtgcccagctgtgatgtgcgcttcctgctgtctgagagcggcagcaccaagggagctgccatggtgacagctgtggccagccgggtgcaggcccagaggaagcagattgacagagtgctggccctcttccagctgacccgggagcagctggtggatgtgcaggccaagatgagagctgagctggagtatggcctgaagaagaagagccacggcctggccaccgtgaggatgctgcccacctacgtgtgtggcctgcctgatggaacagagaagggcaagttcctggccctggacctgggcggcaccaacttccgggtgctgctggtgaagatccgctctggaagaagatctgtgaggatgtacaacaagatctttgccatccccctggagatcatgcagggcactggagaggagctgtttgaccacatcgtgcagtgcatcgctgacttcctggactacatgggcctgaagggggccagcctgcccctgggcttcaccttctccttcccctgccggcagatgagcattgacaagggcaccctcatcggctggaccaagggcttcaaggccacagactgtgagggggaggatgtggtggacatgctgcgggaggccatcaagagaagaaatgaatttgacctggacatcgtggccgtggtgaatgacacagtgggcaccatgatgacctgtggctatgaggaccccaactgtgaaattggcctgattgctggcaccggcagcaacatgtgctacatggaggacatgaggaacatcgagatggtggagggcggggagggcaagatgtgcatcaacacagagtggggcggctttggagacaatggctgcattgatgacatctggaccaggtatgacacagaggtggatgagggcagcctgaaccctgggaagcagagatatgagaagatgaccagcggcatgtacctgggggagatcgtgcggcagatcctgattgacctgaccaagcagggcctgctcttccggggccagatcagcgagcggctgcggacccggggcatctttgagaccaagttcctgagccagattgaaagtgaccggctggccctgctgcaggtgcggcgcatcctgcagcagctgggcctggacagcacctgtgaagattccatcgtggtgaaggaggtgtgtggggctgtgtccagaagagctgcccagctgtgtggggccggcctggccgccatcgtggagaagaggcgggaggaccagggcctggagcacctgcgcatcaccgtgggcgtggatggcaccctgtacaagctgcacccccacttcagccgcatcctgcaggagaccgtgaaggagctggccccccgctgtgatgtgaccttcatgctgtctgaagatggcagcggcaagggggccgccctgatcacagctgtggccaagaggctgcagcaggcccagaaggagaactag

SEQ ID NO: 217962 - DNA, 2421 bp, Artificial Sequence
  derived and/or modified sequence
atgtttgctgtgcacctgatggccttctacttcagcaagctgaaggaggaccagatcaagaaggtggaccgcttcctgtaccacatgaggctgagtgatgacaccctgctggacatcatgaggcgcttccgggcagagatggagaagggcctggccaaggacaccaaccccacagctgctgtgaagatgctgcccacctttgtgcgggccatcccagatggctctgaaaatggagagttcctgagcctggacctgggcggcagcaagttccgggtgctgaaggtgcaggtggccgaggagggcaagagacatgtgcagatggagagccagttctaccccaccccaaatgagatcatcagaggaaatggaacagagctgtttgaatatgtggccgactgcctggccgacttcatgaagaccaaggacctgaagcacaagaagctgcccctgggcctgaccttctccttcccctgccggcagaccaagctggaggagggcgtgctgctgtcctggaccaagaagttcaaggcccggggcgtgcaggacacagatgtggtgtcccggctgaccaaggccatgaggaggcacaaggacatggatgtggacatcctggccctggtgaatgacacagtgggcaccatgatgacctgtgcctatgatgacccctactgtgaggtgggcgtcatcatcggcaccggcaccaatgcctgctacatggaggacatgagcaacatcgacctggtggagggagatgagggccgcatgtgcatcaacacagagtggggcgcctttggagatgatggagccctggaggacatcagaacagaatttgaccgggagctggacctgggcagcctgaaccctgggaagcagctgtttgagaagatgatcagcggcctgtacctgggggagctggtgcggctcatcctgctgaagatggccaaggccggcctgctgtttggaggagagaagagcagcgccctgcacaccaagggcaagattgagaccaggcatgtggccgccatggagaagtacaaggagggcctggccaacacccgggagatcctggtggacctgggcctggagcccagcgaggccgactgcatcgctgtgcagcacgtgtgcaccatcgtgtccttccgcagcgccaacctgtgtgccgccgccctggccgccatcctgacccggctgcgggagaacaagaaggtggagcggctgcggaccaccgtgggcatggatggcaccctgtacaagatccacccccagtaccccaagaggctgcacaaggtggtgaggaagctggtgcccagctgtgatgtgcgcttcctgctgtctgagagcggcagcaccaagggagctgccatggtgacagctgtggccagccgggtgcaggcccagaggaagcagattgacagagtgctggccctcttccagctgacccgggagcagctggtggatgtgcaggccaagatgagagctgagctggagtatggcctgaagaagaagagccacggcctggccaccgtgaggatgctgcccacctacgtgtgtggcctgcctgatggaacagagaagggcaagttcctggccctggacctgggcggcaccaacttccgggtgctgctggtgaagatccgctctggaagaagatctgtgaggatgtacaacaagatctttgccatccccctggagatcatgcagggcactggagaggagctgtttgaccacatcgtgcagtgcatcgctgacttcctggactacatgggcctgaagggggccagcctgcccctgggcttcaccttctccttcccctgccggcagatgagcattgacaagggcaccctcatcggctggaccaagggcttcaaggccacagactgtgagggggaggatgtggtggacatgctgcgggaggccatcaagagaagaaatgaatttgacctggacatcgtggccgtggtgaatgacacagtgggcaccatgatgacctgtggctatgaggaccccaactgtgaaattggcctgattgctggcaccggcagcaacatgtgctacatggaggacatgaggaacatcgagatggtggagggcggggagggcaagatgtgcatcaacacagagtggggcggctttggagacaatggctgcattgatgacatctggaccaggtatgacacagaggtggatgagggcagcctgaaccctgggaagcagagatatgagaagatgaccagcggcatgtacctgggggagatcgtgcggcagatcctgattgacctgaccaagcagggcctgctcttccggggccagatcagcgagcggctgcggacccggggcatctttgagaccaagttcctgagccagattgaaagaatgctgtctgtgattgatgcctactgcctggacctgctcttccactag

SEQ ID NO: 217963 - DNA, 2754 bp, Artificial Sequence
  derived and/or modified sequence
atgttcgccgtgcacctgatggccttctacttcagcaagctgaaggaagatcaaatcaaaaaagttgatcgattcctttaccatatgcggctgtccgatgatacactcttggatatcatgcggcgctttagagctgaaatggaaaaggggttggccaaagatacaaacccgacggcggccgtgaagatgctgccaacatttgtccgcgccatcccagacggaagcgaaaatggggaatttctttccctggacctgggaggaagtaaatttcgagtgctgaaagtacaggtcgcggaggaaggaaagcggcacgtgcagatggagtctcagttctacccaacaccaaacgaaattattaggggcaacggtacggaacttttcgagtatgtagcggattgtttggccgactttatgaaaacaaaggatctgaagcataaaaagcttcccctgggtcttacattcagcttcccctgtcggcagacaaagctcgaagaaggtgtactgctaagttggacgaaaaaatttaaggcaagaggtgttcaggataccgatgtagtctctcgattgactaaagcaatgcggaggcacaaggatatggatgtcgacatcctggcgctggtgaacgacaccgtgggcacaatgatgacatgtgcttatgacgacccgtactgcgaagtgggcgtgatcatcgggaccggtactaacgcctgttacatggaggatatgtcaaatatcgatctcgtcgaaggggatgaagggcgaatgtgcattaatactgaatggggtgcattcggtgacgacggcgcgctggaggatatcagaacagagttcgaccgggaactggatttgggatctttaaaccctgggaagcagctctttgaaaagatgatctccgggttgtatcttggtgaattggtgcgcctgattctcctgaaaatggctaaggccggccttctttttggcggagagaaatccagcgcactacacacgaagggaaagatagaaacccggcacgttgcggcgatggaaaagtataaggaggggctggcaaatacaagggaaattctggtcgacctaggattggagcccagtgaagccgactgcatcgccgtccaacatgtctgcaccatcgtgtcgttcaggtctgccaatctgtgcgccgcggctctggcagcaattttgacgcggctgagagagaacaagaaggtggagaggctccggacgactgtgggcatggacggcaccctctacaagatacatccccagtacccaaagcggctgcataaggttgttagaaaattggtaccaagctgcgatgtgcggtttctgctcagcgagtcagggagtaccaagggcgcagctatggtgaccgcagttgcctctagggtgcaagctcagcgcaaacagattgacagagtccttgccctcttccagttaactcgcgagcaactggtcgacgttcaagctaagatgcgggccgaattggagtatggactgaagaagaagtcacacggacttgccacagtgaggatgcttcccacctacgtgtgcggcctgcccgacgggactgaaaaggggaagttcctcgcattggatctgggcggaacaaatttcagggttttactggtaaagattcgctccgggaggcggagtgtgcggatgtataataagatcttcgcaatcccattggagataatgcagggcaccggggaggagctgtttgaccatatagtgcaatgcatcgctgacttcctggactacatgggattaaaaggcgcctctttacctttgggcttcacattctcgtttccatgtcgccaaatgagtatagataagggaacgctgattggctggacaaaaggatttaaggcaactgactgcgagggagaggatgttgtggacatgctgagggaagcgatcaaaaggcgcaatgagtttgacctcgatatagtggctgttgttaatgacaccgtggggaccatgatgacttgtgggtacgaggatcccaactgtgagatcggcctgatcgccgggacaggtagtaacatgtgctatatggaggatatgcggaatatagagatggtcgagggtggtgagggtaaaatgtgtatcaacactgagtgggggggctttggagataatggctgtatcgacgacatctggacccgctacgatacagaggtggatgaaggatcgctgaatccagggaaacagcggtatgaaaagatgacatccggcatgtatctaggagaaattgtcagacagatactcattgacctaacaaaacagggccttctctttcgcgggcaaatcagcgagagacttcgcacccgcggtatctttgagaccaaatttttgtcccagatagaaagtgatcggctggctctgctgcaggtcagaaggatccttcagcagcttggtctcgattccacttgtgaggactccatagttgtcaaagaagtgtgtggagccgtgtcccgtagagccgcacagctttgcggggctggcctcgcagccatcgtggagaagcgcagagaggatcagggtttggagcaccttcgtattaccgttggcgtggacggaactctctacaagctgcatccccatttctctcggatactgcaggaaaccgtcaaggaattagcgccacgctgtgatgtgactttcatgcttagcgaagacggaagcggtaaaggtgccgccctgatcaccgccgtggcgaagagactgcagcaagcgcagaaggagaactag

SEQ ID NO: 217964 - DNA, 2421 bp, Artificial Sequence
  derived and/or modified sequence
atgttcgccgtgcacctgatggccttctacttcagcaagctgaaggaggatcagataaagaaagtagataggtttctttaccatatgcgattgtctgatgatacactgctcgatatcatgcggcgcttccgggccgaaatggaaaaggggctggccaaagacactaatccaacagctgcagtcaagatgctgcccacctttgtcagagccatccccgatgggagtgagaatggggagtttctgtctctggatctaggggggtcaaagtttcgagtgttaaaagtccaggtggccgaggaaggcaagagacacgtgcagatggagagccagttttacccaacccccaacgagatcatccgtggcaatggaacagaactctttgagtacgtcgcagattgtctcgctgactttatgaagactaaggacttaaaacataagaaacttccgctgggtctgacgttttcttttccctgtaggcagacaaaacttgaagagggggtgcttctgagctggaccaagaagtttaaagcccgtggggtgcaggatacagatgtggtgtcaagattgactaaggccatgagaaggcacaaagacatggatgtggacatacttgccctggtgaacgacactgtgggaaccatgatgacgtgcgcctatgacgatccttactgtgaggtcggggtgatcatcggtactggcactaatgcctgttacatggaagacatgtccaatattgacttggtggagggcgatgaagggaggatgtgtattaacacggaatggggcgcctttggagacgacggtgctctggaggatataaggactgagtttgaccgggaacttgatctgggaagcctgaatcctggtaaacaactgtttgagaaaatgatatccgggctttatctgggagagctggtgcggttaatactgttgaagatggcgaaagctgggttactgttcggtggggagaaaagtagcgccctgcacaccaaaggtaagatagagacacgacacgttgcggccatggaaaagtacaaagagggcctggccaatacccgtgagatcctcgtcgatctcggacttgaacctagtgaagctgactgtatcgccgtgcagcatgtctgcactattgtgtcctttaggtcggccaacttgtgcgcagccgctcttgctgctatattgacacgcctgcgcgagaacaagaaggtggaacggctgcgcactaccgttggaatggatggcaccttgtataaaattcatccacagtacccgaagcggctgcataaagtcgttaggaaactcgtccctagctgtgacgtaaggttcttgctgtccgagagcgggtctaccaagggggctgcgatggtgaccgcggtggccagcagagtccaggctcagaggaagcagattgatcgcgtactcgcactgttccagcttactagggaacagctcgtggacgttcaagccaagatgagggcggaactggaatacggccttaagaagaaaagccatggtttggcgaccgttcgaatgctgcctacgtatgtgtgcggcctcccagacggcaccgaaaaggggaagttcctggcactggacctgggcggcaccaacttcagggttctgctcgtgaagatacgatctggacgaaggtccgtaaggatgtataacaaaatctttgccatccccctcgaaataatgcagggcacaggcgaagaattatttgatcacattgttcagtgtatcgcagactttctcgactacatgggtctcaagggtgcatctctcccacttggattcactttctccttcccatgccggcaaatgagtatcgacaagggcacattgattggctggactaagggttttaaagccaccgattgcgagggcgaagatgtggtggacatgctaagagaggccatcaaacgtcgcaatgaatttgacctggacattgtcgccgtagtcaatgataccgtgggtacaatgatgacctgtgggtatgaagaccccaactgtgaaatcggcttgatcgctggaaccggctcaaacatgtgctacatggaggacatgagaaatatagaaatggtcgaagggggcgaaggtaaaatgtgcattaacactgagtggggtggctttggggataacggttgtattgatgacatctggacaaggtacgataccgaagtggacgaaggttccctgaatccaggaaagcagagatacgagaaaatgacctctggaatgtacctgggggagattgtgcgacagatacttattgacctgactaagcaaggactcctatttcgcggacagataagtgagcgactccggaccagaggcatcttcgaaacgaagtttttaagccagatcgagcgtatgctctccgtgatcgatgcatactgcttggatttgctgtttcactag

SEQ ID NO: 217965 - DNA, 2754 bp, Artificial Sequence
  derived and/or modified sequence
atgtttgctgttcacttgatggcattttattttagcaagctcaaagaagaccagattaagaaggtggaccggttcctgtatcatatgcgcttgtctgatgacactctactcgacataatgcggagattcagagccgagatggaaaagggactggcaaaagatactaaccctactgccgctgtgaagatgttacccactttcgtgagagccattccggatgggtccgagaatggggagttcctgagtctcgaccttggcggatcgaagttccgcgtcctgaaagttcaggtggccgaagagggcaaacggcacgttcagatggagtctcagttctaccctacaccaaatgagatcattaggggcaatggaacggaattgtttgaatatgttgccgattgcctggccgattttatgaaaacaaaagatctaaaacataagaaattgcctctgggactgaccttctcattcccctgccgtcaaaccaagttggaggaaggggtcctcctgtcctggacaaaaaaattcaaggcccgtggcgtgcaggacactgacgtggtttcgcgcttgacaaaggcaatgcgcagacataaggacatggatgtcgatatattagccctggttaatgatactgtgggtacgatgatgacatgcgcctacgacgatccttattgcgaagttggagtcatcataggaaccggcaccaacgcttgctatatggaggatatgtccaatatcgacctagttgaaggagacgaggggagaatgtgtatcaataccgaatggggagcattcggcgacgacggggcactagaagatattaggactgaattcgaccgcgagctggatttgggatccttgaacccaggcaagcaactgtttgaaaagatgatttctggattatacctgggcgagctggtacggctcattctcttaaaaatggcaaaggcaggtctactgttcggcggagaaaagtctagcgctctccacacgaaaggtaagattgaaacgagacacgtagccgcaatggaaaagtacaaggaagggctagctaacaccagggagatcctggtcgatctgggactcgaaccatccgaggctgattgcatcgccgtgcagcacgtatgcacaattgtatccttcaggagtgctaacctctgcgcggctgccctagcagcaatcttaacaagactgcgggagaataaaaaggttgaacggctccgcactaccgtgggcatggatggtacactctacaagatccatcctcagtaccccaagcggctgcacaaggtcgtgcgcaaactggtgccttcatgcgatgttaggttcttactatcagagtcaggctcaacaaaaggagcagcaatggtgaccgccgtagcttcacgcgtgcaggctcaacgcaagcaaattgatcgggtgttagccctgttccaacttacacgggaacagctggtggatgtgcaggcaaagatgagggccgagctggaatatggactgaaaaagaaatcccacggactggccactgttcgcatgcttccaacctatgtatgtggattacccgacggcacagagaaagggaagttcttagctttggacctgggtgggaccaatttccgggtgctgctggtcaagatacgctccggtcggagaagcgtaaggatgtataataaaatctttgcaataccactcgagatcatgcagggaaccggcgaggagctgttcgatcacatcgtccaatgtattgcagacttcctggactatatggggctaaaaggcgcttccctgcccctgggattcacattctcattcccatgccgccagatgagtatcgacaagggcacattgataggatggacaaagggcttcaaagccactgattgcgagggagaggatgtggtggatatgctgagggaggctatcaagcgaaggaatgagttcgatctggatattgtggcagtggtgaacgatacagtgggaaccatgatgacctgcggctacgaggatcccaattgtgaaatcggactcatcgcaggtaccgggtctaacatgtgttacatggaagacatgcgaaatattgaaatggttgaaggaggagaggggaagatgtgcatcaacaccgagtgggggggatttggggacaacggctgtatagatgatatctggactcgatatgacaccgaggtggacgaaggaagtctgaatcctgggaagcagcgatatgaaaaaatgacttccgggatgtacctgggagaaatcgttcgacagattttgattgacctgaccaaacagggcctcctctttcggggtcagatatctgagcgattgcggaccagaggtatctttgagacgaaattcctctcgcagatcgagagcgatcgccttgctctgctgcaggtccgacggatccttcagcaactggggctcgactctacctgcgaggactcgatagtcgtgaaggaggtttgcggagcggtgtcccgaagagctgcccagctctgcggtgctggactcgcggcaatagtcgagaaacggcgagaagaccagggcctagaacaccttcgtattacagtcggggtggatgggaccctctataagctgcacccacactttagccgaattctccaagaaactgtgaaagagctcgcaccccgatgcgatgtgacttttatgctgagcgaggacggcagcggaaagggggctgccttgatcactgcggtggctaagcgattgcagcaagctcagaaggagaactag

SEQ ID NO: 217966 - DNA, 2421 bp, Artificial Sequence
  derived and/or modified sequence
atgttcgcagttcaccttatggctttttactttagtaaactgaaggaagaccaaatcaagaaggtggatcggttcctatatcacatgcgtttgagcgatgacacactactagatattatgagaagatttcgggcagagatggaaaaggggctggctaaagataccaaccctacagctgctgttaagatgctgccgaccttcgtacgggcaatacctgacggatccgagaatggcgaattcctgagtctagacctgggagggtctaagtttagggtgcttaaagtgcaggttgcagaagaaggcaagaggcatgtccagatggagtcacagttctaccccacaccaaacgagatcattcgcggtaatgggacagagctatttgaatacgtcgccgattgtctcgctgacttcatgaagactaaagatctgaagcacaaaaaactaccactcggtttaacgttcagtttcccctgtaggcagacgaagctggaagaaggagtgttgctgtcatggaccaaaaagtttaaagccaggggcgtacaagacacagatgtcgtcagccggttaactaaggcgatgcggagacataaagatatggacgtggacatcctcgcactcgtgaatgatacagtgggtacgatgatgacatgcgcctacgacgacccctattgtgaagtgggggtgattatcggaaccggcaccaatgcttgttatatggaagacatgtccaacattgacctggtggaaggcgatgagggacgtatgtgcatcaatacggagtggggtgctttcggcgacgatggagcgctcgaggatatccgcactgagtttgaccgcgaattggatcttgggtctctcaaccccggaaagcagcttttcgagaaaatgattagtggattatatctgggcgaactggtacggcttattctgttaaaaatggctaaagcagggctgctgttcggcggtgagaaaagcagcgccttgcacacaaaagggaagatagagaccaggcatgtagcagccatggagaaatataaagaggggttggccaacacccgggaaatactggtggatctgggcctggaacctagcgaggcagactgcatcgcagtccagcacgtttgtacaatcgtatctttccggagcgcaaatctttgcgctgccgctctggcagccatcctcacccgacttagagagaataagaaagtcgaaagacttcggaccacagtgggaatggacggcaccctttacaagattcatccacagtatcctaagaggcttcataaggtcgtgagaaaactggtgcctagctgtgacgtccgattcctcctctctgagtccgggagcactaagggagctgcaatggtcactgccgtggcatcccgagtgcaagcccagcgaaagcagatcgaccgagttctggcgctgtttcagctcacgcgggagcagctcgtggacgtccaggccaagatgagggccgaattagagtacggtttgaagaagaaaagtcatggcctcgctaccgtgaggatgctcccaacctatgtttgcgggctcccagacgggacggagaaggggaaattcctcgcgctggatttaggagggactaattttcgcgtgttattggttaagattcggtctggaaggcgctctgtgaggatgtataacaaaatattcgccatacccctagaaataatgcagggcaccggagaggagctcttcgatcacatcgtgcaatgtatagcagacttcctagactatatgggactcaagggagcatccctccctctgggattcaccttttcgtttccttgccgccaaatgagcatcgacaagggcacgctgatcgggtggaccaaggggttcaaagctacggactgtgagggggaggatgtggtggatatgcttcgtgaagcgatcaagcggagaaacgaatttgacctcgatattgtcgcagtagtcaacgacacagtgggaacaatgatgacgtgtggatacgaggatcctaactgcgaaattgggctcattgccggtaccggcagtaacatgtgttatatggaagacatgcggaacatcgaaatggtcgaagggggagaggggaagatgtgtatcaataccgagtggggtggcttcggtgacaacgggtgtattgacgacatttggaccagatatgatacggaagttgatgaaggaagcctgaatcccggtaagcagcggtatgagaagatgacgtctgggatgtatctgggagagattgtcagacaaattcttatcgatctgacgaaacagggtctgctgttccggggacagatttccgagcgcctgcggacacggggaatcttcgagaccaagtttctgtcgcagatagaacgcatgctttctgtcatcgacgcctactgtttggacttgctcttccactag

SEQ ID NO: 217967 - protein, 1342 aa, Artificial Sequence
  derived and/or modified sequence
MKRIFSLLEKTWLGAPIQFAWQKTSGNYLAVTGADYIVKIFDRHGQKRSEINLPGNCVAMDWDKDGDVLAVIAEKSSCIYLWDANTNKTSQLDNGMRDQMSFLLWSKVGSFLAVGTVKGNLLIYNHQTSRKIPVLGKHTKRITCGCWNAENLLALGGEDKMITVSNQEGDTIRQTQVRSEPSNMQFFLMKMDDRTSAAESMISVVLGKKTLFFLNLNEPDNPADLEFQQDFGNIVCYNWYGDGRIMIGFSCGHFVVISTHTGELGQEIFQARNHKDNLTSIAVSQTLNKVATCGDNCIKIQDLVDLKDMYVILNLDEENKGLGTLSWTDDGQLLALSTQRGSLHVFLTKLPILGDACSTRIAYLTSLLEVTVANPVEGELPITVSVDVEPNFVAVGLYHLAVGMNNRAWFYVLGENAVKKLKDMEYLGTVASICLHSDYAAALFEGKVQLHLIESEILDAQEERETRLFPAVDDKCRILCHALTSDFLIYGTDTGVVQYFYIEDWQFVNDYRHPVSVKKIFPDPNGTRLVFIDEKSDGFVYCPVNDATYEIPDFSPTIKGVLWENWPMDKGVFIAYDDDKVYTYVFHKDTIQGAKVILAGSTKVPFAHKPLLLYNGELTCQTQSGKVNNIYLSTHGFLSNLKDTGPDELRPMLAQNLMLKRFSDAWEMCRILNDEAAWNELARACLHHMEVEFAIRVYRRIGNVGIVMSLEQIKGIEDYNLLAGHLAMFTNDYNLAQDLYLASSCPIAALEMRRDLQHWDSALQLAKHLAPDQIPFISKEYAIQLEFAGDYVNALAHYEKGITGDNKEHDEACLAGVAQMSIRMGDIRRGVNQALKHPSRVLKRDCGAILENMKQFSEAAQLYEKGLYYDKAASVYIRSKNWAKVGDLLPHVSSPKIHLQYAKAKEADGRYKEAVVAYENAKQWQSVIRIYLDHLNNPEKAVNIVRETQSLDGAKMVARFFLQLGDYGSAIQFLVMSKCNNEAFTLAQQHNKMEIYADIIGSEDTTNEDYQSIALYFEGEKRYLQAGKFFLLCGQYSRALKHFLKCPSSEDNVAIEMAIETVGQAKDELLTNQLIDHLLGENDGMPKDAKYLFRLYMALKQYREAAQTAIIIAREEQSAGNYRNAHDVLFSMYAELKSQKIKIPSEMATNLMILHSYILVKIHVKNGDHMKGARMLIRVANNISKFPSHIVPILTSTVIECHRAGLKNSAFSFAAMLMRPEYRSKIDAKYKKKIEGMVRRPDISEIEEATTPCPFCKFLLPECELLCPGCKNSIPYCIATGRHMLKDDWTVCPHCDFPALYSELKIMLNTESTCPMCSERLNAAQLKKISDCTQYLRTEEEL

SEQ ID NO: 217968 - protein, 480 aa, Artificial Sequence
  derived and/or modified sequence
KRIFSLLEKTWLGAPIQFAWQKTSGNYLAVTGADYIVKIFDRHGQKRSEINLPGNCVAMDWDKDGDVLAVIAEKSSCIYLWDANTNKTSQLDNGMRDQMSFLLWSKVGSFLAVGTVKGNLLIYNHQTSRKIPVLGKHTKRITCGCWNAENLLALGGEDKMITVSNQEGDTIRQTQVRSEPSNMQFFLMKMDDRTSAAESMISVVLGKKTLFFLNLNEPDNPADLEFQQDFGNIVCYNWYGDGRIMIGFSCGHFVVISTHTGELGQEIFQARNHKDNLTSIAVSQTLNKVATCGDNCIKIQDLVDLKDMYVILNLDEENKGLGTLSWTDDGQLLALSTQRGSLHVFLTKLPILGDACSTRIAYLTSLLEVTVANPVEGELPITVSVDVEPNFVAVGLYHLAVGMNNRAWFYVLGENAVKKLKDMEYLGTVASICLHSDYAAALFEGKVQLHLKAKSWMLKKNVRLGFSQQWMISAVSYAMP

SEQ ID NO: 217969 - protein, 481 aa, Artificial Sequence
  derived and/or modified sequence
MKRIFSLLEKTWLGAPIQFAWQKTSGNYLAVTGADYIVKIFDRHGQKRSEINLPGNCVAMDWDKDGDVLAVIAEKSSCIYLWDANTNKTSQLDNGMRDQMSFLLWSKVGSFLAVGTVKGNLLIYNHQTSRKIPVLGKHTKRITCGCWNAENLLALGGEDKMITVSNQEGDTIRQTQVRSEPSNMQFFLMKMDDRTSAAESMISVVLGKKTLFFLNLNEPDNPADLEFQQDFGNIVCYNWYGDGRIMIGFSCGHFVVISTHTGELGQEIFQARNHKDNLTSIAVSQTLNKVATCGDNCIKIQDLVDLKDMYVILNLDEENKGLGTLSWTDDGQLLALSTQRGSLHVFLTKLPILGDACSTRIAYLTSLLEVTVANPVEGELPITVSVDVEPNFVAVGLYHLAVGMNNRAWFYVLGENAVKKLKDMEYLGTVASICLHSDYAAALFEGKVQLHLKAKSWMLKKNVRLGFSQQWMISAVSYAMP

SEQ ID NO: 217970 - DNA, 3549 bp, Artificial Sequence
  derived and/or modified sequence
atgatcaccgtgagcaaccaggagggcgacaccatcagacagacccaggtgagaagcgagcccagcaacatgcagttcttcctgatgaagatggacgacagaaccagcgccgccgagagcatgatcagcgtggtgctgggcaagaagaccctgttcttcctgaacctgaacgagcccgacaaccccgccgacctggagttccagcaggacttcggcaacatcgtgtgctacaactggtacggcgacggcagaatcatgatcggcttcagctgcggccacttcgtggtgatcagcacccacaccggcgagctgggccaggagatcttccaggccagaaaccacaaggacaacctgaccagcatcgccgtgagccagaccctgaacaaggtggccacctgcggcgacaactgcatcaagatccaggacctggtggacctgaaggacatgtacgtgatcctgaacctggacgaggagaacaagggcctgggcaccctgagctggaccgacgacggccagctgctggccctgagcacccagagaggcagcctgcacgtgttcctgaccaagctgcccatcctgggcgacgcctgcagcaccagaatcgcctacctgaccagcctgctggaggtgaccgtggccaaccccgtggagggcgagctgcccatcaccgtgagcgtggacgtggagcccaacttcgtggccgtgggcctgtaccacctggccgtgggcatgaacaacagagcctggttctacgtgctgggcgagaacgccgtgaagaagctgaaggacatggagtacctgggcaccgtggccagcatctgcctgcacagcgactacgccgccgccctgttcgagggcaaggtgcagctgcacctgatcgagagcgagatcctggacgcccaggaggagagagagaccagactgttccccgccgtggacgacaagtgcagaatcctgtgccacgccctgaccagcgacttcctgatctacggcaccgacaccggcgtggtgcagtacttctacatcgaggactggcagttcgtgaacgactacagacaccccgtgagcgtgaagaagatcttccccgaccccaacggcaccagactggtgttcatcgacgagaagagcgacggcttcgtgtactgccccgtgaacgacgccacctacgagatccccgacttcagccccaccatcaagggcgtgctgtgggagaactggcccatggacaagggcgtgttcatcgcctacgacgacgacaaggtgtacacctacgtgttccacaaggacaccatccagggcgccaaggtgatcctggccggcagcaccaaggtgcccttcgcccacaagcccctgctgctgtacaacggcgagctgacctgccagacccagagcggcaaggtgaacaacatctacctgagcacccacggcttcctgagcaacctgaaggacaccggccccgacgagctgagacccatgctggcccagaacctgatgctgaagagattcagcgacgcctgggagatgtgcagaatcctgaacgacgaggccgcctggaacgagctggccagagcctgcctgcaccacatggaggtggagttcgccatcagagtgtacagaagaatcggcaacgtgggcatcgtgatgagcctggagcagatcaagggcatcgaggactacaacctgctggccggccacctggccatgttcaccaacgactacaacctggcccaggacctgtacctggccagcagctgccccatcgccgccctggagatgagaagagacctgcagcactgggacagcgccctgcagctggccaagcacctggcccccgaccagatccccttcatcagcaaggagtacgccatccagctggagttcgccggcgactacgtgaacgccctggcccactacgagaagggcatcaccggcgacaacaaggagcacgacgaggcctgcctggccggcgtggcccagatgagcatcagaatgggcgacatcagaagaggcgtgaaccaggccctgaagcaccccagcagagtgctgaagagagactgcggcgccatcctggagaacatgaagcagttcagcgaggccgcccagctgtacgagaagggcctgtactacgacaaggccgccagcgtgtacatcagaagcaagaactgggccaaggtgggcgacctgctgccccacgtgagcagccccaagatccacctgcagtacgccaaggccaaggaggccgacggcagatacaaggaggccgtggtggcctacgagaacgccaagcagtggcagagcgtgatcagaatctacctggaccacctgaacaaccccgagaaggccgtgaacatcgtgagagagacccagagcctggacggcgccaagatggtggccagattcttcctgcagctgggcgactacggcagcgccatccagttcctggtgatgagcaagtgcaacaacgaggccttcaccctggcccagcagcacaacaagatggagatctacgccgacatcatcggcagcgaggacaccaccaacgaggactaccagagcatcgccctgtacttcgagggcgagaagagatacctgcaggccggcaagttcttcctgctgtgcggccagtacagcagagccctgaagcacttcctgaagtgccccagcagcgaggacaacgtggccatcgagatggccatcgagaccgtgggccaggccaaggacgagctgctgaccaaccagctgatcgaccacctgctgggcgagaacgacggcatgcccaaggacgccaagtacctgttcagactgtacatggccctgaagcagtacagagaggccgcccagaccgccatcatcatcgccagagaggagcagagcgccggcaactacagaaacgcccacgacgtgctgttcagcatgtacgccgagctgaagagccagaagatcaagatccccagcgagatggccaccaacctgatgatcctgcacagctacatcctggtgaagatccacgtgaagaacggcgaccacatgaagggcgccagaatgctgatcagagtggccaacaacatcagcaagttccccagccacatcgtgcccatcctgaccagcaccgtgatcgagtgccacagagccggcctgaagaacagcgccttcagcttcgccgccatgctgatgagacccgagtacagaagcaagatcgacgccaagtacaagaagaagatcgagggcatggtgagaagacccgacatcagcgagatcgaggaggccaccaccccctgccccttctgcaagttcctgctgcccgagtgcgagctgctgtgccccggctgcaagaacagcatcccctactgcatcgccaccggcagacacatgctgaaggacgactggaccgtgtgcccccactgcgacttccccgccctgtacagcgagctgaagatcatgctgaacaccgagagcacctgccccatgtgcagcgagagactgaacgccgcccagctgaagaagatcagcgactgcacccagtacctgagaaccgaggaggagctgtag

SEQ ID NO: 217971 - DNA, 4029 bp, Artificial Sequence
  derived and/or modified sequence
atgaagagaatcttcagcctgctggagaagacctggctgggcgcccccatccagttcgcctggcagaagaccagcggcaactacctggccgtgaccggcgccgactacatcgtgaagatcttcgacagacacggccagaagagaagcgagatcaacctgcccggcaactgcgtggccatggactgggacaaggacggcgacgtgctggccgtgatcgccgagaagagcagctgcatctacctgtgggacgccaacaccaacaagaccagccagctggacaacggcatgagagaccagatgagcttcctgctgtggagcaaggtgggcagcttcctggccgtgggcaccgtgaagggcaacctgctgatctacaaccaccagaccagcagaaagatccccgtgctgggcaagcacaccaagagaatcacctgcggctgctggaacgccgagaacctgctggccctgggcggcgaggacaagatgatcaccgtgagcaaccaggagggcgacaccatcagacagacccaggtgagaagcgagcccagcaacatgcagttcttcctgatgaagatggacgacagaaccagcgccgccgagagcatgatcagcgtggtgctgggcaagaagaccctgttcttcctgaacctgaacgagcccgacaaccccgccgacctggagttccagcaggacttcggcaacatcgtgtgctacaactggtacggcgacggcagaatcatgatcggcttcagctgcggccacttcgtggtgatcagcacccacaccggcgagctgggccaggagatcttccaggccagaaaccacaaggacaacctgaccagcatcgccgtgagccagaccctgaacaaggtggccacctgcggcgacaactgcatcaagatccaggacctggtggacctgaaggacatgtacgtgatcctgaacctggacgaggagaacaagggcctgggcaccctgagctggaccgacgacggccagctgctggccctgagcacccagagaggcagcctgcacgtgttcctgaccaagctgcccatcctgggcgacgcctgcagcaccagaatcgcctacctgaccagcctgctggaggtgaccgtggccaaccccgtggagggcgagctgcccatcaccgtgagcgtggacgtggagcccaacttcgtggccgtgggcctgtaccacctggccgtgggcatgaacaacagagcctggttctacgtgctgggcgagaacgccgtgaagaagctgaaggacatggagtacctgggcaccgtggccagcatctgcctgcacagcgactacgccgccgccctgttcgagggcaaggtgcagctgcacctgatcgagagcgagatcctggacgcccaggaggagagagagaccagactgttccccgccgtggacgacaagtgcagaatcctgtgccacgccctgaccagcgacttcctgatctacggcaccgacaccggcgtggtgcagtacttctacatcgaggactggcagttcgtgaacgactacagacaccccgtgagcgtgaagaagatcttccccgaccccaacggcaccagactggtgttcatcgacgagaagagcgacggcttcgtgtactgccccgtgaacgacgccacctacgagatccccgacttcagccccaccatcaagggcgtgctgtgggagaactggcccatggacaagggcgtgttcatcgcctacgacgacgacaaggtgtacacctacgtgttccacaaggacaccatccagggcgccaaggtgatcctggccggcagcaccaaggtgcccttcgcccacaagcccctgctgctgtacaacggcgagctgacctgccagacccagagcggcaaggtgaacaacatctacctgagcacccacggcttcctgagcaacctgaaggacaccggccccgacgagctgagacccatgctggcccagaacctgatgctgaagagattcagcgacgcctgggagatgtgcagaatcctgaacgacgaggccgcctggaacgagctggccagagcctgcctgcaccacatggaggtggagttcgccatcagagtgtacagaagaatcggcaacgtgggcatcgtgatgagcctggagcagatcaagggcatcgaggactacaacctgctggccggccacctggccatgttcaccaacgactacaacctggcccaggacctgtacctggccagcagctgccccatcgccgccctggagatgagaagagacctgcagcactgggacagcgccctgcagctggccaagcacctggcccccgaccagatccccttcatcagcaaggagtacgccatccagctggagttcgccggcgactacgtgaacgccctggcccactacgagaagggcatcaccggcgacaacaaggagcacgacgaggcctgcctggccggcgtggcccagatgagcatcagaatgggcgacatcagaagaggcgtgaaccaggccctgaagcaccccagcagagtgctgaagagagactgcggcgccatcctggagaacatgaagcagttcagcgaggccgcccagctgtacgagaagggcctgtactacgacaaggccgccagcgtgtacatcagaagcaagaactgggccaaggtgggcgacctgctgccccacgtgagcagccccaagatccacctgcagtacgccaaggccaaggaggccgacggcagatacaaggaggccgtggtggcctacgagaacgccaagcagtggcagagcgtgatcagaatctacctggaccacctgaacaaccccgagaaggccgtgaacatcgtgagagagacccagagcctggacggcgccaagatggtggccagattcttcctgcagctgggcgactacggcagcgccatccagttcctggtgatgagcaagtgcaacaacgaggccttcaccctggcccagcagcacaacaagatggagatctacgccgacatcatcggcagcgaggacaccaccaacgaggactaccagagcatcgccctgtacttcgagggcgagaagagatacctgcaggccggcaagttcttcctgctgtgcggccagtacagcagagccctgaagcacttcctgaagtgccccagcagcgaggacaacgtggccatcgagatggccatcgagaccgtgggccaggccaaggacgagctgctgaccaaccagctgatcgaccacctgctgggcgagaacgacggcatgcccaaggacgccaagtacctgttcagactgtacatggccctgaagcagtacagagaggccgcccagaccgccatcatcatcgccagagaggagcagagcgccggcaactacagaaacgcccacgacgtgctgttcagcatgtacgccgagctgaagagccagaagatcaagatccccagcgagatggccaccaacctgatgatcctgcacagctacatcctggtgaagatccacgtgaagaacggcgaccacatgaagggcgccagaatgctgatcagagtggccaacaacatcagcaagttccccagccacatcgtgcccatcctgaccagcaccgtgatcgagtgccacagagccggcctgaagaacagcgccttcagcttcgccgccatgctgatgagacccgagtacagaagcaagatcgacgccaagtacaagaagaagatcgagggcatggtgagaagacccgacatcagcgagatcgaggaggccaccaccccctgccccttctgcaagttcctgctgcccgagtgcgagctgctgtgccccggctgcaagaacagcatcccctactgcatcgccaccggcagacacatgctgaaggacgactggaccgtgtgcccccactgcgacttccccgccctgtacagcgagctgaagatcatgctgaacaccgagagcacctgccccatgtgcagcgagagactgaacgccgcccagctgaagaagatcagcgactgcacccagtacctgagaaccgaggaggagctgtag

SEQ ID NO: 217972 - DNA, 1443 bp, Artificial Sequence
  derived and/or modified sequence
aagagaatcttcagcctgctggagaagacctggctgggcgcccccatccagttcgcctggcagaagaccagcggcaactacctggccgtgaccggcgccgactacatcgtgaagatcttcgacagacacggccagaagagaagcgagatcaacctgcccggcaactgcgtggccatggactgggacaaggacggcgacgtgctggccgtgatcgccgagaagagcagctgcatctacctgtgggacgccaacaccaacaagaccagccagctggacaacggcatgagagaccagatgagcttcctgctgtggagcaaggtgggcagcttcctggccgtgggcaccgtgaagggcaacctgctgatctacaaccaccagaccagcagaaagatccccgtgctgggcaagcacaccaagagaatcacctgcggctgctggaacgccgagaacctgctggccctgggcggcgaggacaagatgatcaccgtgagcaaccaggagggcgacaccatcagacagacccaggtgagaagcgagcccagcaacatgcagttcttcctgatgaagatggacgacagaaccagcgccgccgagagcatgatcagcgtggtgctgggcaagaagaccctgttcttcctgaacctgaacgagcccgacaaccccgccgacctggagttccagcaggacttcggcaacatcgtgtgctacaactggtacggcgacggcagaatcatgatcggcttcagctgcggccacttcgtggtgatcagcacccacaccggcgagctgggccaggagatcttccaggccagaaaccacaaggacaacctgaccagcatcgccgtgagccagaccctgaacaaggtggccacctgcggcgacaactgcatcaagatccaggacctggtggacctgaaggacatgtacgtgatcctgaacctggacgaggagaacaagggcctgggcaccctgagctggaccgacgacggccagctgctggccctgagcacccagagaggcagcctgcacgtgttcctgaccaagctgcccatcctgggcgacgcctgcagcaccagaatcgcctacctgaccagcctgctggaggtgaccgtggccaaccccgtggagggcgagctgcccatcaccgtgagcgtggacgtggagcccaacttcgtggccgtgggcctgtaccacctggccgtgggcatgaacaacagagcctggttctacgtgctgggcgagaacgccgtgaagaagctgaaggacatggagtacctgggcaccgtggccagcatctgcctgcacagcgactacgccgccgccctgttcgagggcaaggtgcagctgcacctgaaggccaagagctggatgctgaagaagaacgtgagactgggcttcagccagcagtggatgatcagcgccgtgagctacgccatgccctag

SEQ ID NO: 217973 - DNA, 1446 bp, Artificial Sequence
  derived and/or modified sequence
atgaagagaatcttcagcctgctggagaagacctggctgggcgcccccatccagttcgcctggcagaagaccagcggcaactacctggccgtgaccggcgccgactacatcgtgaagatcttcgacagacacggccagaagagaagcgagatcaacctgcccggcaactgcgtggccatggactgggacaaggacggcgacgtgctggccgtgatcgccgagaagagcagctgcatctacctgtgggacgccaacaccaacaagaccagccagctggacaacggcatgagagaccagatgagcttcctgctgtggagcaaggtgggcagcttcctggccgtgggcaccgtgaagggcaacctgctgatctacaaccaccagaccagcagaaagatccccgtgctgggcaagcacaccaagagaatcacctgcggctgctggaacgccgagaacctgctggccctgggcggcgaggacaagatgatcaccgtgagcaaccaggagggcgacaccatcagacagacccaggtgagaagcgagcccagcaacatgcagttcttcctgatgaagatggacgacagaaccagcgccgccgagagcatgatcagcgtggtgctgggcaagaagaccctgttcttcctgaacctgaacgagcccgacaaccccgccgacctggagttccagcaggacttcggcaacatcgtgtgctacaactggtacggcgacggcagaatcatgatcggcttcagctgcggccacttcgtggtgatcagcacccacaccggcgagctgggccaggagatcttccaggccagaaaccacaaggacaacctgaccagcatcgccgtgagccagaccctgaacaaggtggccacctgcggcgacaactgcatcaagatccaggacctggtggacctgaaggacatgtacgtgatcctgaacctggacgaggagaacaagggcctgggcaccctgagctggaccgacgacggccagctgctggccctgagcacccagagaggcagcctgcacgtgttcctgaccaagctgcccatcctgggcgacgcctgcagcaccagaatcgcctacctgaccagcctgctggaggtgaccgtggccaaccccgtggagggcgagctgcccatcaccgtgagcgtggacgtggagcccaacttcgtggccgtgggcctgtaccacctggccgtgggcatgaacaacagagcctggttctacgtgctgggcgagaacgccgtgaagaagctgaaggacatggagtacctgggcaccgtggccagcatctgcctgcacagcgactacgccgccgccctgttcgagggcaaggtgcagctgcacctgaaggccaagagctggatgctgaagaagaacgtgagactgggcttcagccagcagtggatgatcagcgccgtgagctacgccatgccctag

SEQ ID NO: 217974 - DNA, 3549 bp, Artificial Sequence
  derived and/or modified sequence
atgatcaccgtcagtaaccaggaaggagacactattcgccaaacacaggtccgctctgaacctagtaacatgcaattctttctcatgaagatggatgatcgcacctcagccgcggaatccatgatctccgtggtcttgggcaagaaaacgctgttttttctaaacttgaatgagccggacaaccctgccgacctcgagtttcagcaagatttcgggaacatagtttgttacaactggtacggagacggacgcattatgattgggtttagttgcggtcatttcgtggtgatttccacccacaccggtgagctgggacaggagattttccaggctcgcaatcacaaggataatctgacttcaatagccgtgtcacagacactcaataaggtggccacatgcggggacaattgcatcaaaatacaagatctggtcgacttgaaggacatgtatgtcatcctgaatctagatgaggaaaataagggccttggcaccctctcctggactgatgatggccagctcttggctctgtctacgcaacgaggttcactacatgtgtttctgaccaaacttccgattctgggcgacgcatgtagcactcgaatagcttacttgactagcctactcgaggtgaccgtggccaatcccgttgagggagaactccccataactgtctcagtcgacgtagaacccaattttgtggcggtgggactgtatcacctcgccgttgggatgaataatcgcgcatggttttatgtcctcggcgaaaacgccgtgaaaaaactcaaagacatggagtacctgggaactgttgcctctatatgcctgcactctgactacgccgcagccctatttgaggggaaggtccagcttcacctgatcgagagcgagatcttggacgcacaggaggaacgagaaacccgtctttttccagccgtggatgataagtgccgtattctgtgtcatgccttgacatctgatttcctcatttacgggaccgataccggggttgtgcaatacttttatatcgaggactggcagtttgtcaacgattaccggcatccagtgagcgtcaagaagatcttccccgaccctaacggaacaagactcgtatttatcgacgagaaaagtgatgggttcgtgtactgtccagtgaatgatgcaacttacgaaattccggacttttctccaacaattaagggggtcctgtgggagaactggcccatggacaaaggagtcttcattgcttatgatgacgataaggtttatacttacgtcttccacaaggataccattcaaggggcaaaggtgatattagcaggaagtacgaaagttccgtttgcccacaagccgctgctgctctataacggggaactgacatgccagacacagtcagggaaggtcaataacatttacctatctacccatggctttctgagcaatttaaaggacactggtcctgatgaacttagaccgatgctggcccaaaacctcatgctgaagcgattcagcgacgcctgggaaatgtgccggatcttaaacgatgaggccgcttggaatgagctggctcgcgcatgcctccaccacatggaagttgaattcgccattcgcgtgtatcggagaatcggtaacgtcggcatcgtgatgagtctggaacagattaaagggatcgaggactacaacctgttggccgggcacttggccatgtttactaacgattataatcttgctcaggacttatacctcgcgtccagctgtccaatagcagcccttgaaatgaggagggatctgcagcattgggactcagctctccagctggccaagcacttggcccctgaccagattccgtttatttctaaggaatacgcaatccagttggaattcgccggcgattacgtcaatgccctcgctcattacgaaaagggaataactggcgataataaagagcacgatgaggcttgcctggctggggtggcacagatgtcaatacgtatgggggacattcgacggggggttaaccaggctctcaaacaccccagccgcgtgctcaagcgggattgtggagctatccttgagaacatgaagcagtttagcgaggctgctcagctctacgagaaaggtttgtattacgacaaggcggctagcgtgtatattagaagtaagaattgggcaaaagtcggagaccttctgccccatgtcagtagccctaagattcatctccagtacgccaaggctaaagaggctgatggcagatacaaggaggccgtcgttgcctacgagaatgctaagcagtggcagtcagttatcaggatctacctggatcacctcaacaatcccgaaaaagccgtgaacatcgttcgggagacccagagcctggacggtgccaagatggtggctaggtttttcctccagctcggcgattacggcagtgccattcaatttctcgttatgtctaagtgcaataacgaagctttcacattggcccaacaacacaataagatggagatctatgctgatatcattgggagcgaggataccacaaatgaggactatcagagcatagcactgtacttcgaaggagaaaagcgctacctgcaagccggaaaattcttcctcctgtgtggccagtacagtagagcactgaaacatttcctcaaatgtccctcaagcgaggacaacgtagcaatcgaaatggctattgagacagtcgggcaggctaaggacgaacttctaaccaaccagctgattgatcatctgctgggtgaaaacgacgggatgccaaaagatgcgaagtacttgttccggctgtatatggcgctcaagcagtaccgcgaggctgcccagactgcgatcatcatagccagagaggagcagtccgctggaaattataggaacgcgcatgatgtcttgttttccatgtatgcagagctcaagtcccagaagatcaagatcccctctgaaatggccacaaatctaatgattctgcacagctacatactggtaaagatccacgttaaaaacggggaccatatgaaaggcgcccgcatgttaatccgcgttgctaataacatcagtaagttcccttctcatatcgtaccgattttgacctcaaccgtaatcgagtgccatcgggcaggactgaaaaacagtgcattctcgtttgctgccatgttaatgaggcctgagtatcgctccaagattgacgcaaaatacaagaaaaagattgaagggatggtacggcgccctgacatttctgagatagaggaagccaccaccccatgccctttctgcaaattcctcctccccgaatgcgaattgctgtgtcctggatgtaaaaattccatcccctattgtatcgctaccggaagacacatgctgaaggatgactggaccgtctgtccccactgcgacttccctgccctgtatagcgagctgaagattatgctgaatacagagtctacctgccccatgtgttcagagcgactgaacgccgctcagctgaagaaaatctcagactgtacccagtacctccgcactgaggaagaactgtag

SEQ ID NO: 217975 - DNA, 4029 bp, Artificial Sequence
  derived and/or modified sequence
atgaaaaggattttcagcctcctggagaagacctggctgggggccccaatacagtttgcttggcagaaaacctcaggcaactatctggcagtgactggggcagactatatcgtcaaaatcttcgaccgtcacggccagaagcgttccgagatcaacctacccggaaattgtgtcgcaatggactgggataaagacggggatgtgctggcagtcatcgctgaaaagagctcttgtatctatctctgggacgctaataccaacaaaacctcccaattagacaatggtatgcgtgaccagatgtcattcctgttgtggagcaaggtaggctccttcctggctgttggcactgtgaaaggcaaccttttgatatacaaccaccaaaccagccgtaaaatccctgtgctcggcaagcacacaaagcgcattacatgcggctgttggaacgccgagaatttgctggctctgggcggtgaagataagatgatcaccgtgtccaatcaggaaggcgataccattcgccagactcaagtccggagcgaacctagtaatatgcagtttttcctgatgaagatggacgaccgaacatctgctgcagagtctatgattagcgtagtgctcggtaagaagaccctcttcttcctgaacctcaatgaaccagacaaccccgcggacttggagtttcaacaagattttggaaatatcgtatgttacaattggtatggcgacggcaggattatgattgggttctcctgcggacattttgtggttatttccactcataccggtgagctaggacaggagattttccaggccagaaaccataaggacaatttgacttcaatcgctgtcagccagacgctcaacaaagtggcaacttgcggtgataattgtattaagatccaggatcttgtcgacttgaaggacatgtatgtgattctgaacttggatgaggagaacaagggcctgggaacattatcctggaccgatgacggtcagttacttgctttgtctacacagcgaggcagcctgcatgtattcctgacaaagctgccgatactgggcgacgcgtgctcaacccgaatagcttacctgaccagcctgcttgaggtcacagttgctaacccagttgagggcgagctacctattacggtgagtgtggacgttgagccaaactttgtggctgtggggctgtaccatttggcggtgggaatgaataaccgggcctggttctacgtcctgggggaaaatgctgtgaaaaaactgaaggatatggaatacctcgggactgtggcttccatatgtctccactcagattacgccgcggccctcttcgaggggaaagtccagctccatctgatcgaatcagaaattctggatgctcaagaagagcgagaaactcgcttgttccctgccgttgatgataagtgcagaatcctctgccacgcgctgacaagtgactttctgatctatggaaccgacactggcgtagttcagtatttctacattgaagactggcagtttgtcaacgattatcgtcacccagtgtcagttaagaagatctttccagatcccaatggcactagacttgtcttcatcgacgagaagtccgacgggtttgtgtactgtcctgtgaatgacgctacgtacgagattccagatttctcaccaacaatcaaaggcgtgctgtgggagaattggccaatggataagggcgtttttatcgcatatgacgatgacaaggtgtacacttatgtgttccataaagatactatacaaggtgcaaaagtgatcctggcgggctcaaccaaagtgccattcgctcacaaacctctgctcttatacaacggggagctgacttgccagactcagagtggcaaggtgaataatatctatttgagtactcacgggtttttgtccaacctgaaggatacaggccctgacgaactcaggcctatgctggcacagaacttgatgttgaaaagattctcggacgcatgggagatgtgcaggatcttaaatgatgaggctgcctggaatgaactcgccagagcgtgtctgcatcacatggaagtggaatttgccattcgagtataccgccggatcggaaacgtggggatcgtgatgtccttagagcaaataaaaggcattgaggattataatctgcttgctgggcaccttgcaatgttcaccaacgactacaacctagcacaggatctctacctggcttctagttgtcctatcgctgccctcgagatgaggagggatcttcagcattgggatagtgccttgcagttagccaaacacctggcccccgatcagattccattcatatcgaaggaatacgctatacaactggagtttgcaggggattacgtcaatgcgctggctcactacgagaagggcattaccggggataacaaggaacatgatgaggcttgtttagccggggtagctcaaatgagtattcggatgggcgacattcggcgtggagttaaccaagctctcaaacacccttcccgagtactgaagagagattgtggcgcaatcctggaaaacatgaaacagttcagcgaggcagcccagctgtatgaaaaaggcctatactatgacaaggctgcatcggtctacattcgcagtaagaactgggccaaggtcggcgatctgttgccacacgtttcctcccctaagatccatctgcaatatgccaaagctaaggaagccgacgggcgctacaaggaagcggtggtggcatatgaaaacgccaagcagtggcagtctgtcatcagaatctatctcgatcatctaaacaatcccgaaaaagctgttaatatcgtgcgtgagacccagagcctggatggcgcaaagatggtagcccgtttctttttgcagctaggggactacgggagcgctatccaattcttggtcatgagcaagtgcaacaacgaggcattcactctggcccagcagcataacaaaatggagatctacgccgatataatcggatctgaggataccaccaacgaggattaccaaagtattgccctgtacttcgaaggagagaaacgatacctccaggcagggaagtttttccttctctgcgggcaatattcacgcgcactaaagcatttcctaaagtgtccaagctctgaggacaatgttgccatcgaaatggctatcgagacagtgggccaggctaaggacgagcttttgacaaatcagctcatagatcatctgctaggggaaaatgacgggatgcccaaagatgctaaatacctgttccgtttgtatatggctcttaagcagtatagggaggcggctcagactgcgataattatagcccgcgaagaacagtccgcaggcaactatagaaacgctcacgacgtgctgttctcaatgtatgctgagctgaagtcccagaagattaaaattccaagcgaaatggccacaaacctgatgatcttacacagctatatcctcgtcaagatccacgtgaagaatggagatcatatgaaaggggcgcggatgctcattcgagtcgctaataacatatccaaattcccttctcacatcgtgcccattttaaccagcactgttattgagtgccatcgagctggtctgaaaaattcggcttttagcttcgcggcaatgcttatgaggcccgagtatagatccaagattgacgcaaaatataagaagaaaatcgagggaatggtgcggaggcctgacatcagtgaaatagaagaagctactaccccctgccctttctgtaagttcctgcttccagagtgcgaactcctctgtccggggtgtaaaaactcaatcccctactgtattgccactggcagacacatgctgaaggacgactggacggtgtgcccccactgcgatttccctgccctgtattctgaactgaaaatcatgctcaacaccgagtctacatgtccgatgtgtagcgaacgccttaacgcggcccagctaaagaaaattagtgactgcacacagtacctcagaactgaggaagagctttag

SEQ ID NO: 217976 - DNA, 1443 bp, Artificial Sequence
  derived and/or modified sequence
aaacgaatcttttctcttctcgagaaaacgtggctcggcgccccaattcagttcgcctggcagaaaacctctggcaactacctagcagtgaccggagcagactacatcgtgaagattttcgaccggcacgggcagaaacgatctgagatcaacctccccggaaattgcgtggctatggactgggataaggacggcgatgtgttagctgttatcgccgagaagtcgtcatgcatttatctgtgggacgccaacaccaataagacatcacagctggataacgggatgagggatcagatgtctttcctgctgtggtctaaagtgggaagctttttggcggtaggcactgtgaaagggaacctgctcatctacaatcatcagacaagcaggaagattcccgtcctcggcaagcatactaagaggatcacctgcgggtgttggaacgctgaaaacctgctcgcactgggaggagaagacaaaatgattaccgtgagtaaccaagaaggcgacaccatacggcagacgcaggtcagaagtgagcccagcaatatgcaatttttccttatgaaaatggatgatcgtacctctgcagctgaaagcatgattagtgttgtgctcggaaagaagacccttttttttctgaacctcaacgagccagataacccagcagatttagagtttcaacaagattttggtaacatagtttgttacaactggtatggagatggtaggattatgatcgggttctcatgtggacactttgtggtaattagcactcacaccggcgagctcggccaggagatcttccaggctcgaaaccacaaggataacctaacaagtattgctgtgagtcaaactctgaataaagtagccacctgtggagataactgcatcaagattcaggacctcgttgacctcaaagatatgtatgtaattctgaacttggatgaggaaaacaaaggcctggggaccctgagctggacagatgacgggcagctgttggccctgtctactcagcgagggagtcttcacgttttcctgacaaagctgcccatcctaggagacgcgtgctctacccggatcgcgtacctgacaagcctgcttgaggtaaccgttgcaaatcctgttgaaggcgaactccccattaccgtttcagtggatgtggaacccaacttcgtggccgtgggtttgtatcaccttgcggtagggatgaataatagggcgtggttttacgtcctgggagaaaacgctgtgaagaagctcaaggacatggagtatctcgggactgttgccagcatttgtctgcattcagactacgcagctgccctctttgagggaaaggtccagctgcacctcaaagccaaaagctggatgcttaagaaaaatgtgaggctggggtttagccagcagtggatgatctcggccgtcagctatgctatgccttag

SEQ ID NO: 217977 - DNA, 1446 bp, Artificial Sequence
  derived and/or modified sequence
atgaaaaggatattctctctcctggaaaagacttggttgggtgctccaatccagttcgcctggcagaagacaagcggaaactacctcgctgtcactggagctgactatattgtgaagatatttgatcgtcacggacaaaaacgaagtgagattaatctcccgggaaattgtgtggctatggattgggacaaggatggagatgtgctggcagttattgccgagaagtcatcgtgcatatacttatgggatgccaacacaaacaaaacctctcaactggacaacggtatgagagatcagatgagttttctcctgtggtccaaggtgggtagtttcctcgctgtcggaaccgttaaaggcaatttgctgatttataaccaccagacttctagaaaaattccagtgttgggtaagcacactaagaggataacctgcgggtgctggaacgcagagaacctcctcgcgttgggcggggaagacaagatgatcactgtgagtaatcaagagggcgataccatacggcagactcaggtcaggagcgaaccttctaatatgcagtttttcctgatgaagatggatgacaggacatccgccgccgagtccatgatctcggttgtgctgggaaaaaagacgctgttctttttgaatctgaatgaaccagataatcctgctgacctggagttccagcaggattttggcaatatcgtttgctacaactggtacggggatggacggatcatgatcggtttcagctgtggacattttgttgtcatttctacacatacaggggagctgggccaggaaatttttcaggccagaaaccacaaggataaccttacatctatcgcagtgagccagacactaaacaaagtggccacatgcggtgacaattgtatcaagatccaggaccttgtggacctgaaagatatgtacgtcattctgaacttagacgaggagaataagggtctcggaactttgtcatggactgacgacgggcaactgctggctctgtccacccagagaggttccttacacgttttcctcacaaaactgcctattctcggggatgcctgtagtacacgaatcgcgtatctaacctcactcctggaagttactgttgctaatccagtggagggagaattgcccatcacagtgtctgtggatgtggaaccaaactttgtagccgtcggcctctatcatttggccgtgggcatgaacaaccgggcctggttttacgtgctcggtgaaaacgccgtgaagaaattgaaggacatggaatatttaggcaccgtcgccagtatatgtctgcactcagattatgctgccgcactatttgaaggaaaggtgcagctccacctcaaggccaagagctggatgctgaaaaagaacgttaggctcggattctcccagcagtggatgatctccgctgtttcgtatgcaatgccttag

SEQ ID NO: 217978 - DNA, 3549 bp, Artificial Sequence
  derived and/or modified sequence
atgatcaccgtgagcaaccaggagggggacaccatccggcagacccaggtgcgctctgagcccagcaacatgcagttcttcctgatgaagatggatgacaggaccagcgctgctgagagcatgatctctgtggtgctgggcaagaagaccctcttcttcctgaacctgaatgaaccagacaacccagctgacctggagttccagcaggactttggaaacatcgtgtgctacaactggtatggagatggccgcatcatgattggcttcagctgtggccactttgtggtgatcagcacccacactggagagctgggccaggagatcttccaggccaggaaccacaaggacaacctgaccagcattgctgtgtcccagaccctgaacaaggtggccacctgtggggacaactgcatcaagatccaggacctggtggacctgaaggacatgtatgtgatcctgaacctggatgaggagaacaagggcctgggcaccctgtcctggacagatgatggccagctgctggccctgagcacccagaggggcagcctgcacgtgttcctgaccaagctgcccatcctgggagatgcctgcagcaccagaattgcctacctgaccagcctgctggaggtgacagtggccaaccctgtggagggggagctgcccatcaccgtgtctgtggatgtggagcccaactttgtggccgtgggcctgtaccacctggccgtgggcatgaacaacagagcctggttctacgtgctgggagaaaatgctgtgaagaagctgaaggacatggagtacctgggcaccgtggccagcatctgcctgcacagcgactatgctgctgccctgtttgagggcaaggtgcagctgcacctgattgaaagtgagatcctggatgcccaggaggagcgggagaccaggctcttccctgctgtggatgacaagtgccgcatcctgtgccacgccctgaccagtgacttcctgatctacggcacagacaccggggtggtgcagtacttctacatcgaggactggcagtttgtgaatgactaccgccaccctgtgtctgtgaagaagatcttcccagaccccaacggcacccggctggtgttcattgatgagaagagtgatggctttgtgtactgccctgtgaatgatgccacctatgagatcccagacttcagccccaccatcaagggcgtgctgtgggagaactggcccatggacaagggcgtcttcatcgcctatgatgatgacaaggtgtacacctacgtgttccacaaggacaccatccagggcgccaaggtgatcctggccggcagcaccaaggtgccctttgcccacaagcccctgctgctgtacaatggagagctgacctgccagacccagagcggcaaggtgaacaacatctacctgagcacccacggcttcctgagcaacctgaaggacaccggcccagatgagctgcggcccatgctggcccagaacctgatgctgaagcgcttcagtgatgcctgggagatgtgccgcatcctgaatgatgaggccgcctggaatgagctggcccgggcctgcctgcaccacatggaggtggagtttgccatccgggtgtacagaagaattggaaatgtgggcatcgtgatgagcctggagcagatcaagggcatcgaggactacaacctgctggccggccacctggccatgttcaccaatgactacaacctggcccaggacctgtacctggccagcagctgccccatcgccgccctggagatgagaagagacctgcagcactgggacagcgccctgcagctggccaagcacctggccccagaccagatccccttcatcagcaaggagtatgccatccagctggagtttgctggggactatgtgaatgccctggcccactatgagaagggcatcactggagacaacaaggagcatgatgaggcctgcctggccggcgtggcccagatgagcatccgcatgggagacatccggcggggcgtgaaccaggccctgaagcaccccagccgggtgctgaagagggactgtggggccatcctggagaacatgaagcagttcagcgaggccgcccagctgtatgagaagggcctgtactatgacaaggccgcctctgtgtacatccgcagcaagaactgggccaaggtgggggacctgctgccccacgtgagcagccccaagatccacctgcagtatgccaaggccaaggaggctgatggccgctacaaggaggccgtggtggcctatgaaaatgccaagcagtggcagagcgtcatccgcatctacctggaccacctgaacaaccctgagaaggctgtgaacatcgtgcgggagacccagagcctggatggagccaagatggtggcccgcttcttcctgcagctgggggactatggcagcgccatccagttcctggtgatgagcaagtgcaacaatgaggccttcaccctggcccagcagcacaacaagatggagatctatgctgacatcatcggcagcgaggacaccaccaatgaagactaccagagcatcgccctgtactttgaaggagagaagcgctacctgcaggccggcaagttcttcctgctgtgtggccagtacagccgggccctgaagcacttcctgaagtgccccagcagcgaggacaacgtggccatcgagatggccattgaaacagtgggccaggccaaggatgagctgctgaccaaccagctgattgaccacctgctgggagaaaatgatggcatgcccaaggatgccaagtacctgttccggctgtacatggccctgaagcagtaccgggaggccgcccagacagccatcatcatcgcccgggaggagcagagcgctggcaactacagaaatgcccatgatgtgctcttctccatgtatgcagagctgaagagccagaagatcaagatccccagcgagatggccaccaacctgatgatcctgcacagctacatcctggtgaagatccacgtgaagaatggagaccacatgaagggggccaggatgctgatccgggtggccaacaacatcagcaagttccccagccacatcgtgcccatcctgaccagcacagtgattgagtgccaccgggccggcctgaagaacagcgccttctcctttgctgccatgctgatgaggcctgagtaccgcagcaagattgatgccaagtacaagaagaagattgagggcatggtgagaagaccagacatcagcgagattgaggaggccaccaccccctgccccttctgcaagttcctgctgcctgaatgtgagctgctgtgccccggctgcaagaacagcatcccctactgcatcgccaccggccgccacatgctgaaggatgactggacagtgtgcccccactgtgacttccctgccctgtacagcgagctgaagatcatgctgaacacagagagcacctgccccatgtgcagcgagcggctgaatgctgcccagctgaagaagatcagtgactgcacccagtacctgaggacagaggaggagctgtag

SEQ ID NO: 217979 - DNA, 4029 bp, Artificial Sequence
  derived and/or modified sequence
atgaagaggatcttcagcctgctggagaagacctggctgggcgcccccatccagtttgcctggcagaagaccagcggcaactacctggccgtgactggagctgactacatcgtgaagatctttgacagacatggccagaagaggtctgagatcaacctgcccggcaactgtgtggccatggactgggacaaggatggagatgtgctggccgtgattgctgagaagagcagctgcatctacctgtgggatgccaacaccaacaagaccagccagctggacaatggcatgagggaccagatgtccttcctgctgtggagcaaggtgggcagcttcctggccgtgggcaccgtgaagggcaacctgctgatctacaaccaccagaccagcaggaagatccctgtgctgggcaagcacaccaagaggatcacctgtggctgctggaatgctgagaacctgctggccctgggcggggaggacaagatgatcaccgtgagcaaccaggagggggacaccatccggcagacccaggtgcgctctgagcccagcaacatgcagttcttcctgatgaagatggatgacaggaccagcgctgctgagagcatgatctctgtggtgctgggcaagaagaccctcttcttcctgaacctgaatgaaccagacaacccagctgacctggagttccagcaggactttggaaacatcgtgtgctacaactggtatggagatggccgcatcatgattggcttcagctgtggccactttgtggtgatcagcacccacactggagagctgggccaggagatcttccaggccaggaaccacaaggacaacctgaccagcattgctgtgtcccagaccctgaacaaggtggccacctgtggggacaactgcatcaagatccaggacctggtggacctgaaggacatgtatgtgatcctgaacctggatgaggagaacaagggcctgggcaccctgtcctggacagatgatggccagctgctggccctgagcacccagaggggcagcctgcacgtgttcctgaccaagctgcccatcctgggagatgcctgcagcaccagaattgcctacctgaccagcctgctggaggtgacagtggccaaccctgtggagggggagctgcccatcaccgtgtctgtggatgtggagcccaactttgtggccgtgggcctgtaccacctggccgtgggcatgaacaacagagcctggttctacgtgctgggagaaaatgctgtgaagaagctgaaggacatggagtacctgggcaccgtggccagcatctgcctgcacagcgactatgctgctgccctgtttgagggcaaggtgcagctgcacctgattgaaagtgagatcctggatgcccaggaggagcgggagaccaggctcttccctgctgtggatgacaagtgccgcatcctgtgccacgccctgaccagtgacttcctgatctacggcacagacaccggggtggtgcagtacttctacatcgaggactggcagtttgtgaatgactaccgccaccctgtgtctgtgaagaagatcttcccagaccccaacggcacccggctggtgttcattgatgagaagagtgatggctttgtgtactgccctgtgaatgatgccacctatgagatcccagacttcagccccaccatcaagggcgtgctgtgggagaactggcccatggacaagggcgtcttcatcgcctatgatgatgacaaggtgtacacctacgtgttccacaaggacaccatccagggcgccaaggtgatcctggccggcagcaccaaggtgccctttgcccacaagcccctgctgctgtacaatggagagctgacctgccagacccagagcggcaaggtgaacaacatctacctgagcacccacggcttcctgagcaacctgaaggacaccggcccagatgagctgcggcccatgctggcccagaacctgatgctgaagcgcttcagtgatgcctgggagatgtgccgcatcctgaatgatgaggccgcctggaatgagctggcccgggcctgcctgcaccacatggaggtggagtttgccatccgggtgtacagaagaattggaaatgtgggcatcgtgatgagcctggagcagatcaagggcatcgaggactacaacctgctggccggccacctggccatgttcaccaatgactacaacctggcccaggacctgtacctggccagcagctgccccatcgccgccctggagatgagaagagacctgcagcactgggacagcgccctgcagctggccaagcacctggccccagaccagatccccttcatcagcaaggagtatgccatccagctggagtttgctggggactatgtgaatgccctggcccactatgagaagggcatcactggagacaacaaggagcatgatgaggcctgcctggccggcgtggcccagatgagcatccgcatgggagacatccggcggggcgtgaaccaggccctgaagcaccccagccgggtgctgaagagggactgtggggccatcctggagaacatgaagcagttcagcgaggccgcccagctgtatgagaagggcctgtactatgacaaggccgcctctgtgtacatccgcagcaagaactgggccaaggtgggggacctgctgccccacgtgagcagccccaagatccacctgcagtatgccaaggccaaggaggctgatggccgctacaaggaggccgtggtggcctatgaaaatgccaagcagtggcagagcgtcatccgcatctacctggaccacctgaacaaccctgagaaggctgtgaacatcgtgcgggagacccagagcctggatggagccaagatggtggcccgcttcttcctgcagctgggggactatggcagcgccatccagttcctggtgatgagcaagtgcaacaatgaggccttcaccctggcccagcagcacaacaagatggagatctatgctgacatcatcggcagcgaggacaccaccaatgaagactaccagagcatcgccctgtactttgaaggagagaagcgctacctgcaggccggcaagttcttcctgctgtgtggccagtacagccgggccctgaagcacttcctgaagtgccccagcagcgaggacaacgtggccatcgagatggccattgaaacagtgggccaggccaaggatgagctgctgaccaaccagctgattgaccacctgctgggagaaaatgatggcatgcccaaggatgccaagtacctgttccggctgtacatggccctgaagcagtaccgggaggccgcccagacagccatcatcatcgcccgggaggagcagagcgctggcaactacagaaatgcccatgatgtgctcttctccatgtatgcagagctgaagagccagaagatcaagatccccagcgagatggccaccaacctgatgatcctgcacagctacatcctggtgaagatccacgtgaagaatggagaccacatgaagggggccaggatgctgatccgggtggccaacaacatcagcaagttccccagccacatcgtgcccatcctgaccagcacagtgattgagtgccaccgggccggcctgaagaacagcgccttctcctttgctgccatgctgatgaggcctgagtaccgcagcaagattgatgccaagtacaagaagaagattgagggcatggtgagaagaccagacatcagcgagattgaggaggccaccaccccctgccccttctgcaagttcctgctgcctgaatgtgagctgctgtgccccggctgcaagaacagcatcccctactgcatcgccaccggccgccacatgctgaaggatgactggacagtgtgcccccactgtgacttccctgccctgtacagcgagctgaagatcatgctgaacacagagagcacctgccccatgtgcagcgagcggctgaatgctgcccagctgaagaagatcagtgactgcacccagtacctgaggacagaggaggagctgtag

SEQ ID NO: 217980 - DNA, 1443 bp, Artificial Sequence
  derived and/or modified sequence
aagaggatcttcagcctgctggagaagacctggctgggcgcccccatccagtttgcctggcagaagaccagcggcaactacctggccgtgactggagctgactacatcgtgaagatctttgacagacatggccagaagaggtctgagatcaacctgcccggcaactgtgtggccatggactgggacaaggatggagatgtgctggccgtgattgctgagaagagcagctgcatctacctgtgggatgccaacaccaacaagaccagccagctggacaatggcatgagggaccagatgtccttcctgctgtggagcaaggtgggcagcttcctggccgtgggcaccgtgaagggcaacctgctgatctacaaccaccagaccagcaggaagatccctgtgctgggcaagcacaccaagaggatcacctgtggctgctggaatgctgagaacctgctggccctgggcggggaggacaagatgatcaccgtgagcaaccaggagggggacaccatccggcagacccaggtgcgctctgagcccagcaacatgcagttcttcctgatgaagatggatgacaggaccagcgctgctgagagcatgatctctgtggtgctgggcaagaagaccctcttcttcctgaacctgaatgaaccagacaacccagctgacctggagttccagcaggactttggaaatattgtgtgctacaactggtatggagatggccgcatcatgattggcttcagctgtggccactttgtggtgatcagcacccacactggagagctgggccaggagatcttccaggccaggaaccacaaggacaacctgaccagcattgctgtgtcccagaccctgaacaaggtggccacctgtggggacaactgcatcaagatccaggacctggtggacctgaaggacatgtatgtgatcctgaacctggatgaagaaaataaaggcctgggcaccctgtcctggacagatgatggccagctgctggccctgagcacccagaggggcagcctgcacgtgttcctgaccaagctgcccatcctgggagatgcctgcagcacccgcatcgcctacctgaccagcctgctggaggtgacagtggccaaccctgtggagggggagctgcccatcaccgtgtctgtggatgtggagcccaactttgtggccgtgggcctgtaccacctggccgtgggcatgaacaacagagcctggttctacgtgctgggggagaatgctgtgaagaagctgaaggacatggagtacctgggcaccgtggccagcatctgcctgcacagcgactatgctgctgccctgtttgagggcaaggtgcagctgcacctgaaggccaagtcctggatgctgaagaagaatgtgcggctgggcttcagccagcagtggatgatctctgctgtgtcctatgccatgccctag

SEQ ID NO: 217981 - DNA, 1446 bp, Artificial Sequence
  derived and/or modified sequence
atgaagaggatcttcagcctgctggagaagacctggctgggcgcccccatccagtttgcctggcagaagaccagcggcaactacctggccgtgactggagctgactacatcgtgaagatctttgacagacatggccagaagaggtctgagatcaacctgcccggcaactgtgtggccatggactgggacaaggatggagatgtgctggccgtgattgctgagaagagcagctgcatctacctgtgggatgccaacaccaacaagaccagccagctggacaatggcatgagggaccagatgtccttcctgctgtggagcaaggtgggcagcttcctggccgtgggcaccgtgaagggcaacctgctgatctacaaccaccagaccagcaggaagatccctgtgctgggcaagcacaccaagaggatcacctgtggctgctggaatgctgagaacctgctggccctgggcggggaggacaagatgatcaccgtgagcaaccaggagggggacaccatccggcagacccaggtgcgctctgagcccagcaacatgcagttcttcctgatgaagatggatgacaggaccagcgctgctgagagcatgatctctgtggtgctgggcaagaagaccctcttcttcctgaacctgaatgaaccagacaacccagctgacctggagttccagcaggactttggaaacatcgtgtgctacaactggtatggagatggccgcatcatgattggcttcagctgtggccactttgtggtgatcagcacccacactggagagctgggccaggagatcttccaggccaggaaccacaaggacaacctgaccagcattgctgtgtcccagaccctgaacaaggtggccacctgtggggacaactgcatcaagatccaggacctggtggacctgaaggacatgtatgtgatcctgaacctggatgaggagaacaagggcctgggcaccctgtcctggacagatgatggccagctgctggccctgagcacccagaggggcagcctgcacgtgttcctgaccaagctgcccatcctgggagatgcctgcagcaccagaattgcctacctgaccagcctgctggaggtgacagtggccaaccctgtggagggggagctgcccatcaccgtgtctgtggatgtggagcccaactttgtggccgtgggcctgtaccacctggccgtgggcatgaacaacagagcctggttctacgtgctgggagaaaatgctgtgaagaagctgaaggacatggagtacctgggcaccgtggccagcatctgcctgcacagcgactatgctgctgccctgtttgagggcaaggtgcagctgcacctgaaggccaagtcctggatgctgaagaagaatgtgcggctgggcttcagccagcagtggatgatctctgctgtgtcctatgccatgccctag

SEQ ID NO: 217982 - DNA, 3549 bp, Artificial Sequence
  derived and/or modified sequence
atgatcaccgtgagcaaccaggagggcgacaccatccggcagacccaggtgagatctgaaccatccaacatgcaattcttcctcatgaagatggacgatcggaccagcgctgcagagagtatgatcagcgttgtcctcggcaaaaagactctgttcttcctgaaccttaacgagcctgacaatcccgctgacctggagtttcaacaggatttcgggaatatcgtgtgttataactggtacggggacggaaggatcatgatagggttctcctgtggccactttgtggttatttccactcacactggggagctaggacaagagatctttcaagctcgcaaccacaaggataacctgacatcgattgcagtgtcccagacgctgaacaaggtcgcaacctgtggcgataactgcataaaaatccaggacctggtggacctgaaagacatgtacgtgattctgaaccttgacgaggagaacaagggattgggcacactgagctggaccgatgacggccagttgctcgcactgtctacacagaggggttctctacacgtgtttctaaccaaattacctatcttgggcgacgcttgtagcactagaattgcttatctgacctcactcttagaggtcactgtggcaaacccggtcgaaggcgaactaccgattactgtcagtgtcgacgtggaacctaacttcgtagctgttgggctgtatcacctcgcggtgggcatgaataaccgtgcctggttctacgttctcggcgagaacgcagtgaaaaagcttaaggacatggaatacctgggaaccgtagctagcatttgcctgcactcggattatgctgctgccctgttcgaaggaaaagtgcaactccatctcattgagagtgaaattctggatgctcaggaggagcgagaaactagactgtttcctgccgtcgatgacaaatgcagaatcctgtgtcatgccctcactagcgatttcctcatctatggcactgacactggtgtggtgcagtatttttatatcgaagattggcagttcgtcaatgactatcgccacccagtgagcgtcaagaaaatcttccctgatcccaacgggacaaggctggttttcatagacgaaaaatcggacggttttgtctactgtccagttaacgatgcgacatatgagatccctgacttctccccaacgattaagggcgttttatgggagaattggcctatggacaagggggtgttcatagcctatgatgatgataaggtgtacacttatgtgtttcataaggacaccatacagggtgccaaagtgatactagccggttccacaaaggtcccctttgcccataagccattgctgctgtacaacggtgaactgacctgccaaacccagtctggcaaggtgaataacatctacttatcgacccatggattcctgtcaaacctcaaggatactggtcctgacgagctaaggccaatgcttgcccagaaccttatgctcaagaggttttccgatgcctgggagatgtgcagaattctcaacgatgaggccgcctggaacgagttagcccgcgcctgtctacatcacatggaagtcgagttcgccatccgtgtgtatcgccgaattgggaacgtcggaattgtcatgtccttagagcaaatcaaaggtatcgaggattataatcttctggccggtcacctcgccatgttcactaatgactataaccttgcccaggatctgtatctggctagttcttgcccaattgccgccctggagatgaggagagacctacagcactgggacagtgcactacaattggccaaacacttagcacctgaccagattccatttatcagtaaggaatatgctattcagctcgaatttgctggtgactacgtgaacgctttggcccactacgagaaaggaataactggcgacaataaggaacacgacgaggcctgcctcgccggagtggcacagatgtcaatccgcatgggcgacatcagaaggggagttaaccaggctctgaagcatcccagcagagtcttgaaacgagactgcggagccattctggagaacatgaaacagttttccgaagccgcccaattgtacgagaaaggtctgtattacgacaaggccgcttctgtttacatccgttctaagaactgggcaaaagtcggggacctgctgcctcatgtaagctctcccaagatccacctgcaatatgccaaagcaaaggaggccgacggaaggtataaagaagctgttgtggcttacgaaaatgccaaacagtggcaatctgttatcagaatctatctcgaccatctcaacaaccctgaaaaagctgtcaatattgtgcgggaaacccagtctttagatggggccaaaatggtagcgcgtttcttcctgcagctcggtgactacggatcagccatccagtttctggtcatgagcaagtgtaataacgaggcttttaccctcgctcagcagcacaacaaaatggagatttatgcggacatcataggttcggaagatactaccaatgaggactaccaatcaatagcactttacttcgagggcgagaaaaggtaccttcaggctgggaaattctttcttctgtgcgggcagtactcccgcgctctaaagcatttcttgaagtgtccgagctctgaggacaacgtagcaattgaaatggctattgagacagttggccaggcaaaagacgagcttctgacaaaccaacttatcgatcatctgctgggggagaatgatggcatgcccaaagacgctaagtacctgtttcggctttacatggctctgaaacagtatagagaggcagcccagacagccatcataatagctcgtgaggaacagagtgctggcaactataggaatgcccacgacgtgctcttttccatgtacgcagaactcaaaagccagaagatcaagatcccatctgagatggccacaaatttaatgatcctacattcttacattttggttaagattcatgtcaagaacggcgatcacatgaagggtgcccggatgctgatcagagtcgcgaacaacatctccaagttcccttctcacattgtgcctatccttacaagcactgtgatagagtgtcaccgtgccggacttaagaattccgcgtttagctttgctgccatgctgatgagaccagaataccgctcaaagatcgacgccaagtataagaaaaaaatcgaaggcatggtcaggcgccctgatatttccgaaatcgaggaagcaactaccccatgcccattctgcaaatttcttctgcccgaatgcgagctgttgtgcccgggatgcaagaactctatcccatactgcattgccactggtaggcacatgctgaaagacgactggacagtttgcccacactgcgacttccccgccctctactcagagttgaaaatcatgctgaacacagaatctacctgcccaatgtgctccgagcgactcaatgccgctcaactcaaaaagattagtgactgtactcaatacctgaggactgaggaagaactctag

SEQ ID NO: 217983 - DNA, 4029 bp, Artificial Sequence
  derived and/or modified sequence
atgaagcggatcttcagcctgctggagaagacctggctgggcgccccgattcagttcgcatggcagaaaaccagcggaaactacttggctgtgactggcgcagactacattgtcaagatcttcgaccggcatggccagaaaagaagcgagatcaacctgcccggaaactgcgtggctatggattgggacaaggatggagacgttcttgcagtcattgcggagaagtctagctgtatctacctttgggatgctaataccaataagactagccagctggacaacggcatgcgtgatcagatgagtttcctgctatggtccaaagtgggcagcttcctagccgtcggcacagtcaagggcaatctgctcatctataatcaccagactagccggaagatccctgtactgggcaagcatacaaaacggattacctgcggctgctggaatgccgagaacctgctcgctctgggtggcgaagataaaatgatcacagtaagcaaccaggagggggacacaattaggcagactcaagtaagatccgagcctagtaacatgcagttttttttgatgaagatggatgaccgcacctccgcagccgagagcatgatctctgttgtcctcggtaaaaagacactcttctttctaaacttaaatgagcctgataaccccgcagacctcgagttccagcaggacttcggcaacattgtttgttacaactggtacggagacggccggattatgatcggattctcttgcggtcacttcgttgtgatctctacccacaccggggaattgggtcaggagatcttccaggccagaaaccataaagataatctgacaagtatcgcggttagtcagaccctaaacaaagttgctacctgtggcgacaattgcatcaaaatccaggatctggtcgacttaaaggacatgtatgtcattctgaaccttgacgaagaaaacaaggggttaggcaccctgtcgtggacggatgatggtcagctgctggctctctccacccagagaggtagtcttcatgtgtttctgactaaactgccaattttaggggatgcttgtagtacccgaatagcatatctgacatcactgcttgaggtcaccgtggctaatccggtagaaggcgaactccctattaccgtctcggtggacgtggaaccaaatttcgtggccgtcggactttaccacttagcagtcggtatgaataatcgcgcctggttctacgtcctgggagaaaatgccgttaagaagcttaaggatatggagtatctgggtaccgtagcatctatctgtctccattcagactatgcagccgccctctttgaaggtaaagttcagctccacctaatcgagtctgagatcctcgatgcccaggaagagcgcgagacacgtctctttcctgcagtagacgacaaatgcaggatcctatgtcacgccttgacttctgattttctgatctacggcactgatactggcgtagtccaatacttttatattgaggattggcagttcgtgaatgattaccggcaccccgtatcggtcaagaagatttttccggatccaaatggcacgaggctcgtgtttatcgacgaaaaaagcgatggatttgtgtattgtccagttaacgatgccacctacgaaatccccgacttctctcctactatcaaaggggttctctgggagaattggcccatggataagggagtgtttatagcatacgatgatgacaaggtgtatacctatgtctttcacaaggacaccatccagggcgcaaaggtgatccttgcaggaagcactaaagtacctttcgcccataaacctctgctcctgtacaatggtgagctgacatgtcagacacagtcgggaaaggtgaacaacatttacctgagtacacatggattcctgtcaaacctgaaagacacagggccagacgaactcaggcccatgttagcacagaatctgatgctcaagcgtttctcagacgcgtgggagatgtgcagaattctgaatgacgaggccgcctggaacgagctagctcgagcgtgcctccaccacatggaggtcgagttcgccataagggtgtaccggagaatcgggaacgtggggattgtcatgagcctagaacagattaaaggcattgaggattataatctcttggctggacatctcgcgatgtttactaatgactataatctggcccaggatctttatctggcaagctcttgtcccattgctgctttggaaatgcgacgggacctgcagcattgggactctgcattgcagctggcaaaacacttggccccggatcagatccccttcatctccaaggaatacgctattcagcttgaattcgcaggggattacgtgaacgccctcgcacactacgaaaaggggatcacgggcgataacaaagaacatgatgaggcatgcctcgcaggcgtggctcaaatgtcaatccgcatgggtgatataaggcggggggtcaaccaggctctcaagcaccccagtcgggtactcaagagggattgcggcgctattctcgaaaatatgaaacagttttccgaagctgcccagctgtacgagaaaggcctgtactatgacaaggccgcctctgtgtatatacgctcaaagaattgggctaaggttggagatttgcttccccatgtgagttctccgaaaatacacctgcagtatgccaaagcgaaagaagctgatggaaggtacaaggaagccgttgtagcctacgaaaatgcaaaacagtggcagtctgttataaggatttatctcgaccatttgaataatcccgaaaaagccgttaacattgtcagagaaactcaatcattagacggagcgaagatggtggcccgcttcttccttcagcttggcgactacggcagcgccatacagtttttagtgatgtctaaatgcaacaatgaggcttttactctggctcagcagcacaacaaaatggaaatctacgctgatatcatcggttctgaggataccaccaatgaggactatcagtcaatcgctctatactttgagggagagaagcggtatcttcaagcaggtaagtttttccttctgtgcggacaatactcaagggccctgaagcacttcctaaaatgtccctccagtgaagacaatgtggcaatcgaaatggcaatagagactgtggggcaggctaaggacgaacttctcaccaaccagctcatagatcatctgttgggcgaaaatgacgggatgcctaaagacgctaagtacctgtttagattatacatggccttgaaacagtatagagaagccgcgcagacagccatcattatcgcgcgtgaggaacaatcagcgggaaactatcgaaatgcccatgatgtactgttttcaatgtatgcggagctgaagtctcagaagattaaaatcccatcagagatggcgactaacttaatgattcttcactcctatattctggtcaagatccatgtcaagaatggtgatcacatgaaaggagctcgcatgcttattcgggttgcaaacaatattagcaaattccctagtcacatagtgccgattctgaccagcaccgtgattgagtgtcatcgggcaggtctgaaaaacagcgctttcagcttcgcagcaatgctgatgcggcctgagtaccgtagcaaaatagatgccaaatacaagaagaaaattgaaggaatggtgcgacgaccagatattagtgagatcgaggaggccaccacaccctgcccattttgcaaattcctgcttcctgagtgcgagttactctgtcctggatgcaagaattctatcccatactgtattgcgacaggaaggcacatgctcaaggacgactggacagtatgccctcactgtgactttccagcgttgtactctgaactgaagatcatgttgaataccgaatcaacctgtccaatgtgctcagagcggttgaacgccgcccagctcaaaaaaatatccgattgcacacagtatctgcggactgaagaggagctctag

SEQ ID NO: 217984 - DNA, 1443 bp, Artificial Sequence
  derived and/or modified sequence
aagcggatcttcagcctgctggagaagacctggctgggcgcccccatccagtttgcatggcagaagaccagtgggaattatctagccgtcacgggcgctgactatatcgttaaaatctttgataggcacggccagaagcggagcgaaataaacctgcctggtaattgtgtggctatggattgggacaaagacggcgacgttctggctgttatcgctgagaaaagcagctgtatctacttgtgggatgccaacactaacaagaccagtcagctggacaacgggatgagagatcagatgtcattcctcctgtggtcgaaggtcgggagctttctcgcagtgggtaccgtcaaaggaaacctgctgatttataaccatcaaacaagcagaaaaatcccagtcctcggtaaacacaccaaaagaattacgtgcgggtgctggaacgccgagaacctgctggccctgggcggcgaagataagatgattaccgtctctaatcaagaaggcgatactattagacaaacccaggtccgcagcgaaccttcaaacatgcagttttttctcatgaagatggacgataggacctctgctgctgagtcaatgatttctgtagtacttgggaaaaagaccctgtttttcctgaatttaaacgaacccgacaatcctgcggatctggagttccagcaagactttggtaatattgtctgttacaactggtatggcgatggacgcattatgataggattctcctgtgggcacttcgtggtcatctcaacgcacaccggtgaactaggccaagaaatatttcaggctaggaatcacaaggataacctaacatccatagctgtctcccagacgcttaataaggtagccacctgtggcgacaattgcatcaagattcaggatcttgtggatctcaaggacatgtatgtgatcctgaatctggacgaggaaaacaaggggctgggcaccctctcatggactgatgacggccaactgctggcactgtcaactcaacgcggatccttacacgtgtttctgactaagctccctatactcggagatgcttgtagtactagaatcgcttacctaactagtctcctcgaagtgacagtcgccaaccccgtggagggtgagttaccaattactgtctctgtagatgttgagcctaactttgtggccgtcgggctgtatcacctcgccgtgggcatgaacaacagagcttggttttacgtgctgggtgaaaacgcagtgaagaaattgaaggatatggaatacctcggaacagttgcaagtatttgccttcatagcgattacgctgccgcactgttcgaagggaaggttcaactgcatctcaaagctaagagctggatgctcaaaaagaatgtccggctgggtttttcccagcaatggatgatctctgcagtctcctacgcaatgccatag

SEQ ID NO: 217985 - DNA, 1446 bp, Artificial Sequence
  derived and/or modified sequence
atgaagcggatcttcagcctgctggagaagacctggctgggcgccccaattcagtttgcctggcagaagactagtggcaattacttagctgtgacgggcgcagactacattgttaaaatatttgatcgtcacggacagaaacgttccgaaataaacctgcccggcaattgcgtagccatggattgggacaaggatggtgatgtcctcgcagttatagctgagaagtcgtcttgcatttatctttgggacgccaatacgaataaaacctctcaactggataatggaatgcgtgatcagatgtcatttctcctgtggtccaaggttggcagctttctggctgttggaaccgtgaagggcaacctgcttatctacaatcatcaaaccagccgcaagatcccagtcctggggaagcacaccaagaggattacttgcgggtgctggaatgcagagaatctgcttgctctggggggggaggataaaatgattaccgtgagcaaccaagaaggagatacaattcggcagacccaagttcggtccgagccctctaatatgcagttctttttgatgaagatggatgatcgcacttctgctgcagagtctatgatcagtgttgttctaggaaagaagacattgtttttcctgaatctgaacgagcccgacaatcctgcagaccttgagtttcagcaggattttgggaatatagtatgctacaattggtatggagacggccggatcatgatcggttttagttgcggccatttcgtggttattagcacgcatacaggcgagctgggtcaggagatcttccaagctaggaaccataaggacaacctgaccagcatcgccgtctctcaaacgctcaataaagtggcaacatgcggggataattgtatcaagatccaggatctcgtagacctcaaggatatgtacgtgattctgaacctggatgaagagaataagggcctggggactctgtcctggactgacgacgggcaactcctggctctttcaactcaacgcgggtctctccatgtgtttttgacgaaactccctattctcggcgacgcatgcagcactcgcattgcgtatttgacgagtctgcttgaagtgactgttgcgaatcctgtggaaggcgaactccctataaccgtctccgtggatgtcgaacccaactttgtggctgtgggcctctaccacctggctgtcggcatgaacaacagggcctggttctatgttctgggtgagaacgccgtcaagaagctgaaggacatggaataccttggcaccgtggcttccatttgtctgcattcagactacgcagcggctctcttcgaaggcaaggttcagctccatcttaaggctaagtcctggatgctgaagaagaacgtgaggctcgggttttcccaacagtggatgatctccgctgtttcctacgctatgccctag

SEQ ID NO: 217986 - DNA, 3549 bp, Artificial Sequence
  derived and/or modified sequence
atgatcacagtgtccaatcaggagggcgataccatcagacaaacccaggttcggtcagagccatctaatatgcagtttttcttaatgaaaatggacgacaggacctctgccgcagagtcaatgatctccgtcgtgttggggaagaagactctgtttttcctgaatctcaatgaaccagacaaccctgccgacttggaatttcagcaggatttcggtaacatcgtttgctacaattggtacggcgatggcagaattatgataggcttttcttgtggccatttcgttgtgatctccacacacaccggcgaactggggcaagagatctttcaggccaggaaccacaaggacaatttgacatctatcgcagtctcgcagaccctgaacaaagtggctacatgtggcgataattgcatcaagatccaggatctagtcgaccttaaggacatgtatgttatcttgaacctcgatgaggagaataaaggattaggcaccctgagctggaccgacgacggccagctgctcgccctcagcacccaacgaggctcccttcacgtcttcctgaccaagctcccgattctgggcgacgcctgcagtacacgcattgcctacctaactagtttgttggaagtaactgttgccaaccccgtggagggagaactaccaataaccgtgagtgttgatgttgaacccaactttgtcgcagtcgggctgtaccacttggctgtggggatgaacaaccgtgcctggttctacgtcctcggagaaaatgctgttaagaaactaaaggatatggaatacctcggcacagtcgcaagcatatgcctgcattcagattacgccgcagccctgtttgaaggtaaagtccagttgcacctaattgaaagcgagatcctggatgcgcaggaagagagggaaacgagactatttcctgccgttgacgataaatgcaggatcttatgccacgccctcaccagtgattttttaatttacgggactgataccggagtcgtgcaatatttctacattgaggattggcagttcgttaatgactatcgacatccagtgtccgttaaaaagatttttccggatcccaacggcaccaggttggtgtttatcgatgagaagtccgatggatttgtgtattgtcccgtgaacgatgctacatacgagattccggacttttctccaactatcaaaggggtgttgtgggagaactggccgatggacaaaggagtattcattgcatacgatgatgataaggtgtacacatatgttttccataaggacaccatccagggagctaaagttatcctagcaggtagtaccaaagtgccctttgctcataaacccttactgctgtataacggcgaattgacatgccagactcaatcaggcaaggtgaacaacatttacctgtcaactcacgggttcttgagtaacctcaaagacacaggccctgacgaactgagaccaatgctggcccagaacctgatgcttaagagattcagcgatgcttgggaaatgtgtaggatccttaatgatgaagccgcatggaacgaattagcaagggcctgcttgcaccacatggaggtcgagttcgcgatccgagtttatagaagaataggtaatgttgggattgttatgtcattggagcaaataaagggcattgaagactataatctgctggccggacatctggccatgtttaccaacgactataacctggcccaggacctgtatctcgccagctcctgcccaatcgctgcccttgagatgagaagagacctgcagcattgggacagtgccctgcagctcgcgaagcatttggcacccgaccagatccccttcatttcaaaagaatatgccattcagttggagtttgctggcgattacgtcaatgctctggcacactatgagaaaggaattactggcgacaataaagaacatgatgaggcgtgcttggcaggcgttgcccagatgagtatcaggatgggtgacatcagaagaggcgtcaatcaggcactcaaacacccctctcgggtccttaagagagactgcggggcaatccttgagaatatgaaacagttcagtgaggccgctcaactgtacgagaaggggctgtattatgacaaggcagcttcagtgtacatacgcagtaagaactgggctaaggtcggggatctgctcccccacgtgagcagccccaagattcatttgcagtacgccaaagccaaggaggctgatggtcggtacaaggaggcagtggttgcgtacgaaaatgcaaagcagtggcaatcagtcattaggatttacctcgatcacttaaacaatccggaaaaagcggtgaatatcgttcgggagacacaatcactggacggagctaaaatggtggcccgtttctttctgcagcttggcgactatggaagtgccattcagttcctcgtgatgagtaagtgcaacaacgaggccttcacccttgcccaacagcacaataagatggagatatatgccgatatcatcggatccgaagatacaaccaacgaagactatcagtcaattgcactgtatttcgagggggagaagagatacctgcaggccggtaaattctttctcctgtgtggccaatattcacgcgcactgaaacatttcctgaaatgtccctcctcggaagacaatgtcgccattgagatggccatagaaactgtgggccaggcaaaagacgaactgctgaccaaccagctgattgatcacctcctgggtgaaaacgacggcatgcccaaggacgccaaatatttattccggctgtacatggctctgaagcaatacagggaggcagcacaaacagctattatcatcgctcgggaagaacaaagcgccggaaattatcgcaacgcccatgatgtgctgtttagtatgtatgcagaacttaagagccagaaaatcaagatcccttcagaaatggccaccaatcttatgattcttcacagttatatcctcgtaaagatccacgtaaagaacggcgaccatatgaagggcgctagaatgctgattcgtgtagcgaataatatctcaaagttcccatcccacatcgtgcccatcctgacaagtacagtcatagagtgccatagggctggactgaaaaacagtgccttctcctttgctgcaatgctgatgcgtcccgagtatcgctccaaaatagatgccaagtataaaaagaaaatagaagggatggtgcggaggccggacatcagcgagattgaagaagcaacaacgccctgtcctttctgcaagttcctgttgcccgagtgcgagttgctttgtcccggttgcaagaacagtatcccatactgtattgccaccggacgacacatgctgaaagacgattggaccgtttgtcctcattgtgatttccctgccctctactccgagctgaagatcatgctgaacaccgaaagtacgtgccccatgtgttccgagcgattgaacgccgctcagctgaagaagatcagcgactgtacgcagtatctgcggacggaggaagagctgtag

SEQ ID NO: 217987 - DNA, 4029 bp, Artificial Sequence
  derived and/or modified sequence
atgaaaaggatttttagccttttggagaagacttggctgggagcacctattcagtttgcctggcagaagaccagcgggaattacctggcggtgaccggggcagactatatcgttaaaatttttgacaggcatgggcagaagaggtctgaaatcaatctccccggtaactgcgtagccatggattgggataaggacggcgacgtactggccgtcatcgccgaaaagagtagctgcatctatctgtgggacgcaaacactaataagacgagtcagctcgataatgggatgagagaccagatgtcctttctcctctggtcaaaggttgggtccttcttggccgtgggaactgtgaagggaaatcttctaatctataaccaccagacctcacgcaagatacccgtgctcggtaaacatacgaagcgtatcacatgtggctgctggaacgctgaaaacctcttagccttagggggagaagataagatgataaccgtatccaaccaagagggcgacaccatccgtcagactcaggtgaggtctgagccttcaaacatgcagttcttcctgatgaaaatggacgaccgaaccagcgcagcagagtcaatgatcagcgtggtgctgggcaagaaaacgctcttcttcctaaaccttaacgagcctgacaaccccgcagatcttgaatttcagcaggattttggcaacatcgtgtgctacaattggtatggggatggacggattatgatcggattctcatgcggacattttgtcgtgatctccacccacacaggagaactgggccaggagatctttcaagcacgcaaccataaagacaacctcacttcaatagccgttagccagacccttaacaaagtggctacctgcggagacaactgcatcaagattcaggacttagttgacctcaaggatatgtatgtaattttgaatctggacgaggagaataagggtcttggtacgctttcttggactgacgacggccagttgctcgcgctgtccacccagcgcggttccttacacgtgtttttgacgaaactcccgattcttggagatgcatgctctactaggattgcttatctcacctccctgctggaagttaccgtagctaacccagtggaaggggaactgccaattaccgtgtctgtggacgtcgaacccaatttcgtggccgtcgggctctatcatctggcggtgggaatgaataaccgcgcatggttctacgtgctcggtgaaaacgccgtcaaaaagcttaaggacatggagtacctgggaacagtggcatcaatctgtctgcactctgactacgccgcagccctgtttgagggcaaggtacagctgcatctaatcgaatctgagattctggatgcacaggaggagcgggagactcggctgtttccagctgtcgacgacaaatgtcgaattctgtgtcatgctctgacctctgattttctcatctacgggaccgacactggcgttgtgcagtatttctacatcgaagattggcaatttgtcaacgattataggcatccggtcagcgtgaagaaaatatttccggaccccaacggtactcgtctggtctttattgacgagaaatctgacgggtttgtgtactgccctgtgaatgatgcgacttatgaaatccctgatttcagtccaactatcaaaggcgtgctctgggagaactggcccatggataagggagtgttcatcgcctacgacgacgacaaggtatacacttacgtgttccacaaagatacgatccagggcgctaaagtgatcctggctggtagtacaaaggtcccgtttgcacataagccactgctcctttacaacggggagctcacatgccagacgcaatcaggaaaagtgaacaatatttatctgtcgacccatgggttcctcagcaacctgaaagacaccggtcccgacgagctcaggcccatgctggctcagaatctgatgctgaaaagattctccgacgcatgggagatgtgccggatccttaatgacgaggcggcatggaacgaactggcgagagcttgcctgcaccacatggaggtcgagtttgccatcagggtctacaggcggattggcaacgtcgggatcgtgatgtctttggagcaaatcaaggggattgaggactacaacctcctggccggacacctcgcaatgttcacaaatgattacaacctggcacaggatctgtatctcgcttcgtcatgtcccatagccgctctggaaatgcgtcgggatctgcagcactgggattcagcacttcaactggcaaaacacttagcccctgatcaaattccattcattagtaaggaatatgcaatccagctggaattcgccggagattacgttaacgccctcgcgcattacgaaaaaggcatcactggagacaacaaggaacacgacgaggcctgcctggccggagtggcacagatgtctatacgcatgggagatatccgcagaggggtgaaccaggccctgaaacacccatcccgggtcttaaagcgcgattgtggtgctattttggagaacatgaagcaattctctgaagctgcccagttgtatgagaaggggctttactacgataaagctgcttctgtgtatattcgtagcaaaaactgggccaaggttggtgatcttttaccccacgtgagctcacctaaaattcacctgcagtacgctaaggcaaaggaggccgatgggagatacaaggaggctgttgtcgcctacgaaaacgccaaacagtggcaaagcgtgatcaggatttatttggaccatctaaataaccccgagaaggctgttaacattgtccgagaaacccagagtctggatggcgcaaagatggtcgcgagattcttcttgcagttaggggattatgggtcggcaatacagttcctggtgatgtccaagtgcaacaacgaggcctttactcttgctcagcagcacaacaaaatggaaatttatgctgatatcatcggctcagaggacacaaccaacgaagactatcaaagcattgccctatacttcgagggagaaaagagatacctgcaggccggtaagttcttcttactttgcggacagtatagtcgcgctctaaagcactttttgaagtgtccttcatctgaggataatgttgctatcgaaatggccattgagacagtaggacaggccaaggatgagcttctgacgaaccaactcatcgaccacctgctcggtgagaacgatggtatgccaaaagacgctaagtatctgttccgtctctatatggctctgaagcagtatagggaggcagctcagactgctatcataattgccagagaggagcaaagcgcagggaattaccgcaacgcccacgacgttctcttttccatgtatgcagaactgaaaagccagaagatcaagattccatcggagatggccacaaatctgatgattctgcactcatatatcctcgtaaagattcatgttaaaaatggggatcatatgaaaggcgctaggatgcttattagagttgctaacaatatttccaaatttcccagtcacatcgtgccgatcctgacctcaactgtgattgagtgtcatcgggctggcttgaagaacagcgcattctcctttgccgcaatgttaatgcggccagagtatagatctaagatcgatgctaagtataaaaaaaaaatcgagggaatggtgagaagacccgatatcagtgagatcgaagaggccaccacaccctgtccattttgcaagttcttgcttcctgagtgcgagctgctgtgtcccggttgtaaaaatagcataccatactgcattgccaccgggaggcatatgcttaaggacgattggaccgtgtgcccacactgcgactttcccgctctgtactctgaactcaaaatcatgctgaacaccgaatctacatgccccatgtgctctgaaagattaaatgcagcccagttgaagaagatttcagattgtactcaatacttaaggactgaggaggagctgtag

SEQ ID NO: 217988 - DNA, 1443 bp, Artificial Sequence
  derived and/or modified sequence
aaaaggatctttagtcttctggagaaaacatggctaggcgcaccaatccaattcgcttggcaaaagacatccggtaattacctggccgtgaccggcgctgactacattgtgaaaatttttgatcggcacggacagaagcgctccgaaattaaccttccaggcaactgcgtggctatggactgggacaaggatggcgacgtactggccgtaatcgctgagaagtcctcatgcatctatctgtgggacgctaacactaataagactagccaacttgacaacggaatgcgtgaccagatgtccttcttgttgtggtccaaagtgggatcctttctagctgtcggcaccgtcaaggggaatctgctaatctataatcatcagacatcccgcaaaatccccgttctcgggaaacatactaaacgcattacatgtggctgttggaacgccgagaatctcttggcacttggaggcgaggataaaatgataacagtttccaatcaggagggggacactatccggcagacacaagtgcggtcagaaccttctaatatgcaattctttctcatgaaaatggacgaccggacttctgccgctgaatccatgatcagcgtggtgctggggaagaaaacacttttttttctgaacctaaatgaacccgataatcccgcagatctggagttccaacaggatttcggcaacatagtttgttacaattggtatggcgacggacgcattatgatcggttttagttgtgggcactttgtcgtaatctccactcacacgggggaacttggccaagaaatcttccaagctcgcaaccataaggacaatctcacatccattgccgtgtcacagacactcaataaggtcgccacctgcggggacaactgtatcaagatccaggacctggtggacctaaaggatatgtacgtgatcctcaatttagacgaggagaataagggccttgggaccctgagttggacagacgacggtcagcttctcgctctaagcacccagcgcggatcgcttcatgtgtttttgaccaagctcccaatcctcggggatgcctgcagtacccgtatcgcctatttgacaagcctccttgaggtaactgtggccaacccggtcgagggggaattgccaattaccgtttcagttgatgttgagccaaatttcgtggctgtgggtttgtaccacctcgcagtagggatgaataaccgcgcatggttctacgtccttggtgagaacgctgtgaaaaaactgaaggatatggagtaccttggcactgtcgcctccatatgccttcattctgattatgccgcagccctgtttgaaggcaaggtccagttgcatctcaaagccaagtcctggatgcttaagaagaatgtgagactgggattctcccagcagtggatgatctccgccgtctcgtacgctatgccctag

SEQ ID NO: 217989 - DNA, 1446 bp, Artificial Sequence
  derived and/or modified sequence
atgaagaggatcttctcactgctggagaagacgtggctaggtgcaccaatccagttcgcgtggcagaagacctccggcaattacctggccgtgacaggggcagattacattgtgaagatttttgaccgccacggccagaagaggagtgaaatcaatctcccaggtaactgcgtggccatggactgggacaaggacggcgacgtccttgctgtgatcgccgaaaagagtagctgcatctatctttgggatgcaaacacaaacaaaacctcccagctggataatggaatgcgtgaccagatgtcatttcttctttggagcaaggtggggtcttttcttgctgtcggcaccgtgaagggcaatctcctcatttacaatcaccagacttcgaggaaaattcccgtcctgggaaagcatacaaagagaatcacgtgcggatgctggaatgctgaaaatcttctggcgttaggaggcgaagacaaaatgatcacagtgagcaaccaggagggagacaccattaggcagacacaggtgcgatcagagccctcaaatatgcagtttttcctgatgaagatggacgaccggacttcagccgcagagtcgatgatctcggtagtcctcggcaagaagacattgtttttcctgaatctgaatgagccggataaccccgcagacctcgaattccagcaggattttggaaacatcgtctgctacaactggtacggagatggccgtattatgatcggattcagctgtggacacttcgttgtcatctcaacgcacacaggcgaactgggccaggaaattttccaagccaggaaccacaaggacaacctcaccagtattgctgtttcccagaccctcaataaggtggctacatgtggtgataactgcatcaagattcaggacctggtagatcttaaagacatgtatgtgattctcaatctggatgaagaaaacaagggcttggggactttgtcttggaccgatgatggacagttacttgccctctcaacccagagagggtccctccacgtctttcttaccaagcttccgattttgggtgacgcatgcagtacccggattgcttatctcacatcgctactggaggtgactgttgccaatcccgtggagggcgaattacctatcaccgtctccgtcgatgtggagccaaacttcgttgctgtgggattataccacctggcagttggtatgaataatcgggcttggttttacgttttgggggagaatgcagtaaagaaactcaaggacatggagtacctggggacagtcgcctctatctgcctgcactctgactacgccgcagctctgttcgaagggaaggtgcagcttcacctaaaagctaaatcatggatgctgaaaaagaatgtcaggcttggattttctcagcaatggatgataagcgctgtcagttatgccatgccttag

SEQ ID NO: 217990 - DNA, 4249 bp, Artificial Sequence
  derived and/or modified sequence
atagttcgcgtagcggctcgagcgtggagatgaagcgtattttctcactgctagaaaagacttggcttggcgcaccaatacagtttgcctggcaaaaaacatcaggaaactaccttgcagtaacaggagctgattatattgtgaaaatctttgatcgccatggtcaaaaaagaagtgaaattaacttacctggtaactgtgttgccatggattgggataaagatggagatgtcctagcagtgattgctgagaaatctagctgcatttatctttgggatgccaacacaaataagaccagccagttagacaatggcatgaggaaaacatactaagagaatcacttgtggatgttggaatgcagaaaatctgcttgctttaggtggtgaagataaaatgattacagttagtaatcaggaaggtgacacgataagacagacacaagtgagatcagagcctagcaacatgcagtttttcttgatgaagatggatgaccgaacctctgctgctgaaagcatgataagtgtggtgcttggcaagaaaactttgttttttttaaatctgaatgaaccagataacccagctgatcttgaatttcagcaggactttggcaacattgtctgctataattggtatggtgatggccgcatcatgattggtttttcatgtggacattttgtggtcatttctactcatactggagagcttggtcaagagatatttcaggctcgtaaccataaagataatctaaccagcattgcagtatcacagactcttaacaaagttgctacatgtggagataactgcattaaaatccaagacttggttgacttaaaagacatgtatgttatactcaacctggatgaggaaaataaaggattgggtaccttgtcctggactgatgatggccagttgctagcactctctacccaaaggggctcacttcatgttttcctgaccaagcttcccatacttggggatgcctgcagcacaaggattgcctatctcacctccctccttgaagtcaccgtagccaaccctgttgaaggagagctaccaatcacagtttctgttgatgtggaacccaactttgtggcagtaggtctttatcatctggctgtaggaatgaataatcgagcttggttttatgtccttggagaaaatgctgtgaaaaaattgaaagatatggagtatctgggaacagtagccagtatttgccttcattctgactatgctgctgcactttttgaaggcaaagtccagttacatttgatagaaagcgaaatcttggatgctcaagaagaacgtgagactcggcttttcccagcagtggatgataagtgccgtatcttatgccatgccttaactagtgatttcctcatctatggtacagatactggtgtcgttcagtatttctacattgaagactggcaattcgttaatgattatcgacatcctgtcagtgtgaaaaagatttttcccgacccaaatgggaccagattagttttcattgatgaaaaaagtgatggatttgtttactgtccagtcaatgacgctacctatgagattccagatttttcaccaaccattaaaggtgttctttgggaaaactggccaatggataaaggtgtatttattgcttatgatgatgataaggtgtacacttatgtctttcacaaggacactatacaaggagccaaggttattttggctggtagcaccaaagttccttttgctcataaacctttgctgctatataatggagagctgacctgccaaacacagagtggaaaagtaaacaacatctaccttagcacccatggctttctcagcaacttaaaagatacggggcctgacgaactgagaccaatgctggcacagaatttaatgctaaagaggttttctgatgcttgggaaatgtgcaggattctgaatgatgaggctgcctggaatgagttggccagagcttgtctacatcacatggaagtggagtttgcaatccgtgtttatcggagaattggaaatgttggcatagtgatgtccttggaacaaataaagggaatagaggactacaatcttttggcaggacaccttgccatgtttaccaacgattataacctggctcaggacttgtaccttgcatccagctgtcctattgctgccctggagatgagaagggatttacagcattgggacagtgctctacaactggcaaagcatttggccccagaccagataccttttatatcaaaagaatatgctattcagcttgaattcgcgggtgattatgtaaatgctttggctcattatgagaaaggaataacaggtgataataaggaacatgatgaagcttgtctggctggagtggcccagatgtccataagaatgggagacatacgtcgaggggttaaccaagccctcaagcatcccagcagggtccttaaaagagactgtggagccatattggagaatatgaagcaattttcagaagcggcccaactgtatgaaaaaggtctctactacgataaagcagcatctgtttacatccgctctaagaattgggcaaaagttggtgatcttctgccccacgtttcttctcctaagatccatttgcagtatgccaaagccaaggaagcagatggaagatacaaagaagctgttgtagcttatgaaaatgcaaaacagtggcaaagtgtaatccgcatctatctggatcacctcaataatcctgaaaaagctgtcaatattgttagagagacccagtctctggatggagccaaaatggtagccaggttttttctacagcttggtgactatgggtctgccatccagtttcttgtcatgtccaaatgcaacaatgaagctttcacactggctcagcaacacaacaaaatggaaatctatgcagatattattggttctgaagacactactaatgaagactatcaaagcattgccttatactttgaaggagaaaagagatatcttcaggctggaaaattcttcttgctgtgtggccaatattcacgagcacttaaacacttcctgaaatgcccaagctcggaagataatgtggcaatagaaatggcaattgaaactgttggtcaggccaaagatgaactgctgaccaatcagctgatagaccatctcctgggggagaacgatggcatgcctaaggatgccaagtacctgttccgcttgtacatggctctgaagcaataccgagaagctgcccagactgccatcatcattgccagagaagagcagtctgcaggcaactaccggaatgcacacgatgttctcttcagtatgtatgcagaactgaaatcccagaagatcaaaattccctccgagatggccaccaacctcatgattctgcacagctatatactagtaaagattcatgttaaaaatggagatcacatgaaaggggctcgcatgctcattcgggtggccaacaacatcagcaaatttccatcacacattgtacccatcctgacgtcaactgtgattgagtgtcacagggcaggcctgaagaactctgctttcagcttcgcagctatgttgatgaggcctgaataccgcagcaaaatagatgccaaatacaaaaagaagatcgagggaatggtcaggagacccgatatatctgagatagaagaggccacgactccatgtccattctgcaaatttcttctcccagagtgtgaactcctctgtcctggatgtaaaaacagtatcccatattgcattgcaacaggtcgacacatgttgaaagatgactggacggtgtgtccacattgtgacttccctgctctatactcagaattgaagatcatgctaaacactgaaagcacatgtcctatgtgttcagaaagattaaacgctgctcagctgaaaaagatttcagactgtacccagtacctgcgaacggaggaggaactgtgattggcacgtgcagatacaatgctcctgagaagacagcattttccacaggaggctgtttcctcccctggtggatttaagagacggtcctttctggatacagagaaatgaaacaacggtgacctctccaggtcggcactttccacttctgtacggtggcaaaacgatgacatgtaaccttgctgtttattgtactttgtatattatttcctcttcaaagtctttcttacacactctatcctctgcactgttaatagtaacctatgacataattgtaaatattcagctttttgctaacttttgtattttg

SEQ ID NO: 217991 - DNA, 4520 bp, Artificial Sequence
  derived and/or modified sequence
ggcccggcccctcgaggcaccgcctttcaattagcactcgctgattggtcgctgctcgcgcggtctcctgggtgacgggaacgcggtagcctgcttggtggagaccgggtgcgcctgcgtacttcatagttcgcgtagcggctcgagcgtggagatgaagcgtattttctcactgctagaaaagacttggcttggcgcaccaatacagtttgcctggcaaaaaacatcaggaaactaccttgcagtaacaggagctgattatattgtgaaaatctttgatcgccatggtcaaaaaagaagtgaaattaacttacctggtaactgtgttgccatggattgggataaagatggagatgtcctagcagtgattgctgagaaatctagctgcatttatctttgggatgccaacacaaataagaccagccagttagacaatggcatgagggatcaaatgtctttccttctttggtcaaaagttggaagtttcctggctgttggaactgttaaaggaaatttgcttatttataatcatcagacatctcgaaagattcctgtccttggaaaacatactaagagaatcacttgtggatgttggaatgcagaaaatctgcttgctttaggtggtgaagataaaatgattacagttagtaatcaggaaggtgacacgataagacagacacaagtgagatcagagcctagcaacatgcagtttttcttgatgaagatggatgaccgaacctctgctgctgaaagcatgataagtgtggtgcttggcaagaaaactttgttttttttaaatctgaatgaaccagataacccagctgatcttgaatttcagcaggactttggcaacattgtctgctataattggtatggtgatggccgcatcatgattggtttttcatgtggacattttgtggtcatttctactcatactggagagcttggtcaagagatatttcaggctcgtaaccataaagataatctaaccagcattgcagtatcacagactcttaacaaagttgctacatgtggagataactgcattaaaatccaagacttggttgacttaaaagacatgtatgttatactcaacctggatgaggaaaataaaggattgggtaccttgtcctggactgatgatggccagttgctagcactctctacccaaaggggctcacttcatgttttcctgaccaagcttcccatacttggggatgcctgcagcacaaggattgcctatctcacctccctccttgaagtcaccgtagccaaccctgttgaaggagagctaccaatcacagtttctgttgatgtggaacccaactttgtggcagtaggtctttatcatctggctgtaggaatgaataatcgagcttggttttatgtccttggagaaaatgctgtgaaaaaattgaaagatatggagtatctgggaacagtagccagtatttgccttcattctgactatgctgctgcactttttgaaggcaaagtccagttacatttgatagaaagcgaaatcttggatgctcaagaagaacgtgagactcggcttttcccagcagtggatgataagtgccgtatcttatgccatgccttaactagtgatttcctcatctatggtacagatactggtgtcgttcagtatttctacattgaagactggcaattcgttaatgattatcgacatcctgtcagtgtgaaaaagatttttcccgacccaaatgggaccagattagttttcattgatgaaaaaagtgatggatttgtttactgtccagtcaatgacgctacctatgagattccagatttttcaccaaccattaaaggtgttctttgggaaaactggccaatggataaaggtgtatttattgcttatgatgatgataaggtgtacacttatgtctttcacaaggacactatacaaggagccaaggttattttggctggtagcaccaaagttccttttgctcataaacctttgctgctatataatggagagctgacctgccaaacacagagtggaaaagtaaacaacatctaccttagcacccatggctttctcagcaacttaaaagatacggggcctgacgaactgagaccaatgctggcacagaatttaatgctaaagaggttttctgatgcttgggaaatgtgcaggattctgaatgatgaggctgcctggaatgagttggccagagcttgtctacatcacatggaagtggagtttgcaatccgtgtttatcggagaattggaaatgttggcatagtgatgtccttggaacaaataaagggaatagaggactacaatcttttggcaggacaccttgccatgtttaccaacgattataacctggctcaggacttgtaccttgcatccagctgtcctattgctgccctggagatgagaagggatttacagcattgggacagtgctctacaactggcaaagcatttggccccagaccagataccttttatatcaaaagaatatgctattcagcttgaattcgcgggtgattatgtaaatgctttggctcattatgagaaaggaataacaggtgataataaggaacatgatgaagcttgtctggctggagtggcccagatgtccataagaatgggagacatacgtcgaggggttaaccaagccctcaagcatcccagcagggtccttaaaagagactgtggagccatattggagaatatgaagcaattttcagaagcggcccaactgtatgaaaaaggtctctactacgataaagcagcatctgtttacatccgctctaagaattgggcaaaagttggtgatcttctgccccacgtttcttctcctaagatccatttgcagtatgccaaagccaaggaagcagatggaagatacaaagaagctgttgtagcttatgaaaatgcaaaacagtggcaaagtgtaatccgcatctatctggatcacctcaataatcctgaaaaagctgtcaatattgttagagagacccagtctctggatggagccaaaatggtagccaggttttttctacagcttggtgactatgggtctgccatccagtttcttgtcatgtccaaatgcaacaatgaagctttcacactggctcagcaacacaacaaaatggaaatctatgcagatattattggttctgaagacactactaatgaagactatcaaagcattgccttatactttgaaggagaaaagagatatcttcaggctggaaaattcttcttgctgtgtggccaatattcacgagcacttaaacacttcctgaaatgcccaagctcggaagataatgtggcaatagaaatggcaattgaaactgttggtcaggccaaagatgaactgctgaccaatcagctgatagaccatctcctgggggagaacgatggcatgcctaaggatgccaagtacctgttccgcttgtacatggctctgaagcaataccgagaagctgcccagactgccatcatcattgccagagaagagcagtctgcaggcaactaccggaatgcacacgatgttctcttcagtatgtatgcagaactgaaatcccagaagatcaaaattccctccgagatggccaccaacctcatgattctgcacagctatatactagtaaagattcatgttaaaaatggagatcacatgaaaggggctcgcatgctcattcgggtggccaacaacatcagcaaatttccatcacacattgtacccatcctgacgtcaactgtgattgagtgtcacagggcaggcctgaagaactctgctttcagcttcgcagctatgttgatgaggcctgaataccgcagcaaaatagatgccaaatacaaaaagaagatcgagggaatggtcaggagacccgatatatctgagatagaagaggccacgactccatgtccattctgcaaatttcttctcccagagtgtgaactcctctgtcctggatgtaaaaacagtatcccatattgcattgcaacaggtcgacacatgttgaaagatgactggacggtgtgtccacattgtgacttccctgctctatactcagaattgaagatcatgctaaacactgaaagcacatgtcctatgtgttcagaaagattaaacgctgctcagctgaaaaagatttcagactgtacccagtacctgcgaacggaggaggaactgtgattggcacgtgcagatacaatgctcctgagaagacagcattttccacaggaggctgtttcctcccctggtggatttaagagacggtcctttctggatacagagaaatgaaacaacggtgacctctccaggtcggcactttccacttctgtacggtggcaaaacgatgacatgtaaccttgctgtttattgtactttgtatattatttcctcttcaaagtctttcttacacactctatcctctgcactgttaatagtaacctatgacataattgtaaatattcagctttttgctaacttttgtattttgaaaaactttaaaataaaattgttgactaga

SEQ ID NO: 217992 - DNA, 1966 bp, Artificial Sequence
  derived and/or modified sequence
aaacgtattttctcactgctagaaaagacttggcttggcgcaccaatacagtttgcctggcaaaaaacatcaggaaactaccttgcagtaacaggagctgattatattgtgaaaatctttgatcgccatggtcaaaaaagaagtgaaattaacttacctggtaactgtgttgccatggattgggataaagatggagatgtcctagcagtgattgctgagaaatctagctgcatttatctttgggatgccaacacaaataagaccagccagttagacaatggcatgagggatcaaatgtctttccttctttggtcaaaagttggaagtttcctggctgttggaactgttaaaggaaatttgcttatttataatcatcagacatctcgaaagattcctgtccttggaaaacatactaagagaatcacttgtggatgttggaatgcagaaaatctgcttgctttaggtggtgaagataaaatgattacagttagtaatcaggaaggtgacacgataagacagacacaagtgagatcagagcctagcaacatgcagtttttcttgatgaagatggatgaccgaacctctgctgctgaaagcatgataagtgtggtgcttggcaagaaaactttgttttttttaaatctgaatgaaccagataacccagctgatcttgaatttcagcaggactttggcaacattgtctgctataattggtatggtgatggccgcatcatgattggtttttcatgtggacattttgtggtcatttctactcatactggagagcttggtcaagagatatttcaggctcgtaaccataaagataatctaaccagcattgcagtatcacagactcttaacaaagttgctacatgtggagataactgcattaaaatccaagacttggttgacttaaaagacatgtatgttatactcaacctggatgaggaaaataaaggattgggtaccttgtcctggactgatgatggccagttgctagcactctctacccaaaggggctcacttcatgttttcctgaccaagcttcccatacttggggatgcctgcagcacaaggattgcctatctcacctccctccttgaagtcaccgtagccaaccctgttgaaggagagctaccaatcacagtttctgttgatgtggaacccaactttgtggcagtaggtctttatcatctggctgtaggaatgaataatcgagcttggttttatgtccttggagaaaatgctgtgaaaaaattgaaagatatggagtatctgggaacagtagccagtatttgccttcattctgactatgctgctgcactttttgaaggcaaagtccagttacatttgaaagcgaaatcttggatgctcaagaagaacgtgagactcggcttttcccagcagtggatgataagtgccgtatcttatgccatgccttaactagtgatttcctcatctatggtacagatactggtgtcgttcagtatttctacatctctatactcagaattgaagatcatgctaaacactgaaagcacatgtcctatgtgttcagaaagattaaacgctgctcagctgaaaaagatttcagactgtacccagtacctgcgaacggaggaggaactgtgattggcacgtgcagatacaatgctcctgagaagacagcattttccacaggaggctgtttcctcccctggtggatttaagagacggtcctttctggatacagagaaatgaaacaacggtgacctctccaggtcggcactttccacttctgtacggtggcaaaacgatgacatgtaaccttgctgtttattgtactttgtatattatttcctcttcaaagtctttcttacacactctatcctctgcactgttaatagtaacctatgacataattgtaaatattcagctttttgctaacttttgtattttgaaaaactttaaaataaaattgttgact

SEQ ID NO: 217993 - DNA, 2513 bp, Artificial Sequence
  derived and/or modified sequence
gagcgtggagatgaagcgtattttctcactgctagaaaagacttggcttggcgcaccaatacagtttgcctggcaaaaaacatcaggaaactaccttgcagtaacaggagctgattatattgtgaaaatctttgatcgccatggtcaaaaaagaagtgaaattaacttacctggtaactgtgttgccatggattgggataaagatggagatgtcctagcagtgattgctgagaaatctagctgcatttatctttgggatgccaacacaaataagaccagccagttagacaatggcatgagggatcaaatgtctttccttctttggtcaaaagttggaagtttcctggctgttggaactgttaaaggaaatttgcttatttataatcatcagacatctcgaaagattcctgtccttggaaaacatactaagagaatcacttgtggatgttggaatgcagaaaatctgcttgctttaggtggtgaagataaaatgattacagttagtaatcaggaaggtgacacgataagacagacacaagtgagatcagagcctagcaacatgcagtttttcttgatgaagatggatgaccgaacctctgctgctgaaagcatgataagtgtggtgcttggcaagaaaactttgttttttttaaatctgaatgaaccagataacccagctgatcttgaatttcagcaggactttggcaacattgtctgctataattggtatggtgatggccgcatcatgattggtttttcatgtggacattttgtggtcatttctactcatactggagagcttggtcaagagatatttcaggctcgtaaccataaagataatctaaccagcattgcagtatcacagactcttaacaaagttgctacatgtggagataactgcattaaaatccaagacttggttgacttaaaagacatgtatgttatactcaacctggatgaggaaaataaaggattgggtaccttgtcctggactgatgatggccagttgctagcactctctacccaaaggggctcacttcatgttttcctgaccaagcttcccatacttggggatgcctgcagcacaaggattgcctatctcacctccctccttgaagtcaccgtagccaaccctgttgaaggagagctaccaatcacagtttctgttgatgtggaacccaactttgtggcagtaggtctttatcatctggctgtaggaatgaataatcgagcttggttttatgtccttggagaaaatgctgtgaaaaaattgaaagatatggagtatctgggaacagtagccagtatttgccttcattctgactatgctgctgcactttttgaaggcaaagtccagttacatttgaaagcgaaatcttggatgctcaagaagaacgtgagactcggcttttcccagcagtggatgataagtgccgtatcttatgccatgccttaactagtgatttcctcatctatggtacagatgtatgtattgccttcttttttagagaacactgggaatttttaatttttattttgtgatctcagtcattctcttttcctaccagtcttttttctatattgaatccaatacaattaatgaagttatctgtgattaattatatacattcatgtgtctctttgcagtggggatacattctgagaaacgtgtcattgggcaatttcatcattgtgtggatgtcatagagtgtgcttacaggaacctagatggtacagcccactgcacacctagcctgtgtggtagagcctattgctcctaggctacaaaccagtacagcatgtgactgtactgaatactataggtaattgtaacacaatgctatctagacatagacaaggtacagtatatgtgtgatataaaatatttaaaatggcatgcctgtatagggcacttaccatgacaggagcttgcaggactggaaatggctctgggtgagtgagtgagtgagtggtgagtgaacgtgaaggcctgcagcattactgtacactaccatagatttttatcaacactgtacacttagggacactaaacttatttaaacattttttcttcaaaaataaattaaccttagctcactgtaactttataagctttatatttaaaaaaactttttgactcttttgtagtaacacttagcttaaaacacaaacacattgtacagttacacaaaatattttcttaaaaaatattttattatatcctattctataagcttttccttgtttttcactttttttaacttttaaactttttataaaaactaagacacaaacacacacattagtgcaggcctgcatagcatcaggatcatcagtatcactgtctcccacctccgcatcttgtcccactgaaaggtcttcagcgggaataacatgcatggagctgtcatctcctgtgataacaatgccttcttctggatacctcctgaaggacctggttgagcctgttttacagttaacttttttttaataaatagaagtgcactccaaaa

SEQ ID NO: 217994 - protein, 93 aa, Artificial Sequence
  derived and/or modified sequence
MEGASTSTTENFGHRAKRARVSGKSQDLSAAPAEQYLQEKLPDEVVLKIFSYLLEQDLCRAACVCKRFSELANDPILWLGEVAHAYNPSTLGG

SEQ ID NO: 217995 - DNA, 282 bp, Artificial Sequence
  derived and/or modified sequence
atggagggcgcctccacttctaccacagaaaactttggacaccgggctaaacgggcacgcgtcagtggaaaatcacaagatctgtcggctgcccctgcggaacagtacctgcaggagaagttaccggacgaggtggtgctcaagatatttagctatctcctggaacaagatctgtgtcgagctgcctgcgtatgtaagaggttttctgagctcgccaacgaccctatcctatggcttggcgaagttgcccacgcctacaacccttcaacactgggaggctag

SEQ ID NO: 217996 - DNA, 1056 bp, Artificial Sequence
  derived and/or modified sequence
atggagatcaaggaggagtttacctctctggtcatggatgaagctctactgaaagagatgacctttatgcacgaaaagggccagggggtgatcgaggaaaatgaggtatacagcaacacccttgccggcgtgtgggtgactaccggaagcactcccgtacttcgacggaacaggattcactctggcaagcaagtaggggtctacttttacgataacggacacggtgtgctggaggacaatgatatctataatcatatgtactccggagttcaaatccgtaccggctccaaccccaagattcggcggaacaagatttggggcggacagaacggtggcattctggtttacaactccgggttggggtgcatagaggataacgagatctttgataatgccatggcgggtgtctggatcaaaacagactccaacccgacactccggcggaacaagattcacgacggcagggacgggggcatctgtattttcaacggtggccgagggttactggaagagaatgatattttcagaaacgcccaggctggagtgctgatatcaaccaactctcatcccattctcagaaagaaccgcatcttcgatggtttcgcggccggaatcgagattacaaatcacgccactgcaacactggagggcaatcagatctttaataaccggtttgggggcctatttcttgcgtccggcgtgaacgttaccatgaaagacaacaaaatcatgaacaaccaggacgccatagagaaggccgtgtcacggggccagtgcttgtacaagatctccagctacacatcgtaccctatgcacgacttctaccggtgccacacctgcaacactaccgacagaaacgctatttgtgtgaattgcatcaaaaagtgtcaccagggccatgacgttgaattcataaggcacgatcgttttttctgcgactgcggggccggaacgttgagcaatccatgcacccttgcaggcgaacctacccacgatacagacaccctgtacgatagtgccccacccattgagtctaatactctgcagcacaattag

SEQ ID NO: 217997 - DNA, 282 bp, Artificial Sequence
  derived and/or modified sequence
atggagggcgccagcaccagcaccacagagaactttggccaccgggccaagagggcccgggtgtctgggaagagccaggacctgtctgctgccccagctgagcagtacctgcaggagaagctgcctgatgaggtggtgctgaagatcttctcctacctgctggagcaggacctgtgcagagctgcctgtgtgtgcaagcgcttcagcgagctggccaatgaccccatcctgtggctgggggaggtggcccacgcctacaaccccagcaccctgggcggctag

SEQ ID NO: 217998 - DNA, 1056 bp, Artificial Sequence
  derived and/or modified sequence
atggagatcaaggaggagttcaccagcctggtgatggatgaggccctgctgaaggagatgaccttcatgcatgagaagggccagggcgtgattgaagaaaatgaggtgtacagcaacaccctggccggcgtgtgggtgaccaccggcagcacccctgtgctgcggaggaaccgcatccacagcggcaagcaggtgggcgtgtacttctatgacaatggccacggcgtgctggaggacaatgacatctacaaccacatgtacagcggcgtgcagatcagaacaggcagcaaccccaagatcagaagaaacaagatctggggcggccagaatggaggcatcctggtgtacaacagcggcctgggctgcatcgaggacaatgagatctttgacaatgccatggccggcgtgtggatcaagacagacagcaaccccaccctgcggaggaacaagatccatgatggaagagatggcggcatctgcatcttcaatggaggccggggcctgctggaggagaatgacatcttcagaaatgcccaggccggcgtgctgatcagcaccaacagccaccccatcctgaggaagaaccgcatctttgatggctttgctgctggcatcgagatcaccaaccacgccacagccaccctggagggcaaccagatcttcaacaacagatttggaggcctcttcctggccagcggcgtgaatgtgaccatgaaggacaacaagatcatgaacaaccaggatgccatcgagaaggctgtgtcccggggccagtgcctgtacaagatcagcagctacaccagctaccccatgcatgacttctaccgctgccacacctgcaacaccacagacagaaatgccatctgtgtgaactgcatcaagaagtgccaccagggccatgatgtggagttcatcagacatgaccgcttcttctgtgactgtggggccggcaccctgagcaacccctgcaccctggccggggagcccacccatgacacagacaccctgtatgattctgccccacccatcgagagcaacaccctgcagcacaactag

SEQ ID NO: 217999 - DNA, 282 bp, Artificial Sequence
  derived and/or modified sequence
atggagggcgccagcaccagcaccaccgagaacttcggccaccgggcaaaaagagccagagtatcagggaaatcacaggacctatccgcggcacctgctgaacagtaccttcaggagaagctccccgacgaggtggtcctgaagattttctcatacctactggaacaggatctgtgtcgtgccgcttgcgtctgcaagaggttctccgagttagccaatgaccctattctgtggttaggggaggtggctcacgcgtacaatccctcgacactcgggggctag

SEQ ID NO: 218000 - DNA, 1056 bp, Artificial Sequence
  derived and/or modified sequence
atggagatcaaggaggagttcaccagcctggtgatggacgaggccctccttaaggagatgacattcatgcatgagaaaggtcagggggtgatcgaagaaaatgaggtgtattctaacaccttagccggagtctgggttaccacgggctccacgccagtgctgcggagaaaccggatccattccggaaagcaggtcggagtgtacttttacgataatgggcacggcgtactggaggacaatgacatctataaccacatgtattcaggagttcagatccgcactggaagtaaccccaagataaggcggaacaagatctggggtgggcagaatgggggtatcctggtctataactctgggttggggtgtatcgaagacaacgagatatttgacaatgccatggcgggagtctggatcaagactgattctaatccaactctgcgtcgaaataaaatccacgatggacgagacggcggtatttgtatatttaacgggggacgtggactactagaggaaaatgatatcttccgcaacgcccaggctggtgtcctcatcagcacgaattctcaccccatcctcagaaaaaacaggatcttcgatggcttcgcagctggcattgagatcacaaatcatgcaacagccacactcgaggggaatcagatctttaataaccgattcggaggactctttttagcaagcggcgttaatgtgaccatgaaggataacaagattatgaataaccaggacgccattgagaaagcggtctccagagggcagtgtctgtacaaaattagttcttacacaagctaccctatgcacgacttctaccgctgtcatacatgtaatacaacagacaggaacgcaatctgtgtcaactgcattaaaaaatgccatcagggacacgacgtggagttcatccggcacgacaggtttttttgcgattgtggggccggaaccttgtcaaatccctgcaccctcgccggtgaaccaactcatgacacggacacactgtacgactctgccccaccaattgaatctaacacactacaacataactag

SEQ ID NO: 218001 - DNA, 282 bp, Artificial Sequence
  derived and/or modified sequence
atggagggtgcctccaccagtacgactgagaattttggtcatagggccaagagagctcgagtttctgggaaaagccaggacttatcggcagctcctgccgaacagtacctccaggaaaagctgcccgatgaagtggtgctgaagattttcagctacctccttgaacaggacctttgccgggcagcttgtgtgtgtaagcgcttcagtgaacttgccaacgatcccattctttggctgggggaggttgcccatgcctacaacccttctacattaggagggtag

SEQ ID NO: 218002 - DNA, 1056 bp, Artificial Sequence
  derived and/or modified sequence
atggagatcaaggaagagtttacgtcgctggttatggacgaggccctactgaaggaaatgactttcatgcacgagaagggacagggtgtcattgaagagaatgaggtatactctaatactctagccggagtttgggttactactgggtcaacccctgtgctgagaagaaaccggatccactccggcaagcaagtgggagtgtacttttacgacaacggtcatggcgtgctggaagacaacgatatctacaatcatatgtactccggagtccagatccggaccggctcaaatcccaagatccgcaggaacaaaatctggggcggtcaaaatggcggtatcctggtgtacaacagcggactgggttgcattgaggacaacgagatttttgacaacgccatggctggcgtttggataaagacggattcaaatcccactctcagaaggaacaagattcatgacggccgagatgggggtatctgtatcttcaacgggggacgaggactcctggaagaaaatgacatattcagaaacgctcaggccggtgtgctgatatctaccaactcgcatccaatcctgaggaagaatcgcatcttcgatggattcgccgctgggattgagatcacaaatcatgctactgccaccctggaaggcaaccagatcttcaataaccgcttcgggggtttgttcctggctagcggggtgaacgttaccatgaaagataacaaaataatgaataaccaggacgcaatagagaaggcagtgtcacgcggtcagtgtctctataaaatctcctcttatacatcatacccaatgcatgacttctaccgctgccatacatgtaacaccaccgatcgtaacgccatttgtgtaaattgcatcaaaaaatgccaccaggggcatgatgtcgagtttatccggcatgaccgattcttttgcgattgcggcgctgggacattatctaatccctgtaccttagctggggagcctacacatgatacggacaccctatacgacagtgctccacccatagagtccaacaccctgcagcataattag

SEQ ID NO: 218003 - DNA, 282 bp, Artificial Sequence
  derived and/or modified sequence
atggagggcgccagcaccagcaccaccgagaacttcggccacagagccaagagagccagagtgagcggcaagagccaggacctgagcgccgcccccgccgagcagtacctgcaggagaagctgcccgacgaggtggtgctgaagatcttcagctacctgctggagcaggacctgtgcagagccgcctgcgtgtgcaagagattcagcgagctggccaacgaccccatcctgtggctgggcgaggtggcccacgcctacaaccccagcaccctgggcggctag

SEQ ID NO: 218004 - DNA, 1056 bp, Artificial Sequence
  derived and/or modified sequence
atggagatcaaggaggagttcaccagcctggtgatggacgaggccctgctgaaggagatgaccttcatgcacgagaagggccagggcgtgatcgaggagaacgaggtgtacagcaacaccctggccggcgtgtgggtgaccaccggcagcacccccgtgctgagaagaaacagaatccacagcggcaagcaggtgggcgtgtacttctacgacaacggccacggcgtgctggaggacaacgacatctacaaccacatgtacagcggcgtgcagatcagaaccggcagcaaccccaagatcagaagaaacaagatctggggcggccagaacggcggcatcctggtgtacaacagcggcctgggctgcatcgaggacaacgagatcttcgacaacgccatggccggcgtgtggatcaagaccgacagcaaccccaccctgagaagaaacaagatccacgacggcagagacggcggcatctgcatcttcaacggcggcagaggcctgctggaggagaacgacatcttcagaaacgcccaggccggcgtgctgatcagcaccaacagccaccccatcctgagaaagaacagaatcttcgacggcttcgccgccggcatcgagatcaccaaccacgccaccgccaccctggagggcaaccagatcttcaacaacagattcggcggcctgttcctggccagcggcgtgaacgtgaccatgaaggacaacaagatcatgaacaaccaggacgccatcgagaaggccgtgagcagaggccagtgcctgtacaagatcagcagctacaccagctaccccatgcacgacttctacagatgccacacctgcaacaccaccgacagaaacgccatctgcgtgaactgcatcaagaagtgccaccagggccacgacgtggagttcatcagacacgacagattcttctgcgactgcggcgccggcaccctgagcaacccctgcaccctggccggcgagcccacccacgacaccgacaccctgtacgacagcgccccccccatcgagagcaacaccctgcagcacaactag

SEQ ID NO: 218005 - protein, 1439 aa, Artificial Sequence
  derived and/or modified sequence
MATLACRVQFLDDTDPFNSTNFPEPSRPPLFTFREDLALGTQLAGVHRLLQAPHKLDDCTLQLSHNGAYLDLEATLAEQRDELEGFQDDAGRGKKHSIILRTQLSVRVHACIEKLYNSSGRDLRRALFSLKQIFQDDKDLVHEFVVAEGLTCLIKVGAEADQNYQNYILRALGQIMLYVDGMNGVINRNETIQWLYTLIGSKFRLVVKTALKLLLVFVEYSESNAPLLIQAVTAVDTKRGVKPWSNIMEILEEKDGVDTELLVYAMTLVNKTLSGLPDQDTFYDVVDCLEELGIAAVSQRHLNKKGTDLDLVEQLNIYEVALRHEDGDETTEPPPSGCRDRRRASVCSSGGGEHRGLDRRRSRRHSVQSIKSTLSAPTSPCSQSAPSFKPNQVRDLREKYSNFGNNSYHSSRPSSGSSVPTTPTSSVSPPQEARLERSSPSGLLTSSFRQHQESLAAERERRRQEREERLQRIEREERNKFSRDYLDKREEQRQAREERYKYLEQLAAEEHEKELRSRSVSRGRADLSLDLTSPAAPACLAPLSHSPSSSDSQEALTVSASSPGTPHHPQASAGDPEPESEAEPEAEAGAGQVADEAGQDIASAHEGAETEVEQALEQEPEERASLSEKERQNEGVNERDNCSASSVSSSSSTLEREEKEDKLSRDRTTGLWPAGVQDAGVNGQCGDILTNKRFMLDMLYAHNRKSPDDEEKGDGEAGRTQQEAEAVASLATRISTLQANSQTQDESVRRVDVGCLDNRGSVKAFAEKFNSGDLGRGSISPDAEPNDKVPETAPVQPKTESDYIWDQLMANPRELRIQDMDFTDLGEEDDIDVLDVDLGHREAPGPPPPPPPTFLGLPPPPPPPLLDSIPPPPVPGNLLVPPPPVFNAPQGLGWSQVPRGQPTFTKKKKTIRLFWNEVRPFDWPCKNNRRCREFLWSKLEPIKVDTSRLEHLFESKSKELSVSKKTAADGKRQEIIVLDSKRSNAINIGLTVLPPPRTIKIAILNFDEYALNKEGIEKILTMIPTDEEKQKIQEAQLANPEIPLGSAEQFLLTLSSISELSARLHLWAFKMDYETTEKEVAEPLLDLKEGIDQLENNKTLGFILSTLLAIGNFLNGTNAKAFELSYLEKVPEVKDTVHKQSLLHHVCTMVVENFPDSSDLYSEIGAITRSAKVDFDQLQDNLCQMERRCKASWDHLKAIAKHEMKPVLKQRMSEFLKDCAERIIILKIVHRRIINRFHSFLLFMGHPPYAIREVNINKFCRIISEFALEYRTTRERVLQQKQKRANHRERNKTRGKMITDSGKFSGSSPAPPSQPQGLSYAEDAAEHENMKAVLKTSSPSVEDATPALGVRTRSRASRGSTSSWTMGTDDSPNVTDDAADEIMDRIVKSATQVPSQRVVPRERKRSRANRKSLRRTLKSGLTPEEARALGLVGTSELQL

SEQ ID NO: 218006 - DNA, 4942 bp, Artificial Sequence
  derived and/or modified sequence
gctgcggctgcggcctcccctgcgcgcagctacccgggcgtcccggcccgcggccccgctaaccccggggcccgcgcccccgcggcagggatgcatcatggccacgctggcttgccgggtgcagttcttggacgacacggaccctttcaacagcaccaacttccccgagcccagccggccgccgctgttcacgttccgcgaggacctcgcgctcggcacccagctggcgggggtccataggctgctgcaggcgccgcacaagctggatgactgtactctgcagctctctcacaatggcgcctacctggatttggaggccaccctggcagagcagcgggatgagttggaaggcttccaggatgacgccgggcggggcaagaagcacagcatcatcctaaggacgcagctgtctgtgagggtccatgcctgcatcgaaaaactatacaactccagcggacgagatttgagaagggccctcttctccctgaagcagatatttcaggatgacaaggatttggtgcatgaatttgtagtggctgaaggtctgacatgtttgatcaaggtgggagctgaggctgatcagaactatcagaactacatcttaagggctttgggccagattatgttgtatgtggatggaatgaatggagtaataaaccgcaatgaaaccattcagtggctgtacactctcattgggtcaaagttccgcctggtggtgaagacagccctgaagctgctgctcgtctttgtagagtactcggagtccaacgcacctctcctaattcaggctgtcactgctgttgacacgaaaagaggggtcaaaccttggtcaaatatcatggaaatcctggaggaaaaagatggagttgatacggagctactggtttatgcaatgactttggtgaacaagacgttatcaggactaccagaccaagacaccttctacgacgtcgtggactgcctggaggagctgggcattgctgctgtgtcccagaggcacttgaacaagaaagggactgacctggacttagtggagcaactcaacatttatgaggtggcgctcaggcacgaggatggcgatgagaccacggagccaccccccagtgggtgccgggaccggaggagggccagcgtgtgttccagtggcggaggcgagcaccggggcctggaccgcagaaggagccgcaggcactcggtgcagagcatcaagagcaccctgtcggcccccaccagtccctgctcccagtcagctcccagcttcaagcccaaccaagtgcgagatctgcgtgaaaaatacagcaattttggcaataactcttatcactcctcaagaccctcatctggatccagtgtgcccaccacccccacatcatccgtctcacccccacaggaggccaggttggaaaggtcatcaccgagtggtcttctcacatcatccttcaggcagcaccaagagtcactggcagcagagagagagaggcggcggcaggagagagaagaaaggttgcagagaatagagcgggaagaaagaaacaaattcagccgagattatttagacaaaagagaggagcaaaggcaagcaagagaagaaagatacaaatacttggaacagttggcagctgaggagcacgagaaggagctgagaagccggagtgtgagccggggcagagccgacctctccttggacctgacctcgccagcagccccagcctgcctggctcctctgagccatagcccctcatcttcagactctcaagaggctctcacggtgtctgcctcctccccaggaacccctcaccatccccaagcaagtgccggggatcctgaacccgaatcagaggcagaaccggaagcagaggcaggggcggggcaggttgctgatgaagctggccaggacatagcctctgcccacgagggtgcagagactgaagtggagcaggcactagagcaagagccggaagaaagagcctccctcagtgaaaaagagaggcagaacgagggggtgaacgagagggacaactgctctgcctccagcgtctcgtcctccagcagcacgttggagagggaggagaaggaggacaagctctccagggacaggacaactggtttgtggcccgcaggtgtccaggatgcaggtgtaaatggacagtgtggcgacatcctcaccaacaaacggttcatgcttgacatgctgtatgcccataacaggaagtctccggatgatgaggagaagggggatggggaggctgggaggacccagcaggaggcagaggcggtagccagccttgctaccaggatatccaccctgcaggccaactctcagacccaggatgagagtgtcaggagggtggatgtcggctgtttggacaatcggggcagtgtgaaagcatttgctgagaaattcaacagtggggacctggggagaggttccatctcccctgatgctgagcccaatgacaaggtcccagaaacagcgccggtgcagccgaagacagagtctgattacatctgggaccagctcatggccaatccaagagagctcagaatccaagacatggatttcactgacctgggggaggaggatgacattgatgtcctagatgtggacctgggtcacagggaggcccctgggccacctcccccacccccacccacctttctgggtttgccgcccccaccccctccgcccctgttggacagcattcctccccctcctgtccctggtaatttattggttcctcctcctccagtgttcaacgctcctcagggcttagggtggtcccaggtacccaggggtcagcccacattcactaagaaaaagaagaccatccgtttgttctggaatgaagttcggccttttgactggccatgtaaaaacaaccgacgctgcagagaattcctgtggtcaaaactggaacccattaaggtggacacttccagactggagcacctgtttgagtctaaatccaaggaactgtctgtctcaaagaaaactgctgcagatggaaaaaggcaagagatcattgttctggattccaagaggagtaacgccatcaatattggtctgacggtgctgccccctccaaggacgattaagatcgccattttgaattttgatgagtatgccttaaacaaagaaggaatcgagaaaattctaacgatgattcccaccgatgaggagaagcagaaaatccaggaagctcagctggccaaccctgaaatccccctgggcagtgcagagcagttcctcctcaccctgtcctccatcagcgagctctctgcacgacttcacctctgggcattcaaaatggattatgaaactacagaaaaggaagtagcagaaccactcctggacctgaaggaaggaatagaccagttggagaacaataaaaccttgggctttatcctgtctactctcttagccattgggaactttctaaatggaactaatgccaaagcgtttgagttaagctacctcgagaaggttccagaagtcaaagacacagtgcacaagcagtcgcttctccaccatgtgtgcaccatggtggtagaaaacttcccagacagctccgatctgtactcggagatcggggccatcaccaggtcagccaaggttgactttgatcaacttcaggataatttatgtcagatggagagaagatgcaaagcttcatgggatcacctcaaggcaattgcaaaacatgaaatgaaaccagttttaaaacaacggatgtcagagttcctgaaagactgtgcagagcgaattataattttaaagattgtccatagaaggataatcaacagattccactcctttttactctttatgggccatccaccttatgcaattcgggaagtgaacataaacaaattctgcaggattattagtgaatttgcactagagtatcgcacaaccagggaaagggttttgcagcagaaacagaaacgggccaaccacagagagagaaataagaccagagggaagatgatcaccgattctggcaagttctccggcagttctccggcgcccccaagccagccgcagggtctgagctatgcggaggacgcggctgagcacgagaacatgaaggctgtgctgaaaacctcgtccccctccgtggaggacgccacccccgcgctgggcgtccgcacacgcagccgagcaagccgaggatccactagttcctggactatgggaactgatgactcgcccaatgtcacagatgatgcagctgatgagatcatggaccgcatcgtcaagtcagccacccaagtgcccagtcagcgagtggtgccgagggagaggaaacgatcccgggccaaccggaaatctttgcgaagaaccctgaagagcggcctgaccccagaagaagccagagccctgggcttggttggcacctcggagttgcagctgtgacactcataggttactcccaggagtgtgctgagcagaaggcaagctcttgctggatgaaacccctccaggtggggttggggagacttgatattcacatccaacagtttgaaaagggagagctcaattcccagcgtcaccccatggcttgtgttgcctgctacgcattgacttggatctccaggagtcccctgcacataccttctccatcgtgtcagctgtgtttctcttgattccgtgacacccggtttattagttcaaaagtgtgacaccttttctgggcaaggaacagcccctttaaggagcaaatcacttctgtcacagttattatggtaatatgaggcaatctgattagcttcacagactgagtctccacaacaccaaaatatccagatgtaaaccccaaacttgtacacaaaagaaagcacagattgtttacctgttgtggattttagatgtaacaaatgtttatacaaatacatacatgtacaccatgtttcaaatactaaataaatagagtttaatgcc

SEQ ID NO: 218007 - DNA, 4320 bp, Artificial Sequence
  derived and/or modified sequence
atggctaccctcgcttgccgggtccagttcttagatgacaccgatccctttaactcgaccaatttccctgagccgtctcgtccacccctcttcacgttccgggaggacctagccctcggtacacagctggctggtgtgcaccgactactgcaggcacctcacaagctggacgactgcaccctgcagcttagtcataatggtgcatatctggatcttgaagccactctcgccgaacagcgagacgaactggagggattccaagacgacgcaggacgcggaaagaagcatagcatcattctgagaacccagctgagcgtgagagttcatgcgtgcatagagaaattgtacaactcttcaggccgggacctcaggcgcgccctgttttcgttgaaacaaatctttcaagacgacaaggacttagtgcatgaattcgtggtagccgagggcctgacatgcctgatcaaagtaggtgcggaggccgatcaaaattaccagaattacatcttgagagctctggggcagataatgctgtacgtcgacgggatgaatggggtgatcaatcggaacgaaacgatccagtggctgtacactctgattggatccaagttcagactggtggtcaagaccgcgctcaagctgctcttagtatttgtcgagtactccgagtcaaacgcacccctgctgatccaggcggtaaccgctgttgatactaaaagaggtgtgaaaccatggtccaatataatggagatactggaagagaaagacggggtggacaccgaactcttagtttacgctatgaccttagttaacaagacgctctccgggctgcctgaccaggataccttctatgacgtggtggattgtttggaagaactcggaatagccgccgttagccagaggcaccttaacaagaagggaacagatctagatctcgtggaacagttgaacatctatgaagtagcactgcgccacgaggacggcgatgaaacaacagagccaccaccctccggttgtcgggacagacgtcgcgcctctgtgtgctcatcgggtggtggcgaacaccgagggctagaccgtaggaggtcgcgcagacacagtgtgcaatccatcaagtctaccctgagcgcacctacgtcgccatgtagtcagtctgctccatcattcaagcctaaccaagtacgggatctgagggagaaatattcgaattttggcaataactcataccatagtagcaggccctctagcggcagctccgtccccacaactcccacgtccagcgtctcccctccccaggaagctcgcttggaaaggtcctcccccagtggactattgacttcaagctttcgacagcaccaagaaagcctggctgctgaacgggagcgccgacgccaagagcgcgaagagaggctccagaggatcgaaagagaggaacgaaacaagttttctcgcgattatctcgacaaaagagaggaacagcgccaggcgcgggaagaaagatataaatacctcgaacaactggctgctgaggagcatgagaaggaactgaggtcccgttcagtgagtcgcggaagagcggatctgtcacttgatttgacgagccctgcagccccagcatgtctggcccccctctcccactccccaagctcatcagacagtcaggaggccttgaccgttagtgcttcctctcccgggacacctcaccaccctcaagcttcagctggtgacccagagccggaatccgaggctgagcccgaggctgaggcaggcgctggacaggtcgctgatgaggccggccaggacatcgcgtccgcccatgagggcgccgagacagaggtggagcaggcattggaacaagaacccgaggaacgtgcttctctcagcgagaaggagagacagaatgaaggagtgaatgagagagacaactgtagcgcgagtagcgtcagttcctctagctccacactcgagagggaggagaaggaggataaacttagtcgcgaccggacaactggtctgtggcccgcgggggttcaagacgccggggtcaacggccagtgtggcgacattctaacgaacaagaggttcatgctggatatgctgtacgcccataatcgtaaatcccccgacgatgaagagaaaggtgatggagaggcagggcgtacccagcaggaggccgaagcagttgcctccttggccacccgaatctcaaccctgcaggccaatagccagacccaagatgaatcagtgcgacgggttgacgttggctgtctggacaatagggggtctgtcaaagccttcgcagaaaaattcaatagcggtgatctgggacgtgggtccatttctcccgatgccgaacccaacgacaaggtaccagaaacagcacccgtccagcccaaaacagagtcagattacatctgggaccagttgatggctaacccacgggaactccggatccaagacatggactttactgacctcggcgaggaggatgatatcgatgtattggatgtagacctaggtcatagggaggccccaggcccaccaccccccccaccaccgacctttctcggtctgcctccaccgcctccaccgccattgcttgattccatccctccccccccggtgccgggcaacttgctagtgccaccaccccctgtctttaacgctccccagggcctaggatggagccaagtgccccgcggccagccaacatttacaaaaaaaaagaaaaccatacgactgttttggaacgaagtgcggcctttcgactggccctgcaagaataatcgaagatgtcgagagttcctgtggagcaagctggagcccataaaggtggataccagccggcttgagcatctgttcgagagcaagagtaaagaattgagcgttagtaagaaaacagccgctgacgggaaacgtcaggagatcatagttctggactcgaagcgctcaaacgcaattaatattggccttaccgtactaccccctcctcggactatcaaaattgccatcctgaattttgacgaatacgctctgaataaagaaggtattgagaaaatcctgactatgatccctacggatgaagaaaagcagaaaatccaggaagcacaacttgccaatcccgaaattcccttaggttctgccgagcaattcctcctcaccctgtccagcattagtgaactaagcgctcgccttcacctatgggcatttaagatggactacgaaaccaccgagaaggaagtcgcggagcctcttctggacctgaaggaagggatcgatcagctggagaacaataagacactcggttttattctgtcaactctattagctatcggaaacttcttaaacggcaccaacgcaaaggcattcgaactgagctaccttgagaaggtccccgaagtgaaagacaccgtgcacaaacaatctttgctacaccacgtctgcaccatggtcgttgaaaacttccccgattctagcgacctgtacagtgagattggtgcaattaccaggtcagcgaaagtggatttcgatcagctgcaagacaacctgtgtcagatggaaaggcgttgtaaagcttcatgggaccacctgaaagcaatagcgaagcatgagatgaaacccgtgctcaaacagaggatgagcgagtttcttaaggattgcgccgaaaggatcatcatcttgaaaatagtgcacaggcgtatcatcaatcggttccacagctttctcctcttcatgggccacccaccttacgctatcagagaagtaaacattaataagttttgccgcatcattagtgagttcgctttagagtaccgtacgacgagggaacgggtgttacaacaaaaacagaaaagagccaatcatcgtgagcgcaataagacccgaggcaagatgataacggacagtgggaaattttccggatccagtccagcccctccatcacagccccagggcctgagctacgctgaggatgccgctgaacacgagaacatgaaagccgtcctcaaaacttcatcccctagcgttgaggatgctacccccgccctcggtgtacgcactcggagcagagctagcagaggttctacctcttcctggacaatggggaccgatgattcacctaacgtcactgacgatgcagccgatgagattatggacagaattgtgaaatcggcaacacaggtgccaagccagagagtggtaccacgggaaagaaaacggtctagggcaaacagaaagtctttgagaaggacgctcaaatccggcctcacgcccgaggaagcccgggccctgggactggtagggacctccgaacttcagttgtag

SEQ ID NO: 218008 - DNA, 4320 bp, Artificial Sequence
  derived and/or modified sequence
atggccaccctggcctgccgggtgcagttcctggatgacacagaccccttcaacagcaccaacttccctgagcccagccggcccccactcttcaccttccgggaggacctggccctgggcacccagctggccggcgtgcaccggctgctgcaggccccccacaagctggatgactgcaccctgcagctgagccacaacggggcctacctggacctggaggccaccctggccgagcagagagatgagctggagggcttccaggatgatgctggccggggcaagaagcacagcatcatcctgcggacccagctgtctgtgcgggtgcacgcctgcatcgagaagctgtacaacagcagcggccgggacctgcggcgggccctcttcagcctgaagcagatcttccaggatgacaaggacctggtgcatgaatttgtggtggccgagggcctgacctgcctgatcaaggtgggcgctgaggccgaccagaactaccagaactacatcctgcgggccctgggccagatcatgctgtatgtggatggcatgaatggagtcatcaacagaaatgagaccatccagtggctgtacaccctgattggcagcaagttccggctggtggtgaagacagccctgaagctgctgctggtgtttgtggagtacagcgagagcaatgcccccctgctgatccaggccgtgacagctgtggacaccaagaggggcgtgaagccctggagcaacatcatggagatcctggaggagaaggatggagtggacacagagctgctggtgtatgccatgaccctggtgaacaagaccctgagcggcctgcctgaccaggacaccttctatgatgtggtggactgcctggaggagctgggcattgctgctgtgtcccagaggcacctgaacaagaagggcacagacctggacctggtggagcagctgaacatctatgaggtggccctgcggcatgaagatggagatgagaccacagagcccccacccagcggctgccgggacagaagaagagcctctgtgtgcagcagcggcggcggggagcaccggggcctggacagaagaagaagcagaagacacagcgtgcagagcatcaagagcaccctgagcgcccccaccagcccctgcagccagagcgcccccagcttcaagcccaaccaggtgcgggacctgcgggagaagtacagcaactttggaaacaacagctaccacagcagccggcccagcagcggcagctctgtgcccaccacccccaccagctctgtgtccccaccccaggaggcccggctggagaggagcagccccagcggcctgctgaccagcagcttccggcagcaccaggagagcctggccgctgagcgggagcggcggcggcaggagcgggaggagcggctgcagagaattgagcgggaggagaggaacaagttcagccgggactacctggacaagcgggaggagcagaggcaggcccgggaggagcgctacaagtacctggagcagctggccgctgaggagcacgagaaggagctgcggagccgctctgtgtcccggggccgggctgacctgagcctggacctgaccagccctgctgccccagcctgcctggcccccctgagccacagccccagcagcagtgacagccaggaggccctgactgtgtctgccagcagccctggcaccccccaccacccccaggccagcgctggggaccctgagcctgagagcgaggccgagcctgaggccgaggccggggccggccaggtggctgatgaagctggccaggacatcgccagcgcccatgaaggagctgagacagaggtggagcaggccctggagcaggagcctgaggagcgggccagcctgtctgagaaggagcggcagaatgaaggagtgaatgaaagagacaactgcagcgccagctctgtgagcagcagcagcagcaccctggagcgggaggagaaggaggacaagctgagccgggacaggaccaccggcctgtggccagctggggtgcaggatgctggggtgaatggccagtgtggggacatcctgaccaacaagcgcttcatgctggacatgctgtatgcccacaacaggaagagcccagatgatgaggagaagggagatggagaggccggccgcacccagcaggaggccgaggccgtggccagcctggccacccgcatcagcaccctgcaggccaacagccagacccaggatgaatctgtgagaagagtggatgtgggctgcctggacaacagaggctctgtgaaggcctttgctgagaagttcaacagcggggacctgggccggggcagcatcagcccagatgctgagcccaatgacaaggtgcctgagacagcccctgtgcagcccaagacagaaagtgactacatctgggaccagctgatggccaacccccgggagctgcgcatccaggacatggacttcacagacctgggggaggaggatgacattgatgtgctggatgtggacctgggccaccgggaggcccctggccccccacctcctcctccacccaccttcctgggcctgcccccacctcctcctccacccctgctggacagcatccccccacctcctgtgcccggcaacctgctggtgcccccacctcctgtgttcaatgccccccagggcctgggctggagccaggtgccccggggccagcccaccttcaccaagaagaagaagaccatccgcctcttctggaatgaggtgcggccctttgactggccctgcaagaacaacagacgctgccgggagttcctgtggagcaagctggagcccatcaaggtggacaccagccggctggagcacctgtttgagagcaagagcaaggagctgtctgtgtccaagaagacagctgctgatggcaagaggcaggagatcatcgtgctggacagcaagaggagcaatgccatcaacatcggcctgactgtgctgcccccacccaggaccatcaagatcgccatcctgaactttgatgaatatgccctgaacaaggagggcatcgagaagatcctgaccatgatccccacagatgaggagaagcagaagatccaggaggcccagctggccaaccctgagatccccctgggcagcgctgagcagttcctgctgaccctgagcagcatcagcgagctgagcgcccggctgcacctgtgggccttcaagatggactatgagaccacagagaaggaggtggccgagcccctgctggacctgaaggagggcatcgaccagctggagaacaacaagaccctgggcttcatcctgagcaccctgctggccatcggcaacttcctgaatggcaccaatgccaaggcctttgagctgagctacctggagaaggtgcctgaggtgaaggacacagtgcacaagcagagcctgctgcaccacgtgtgcaccatggtggtggagaacttcccagacagcagtgacctgtacagcgagatcggggccatcaccaggtctgccaaggtggactttgaccagctgcaggacaacctgtgccagatggagcggcgctgcaaggcctcctgggaccacctgaaggccatcgccaagcatgagatgaagcctgtgctgaagcagaggatgtctgagttcctgaaggactgtgccgagcgcatcatcatcctgaagatcgtgcaccggcgcatcatcaaccgcttccacagcttcctgctcttcatgggccaccccccctatgccatccgggaggtgaacatcaacaagttctgccgcatcatcagcgagtttgccctggagtaccgcaccacccgggagcgggtgctgcagcagaagcagaagagggccaaccaccgggagaggaacaagacccggggcaagatgatcacagattctgggaagttcagcggcagcagccctgccccacccagccagccccagggcctgtcctatgcagaagatgctgctgagcacgagaacatgaaggctgtgctgaagaccagcagccccagcgtggaggatgccaccccagccctgggcgtgaggaccaggagccgggccagccggggcagcaccagctcctggaccatgggcacagatgacagccccaacgtgacagatgatgctgctgatgagatcatggaccgcatcgtgaagagcgccacccaggtgcccagccagagggtggtgccccgggagaggaagaggagccgggccaacaggaagagcctgcggaggaccctgaagagcggcctgaccccagaggaggcccgggccctgggcctggtgggcaccagcgagctgcagctgtag

SEQ ID NO: 218009 - DNA, 4320 bp, Artificial Sequence
  derived and/or modified sequence
atggccaccctggcctgccgggtgcagttcctggacgacaccgacccttttaacagtactaactttcctgagcctagtaggccccctctctttacatttcgtgaagacttggccttggggacgcagctcgctggagtacaccgcttgctccaggctccccataagttggatgattgtacacttcagctgagccacaacggcgcttatctggacttggaggccactctggcagaacagcgcgacgagctggaggggtttcaggacgatgccggtagagggaagaagcactctatcatactgaggacccagctgtctgtgcgagtacatgcttgtatcgagaagctgtacaattcttccggcagagatcttcggagggccctgttctctctgaagcaaatcttccaggatgataaagatctggttcatgagttcgtggtggccgagggcttgacctgccttatcaaagtgggcgctgaagctgaccagaattaccagaattacatcctccgggcactcgggcagatcatgttatatgtcgacgggatgaacggggtgatcaacaggaacgagacaatccagtggctgtataccctcatcggatcgaaatttcgcctggtcgtcaagaccgctttgaagttactcttggtcttcgtggaatacagtgaatccaatgctccacttttaattcaagccgtaaccgccgtggacaccaaacgtggggtgaaaccctggtctaatatcatggagatcttggaagagaaagatggtgtggacaccgagttactcgtctacgcgatgaccctggtcaataaaaccctgtctggtttgccagatcaggacactttctatgacgtggtcgactgtcttgaagagctgggcatcgccgccgttagccagcgccatctgaataagaaagggaccgacctcgacctggtggagcagctcaacatatacgaggtcgcgctcagacacgaggacggagatgagactacagagccaccaccaagtggctgtcgcgatcgacggcgcgcatccgtctgctcaagcggtggaggcgagcacagagggctggaccgtagaaggtcacggcgacactctgtgcagagtatcaaaagtacgttaagcgctcctactagcccttgcagtcaaagtgcaccaagttttaaacccaaccaagttagagatcttagagaaaagtatagcaacttcggtaacaattcttaccacagcagtcggccatcaagcgggtcgagcgtacccaccacacccacctcttccgtgtcgccaccccaagaggcccgattggagcgctcaagcccatctggcctgcttacatcgtcctttagacaacaccaagagagtctggccgctgagagagaaaggcgcagacaggagcgagaagagcgtctacaacgcattgagcgggaggagaggaacaagttctctcgggactatctggacaagcgggaggaacaaaggcaggccagagaagagcgatacaagtatctcgagcagctggcggccgaagagcacgagaaggaacttcggagtcggtctgttagcagggggagggctgatctgtctcttgacctaaccagtccagctgctccagcctgcctagcccctctgagtcactccccctctagtagcgattcccaagaggcgttgacggtgtcagcgagcagtccaggaaccccccaccatcctcaggcctcggccggagaccctgagcccgagtccgaagctgaacctgaagccgaagccggcgcgggacaagtagctgatgaagccgggcaggacatagccagtgcccatgaaggggcggaaacagaggttgagcaggccttggaacaggagcctgaggaaagggcttctttgagcgagaaggagcggcaaaacgagggggtcaacgagagggataattgtagtgcctcaagtgtctcatccagttcctcaactctggaacgggaagagaaagaggataaactcagccgtgaccgcaccacaggactctggcctgctggcgttcaggacgctggcgtgaatggacagtgtggtgacatcctgaccaacaagaggttcatgttggacatgctgtacgcgcacaaccgcaagtcgccagatgatgaggagaaaggtgacggagaggctggcagaactcaacaagaagctgaagccgttgcatccctcgccaccagaataagcacgctgcaggcaaattcccagactcaggacgagtccgtgcgccgcgtggatgtgggatgtctagacaacagggggagtgttaaagcgttcgccgaaaagttcaactctggggacctaggcagaggcagcattagcccggacgctgagcccaacgacaaggtgcctgagaccgcaccagtacagccaaagactgaatccgactacatctgggatcagctgatggcaaacccaagagaacttaggatccaggacatggatttcacagacctaggtgaggaagacgatattgatgtgctcgacgtcgacctcgggcatagggaggctcccgggccgcctcccccccctccacctacttttcttggacttccaccaccgcctcctcccccgctgctcgacagcatcccgccacctcccgtgcccggcaacctcctggtgccacctccaccagtcttcaacgctccgcaaggcttgggatggtcgcaggttcctcgtgggcagcccacttttactaagaagaagaagaccatacgcctgttttggaacgaggttagaccatttgactggccttgtaagaacaatagaagatgccgggaattcttgtggtccaagctggaacccatcaaagtcgacacctctaggctggaacatctgtttgaatctaagtccaaagaactgtccgtctccaaaaaaactgctgccgatgggaagaggcaggagataatcgtcctcgatagtaagcgctccaacgcaatcaatattgggcttacagtgttgccccccccaagaactatcaagatcgcaatcttgaacttcgatgaatacgctttaaataaagagggaatcgagaagattttgacgatgattcccactgatgaggaaaagcagaagatccaggaagctcagttggctaaccctgagattcccttaggctcagccgaacagtttctgttaacactgagcagtatcagcgaactctccgcccggctccatctttgggcgttcaagatggattacgagacgaccgaaaaagaggtcgcagaaccgctgctggatttaaaggagggcattgatcagctggagaacaataagactctcgggtttatcctgtctaccctgctggcaatagggaattttctgaatggcaccaacgctaaggcatttgaattgtcgtatctggaaaaggttcctgaggtgaaagacactgtccacaagcagtccctgcttcatcatgtgtgcacgatggtcgtggagaatttcccagatagctctgacctgtattcagagatcggggccatcacaagatccgcaaaggtcgactttgatcagcttcaagacaatctgtgccagatggagaggagatgtaaagcaagctgggatcatctgaaggcaatcgccaaacatgagatgaaaccggtgctaaagcagcgcatgtccgagtttctgaaggactgtgctgagaggatcatcattttgaaaattgtacaccgcagaatcattaatcggtttcatagcttcctcctgttcatgggacaccccccttacgccatccgtgaggtgaatattaataaattctgccgcatcattagtgaattcgctctggagtataggactacccgggagcgggtgctgcaacagaaacagaaaagagcaaatcatcgagaacgcaataaaactcgcgggaagatgatcaccgactccgggaagttcagcggcagctctcctgcaccaccctctcagccgcagggcctgtcttacgccgaggatgcggctgaacacgagaatatgaaggccgtgctaaaaacgtcttcacctagcgttgaagatgccacccccgccctgggggtacggaccaggtcgcgagcgtcccgcggaagtaccagttcttggactatgggcacagacgattccccaaatgtgacagacgatgccgccgacgagatcatggacaggattgtgaagtcggctacccaagtaccctctcagcgggtagtgcctcgcgaacgaaaacgctcacgcgccaacaggaaatcactgagacgcaccttgaaaagcgggttgacccctgaagaagctagagccctgggattggtaggcacctcagagctgcagctgtag

SEQ ID NO: 218010 - DNA, 4320 bp, Artificial Sequence
  derived and/or modified sequence
atggccacgctggcttgtagagtgcagtttcttgatgacaccgacccatttaactctactaatttcccagaaccatccagaccacctctatttacctttagggaggacctcgcattgggcactcaattagcgggagtgcaccgccttctccaggctccccacaagctggacgattgcaccctgcaactcagtcacaacggcgcataccttgatttggaggccaccctggctgagcaacgggatgaattagaaggcttccaggatgatgcgggtcgcggaaaaaagcatagtattatcctgcgcacacagttgtccgtccgcgtccacgcctgcatcgaaaaattgtataatagttccggcagggatttacgacgcgctttattcagcctcaaacaaatttttcaggatgacaaggacctggtacacgagtttgtggtagccgaagggctcacctgcttgatcaaggtgggggcagaggcagaccaaaactatcagaactacatccttcgcgcacttgggcagatcatgctgtacgtggacgggatgaacggcgtcatcaatcggaatgaaacgattcagtggctctacactcttataggatcgaaatttcgcctcgtcgtgaaaactgcactgaagttgcttctggtcttcgtagaatattctgagtccaacgccccattgttgatacaggccgtaaccgccgtggatactaagcggggtgtaaagccatggtcgaatatcatggaaattcttgaggagaaagatggcgtggacacagaactcctggtatatgccatgactctcgtgaataagaccttgtcaggcctccccgaccaagacaccttttatgatgtggtggattgtctcgaggagctgggaatcgcagcagtctcacagcgccatctgaataaaaagggaacagatctcgacttagtcgagcaactgaatatttatgaggtggccctccggcacgaagatggagatgagaccactgaacctcccccatccggctgtcgcgacaggcgcagagcatcagtgtgctcttccgggggtggcgagcaccggggtcttgaccgaaggcgctccagaagacacagcgtccagtccatcaaatcgaccttaagcgcacccaccagtccctgctcccagtctgcgccttcgttcaagcctaaccaggtgagggacctgagggaaaaatactccaacttcggcaataacagttatcattcgtcaagacccagtagcggaagcagcgtgccaactaccccgacctcatcagtgtcacctccacaggaggccagactggagaggtcttctccgagcgggcttctgacaagctcgtttcgccagcatcaggaaagcctcgccgcagagagagagcggcgtcgccaagagcgagaggaaaggctacagcggatcgaaagggaagagaggaacaagttctctagggattaccttgacaagcgcgaggaacagcggcaggccagggaggagaggtacaagtacctagagcagctcgccgctgaagaacacgagaaggagttgagaagtaggagcgtgtccaggggcagggcagacctctctctagacctcacgagccccgcagcgccagcttgcctggcccctttgtctcatagtccatcatcttcagatagccaagaagctttgaccgtgtccgcaagctccccaggcactccacatcatccccaggcctccgcaggagatccagaaccagaatcagaggccgaacctgaggccgaggctggcgcagggcaggtcgcagatgaggcgggacaggacatcgcaagtgcacacgaaggtgccgagaccgaggtggagcaagcgctcgagcaagagccagaggaacgagcctcattatctgaaaaagagaggcagaatgaaggagtaaacgagagagataattgcagtgcaagttctgtctcgagttcgagtagcaccctcgaacgtgaagaaaaagaggataagctgtcccgcgatcggactacgggattgtggccagctggcgtgcaggatgctggtgtcaacggtcagtgcggggatatactcactaacaaacggttcatgctcgacatgctttatgcccacaaccggaagtctccggatgatgaggagaagggggacggagaagccggaaggacccaacaggaggccgaagcagtagcatccctggccacgcgcatatccacgctccaggctaactctcagacacaggacgaaagcgtgcggcgtgtggatgtcgggtgtttagataaccggggtagcgtgaaggcattcgctgagaagttcaattccggagatttgggccgaggatcaattagccccgacgccgaacctaatgataaggtgcctgagactgcccctgtacagcctaagaccgagtcagattacatctgggatcagctcatggcaaaccctcgagagttgcggattcaggatatggattttacagatcttggcgaagaagatgacattgacgtcctggacgtggatctgggccacagagaagcccctggaccccctcctcctccgccaccgacctttctggggctgccaccccctcctccgccaccgttgctggattccatcccaccccctcccgttcctgggaatttgttagtgcccccacccccagtgtttaatgccccacaaggacttggatggagccaggtgccgagaggtcagcccacctttactaaaaaaaaaaagactatcagacttttctggaatgaggtgcgcccatttgactggccatgcaaaaataatcggaggtgccgggaattcctgtggtctaagctggagccaattaaggtcgacacctctaggctggaacacttgttcgagtccaagagcaaagagctcagcgtcagtaaaaagactgcggctgacgggaagcgacaagaaattattgttcttgactccaaacgcagcaacgccattaatatcgggcttacagtgttgccacctccacggaccattaagatcgccattttgaacttcgatgaatacgctctcaacaaggaggggattgagaagatcctcacaatgattccaacagatgaggaaaagcagaaaattcaggaggcccagctcgctaatcccgagatcccactagggagcgccgaacaatttctgctgaccctcagctcaatttctgagctctctgcgaggttacacctgtgggcattcaaaatggattatgaaaccaccgagaaggaggttgctgagcccctcctggacctgaaagaaggaatcgatcagcttgaaaacaacaaaaccttgggtttcatcctcagtactttgctggcaataggcaactttctgaacggcacgaacgcaaaggcctttgagctcagttaccttgagaaggtgccagaagtgaaagataccgtccataaacagagcctgcttcaccacgtttgcacaatggtggtcgagaattttcccgattcttctgacttgtattccgaaatcggcgcaattactagatccgccaaagtggatttcgatcagctccaggacaatctctgccagatggaaaggcgttgcaaggcttcctgggaccatctgaaagcaattgccaaacacgagatgaaaccggtgctgaaacagaggatgagtgagtttctgaaagactgtgccgaacggataatcatacttaagattgtgcatagacggattataaatcgtttccactccttcttactgttcatgggacacccgccttatgccattcgcgaggtgaatataaataaattctgtcgtattatttccgaatttgccctggaatacaggaccacgcgagaacgggtgcttcagcagaagcaaaagagggccaatcaccgcgaacggaacaagactcgaggaaagatgatcaccgactccgggaagttttccgggtcgtctccagccccaccttcacaaccccaagggctaagctacgccgaggatgctgcagagcacgaaaacatgaaagctgtattgaagactagcagcccaagcgtagaggatgccacacccgctttgggagtcagaacaaggtcacgcgcttcccgcggaagcacctctagttggaccatgggtaccgatgattctcccaatgtgacagacgacgcggcagacgagatcatggatagaatagtaaaatcagccacccaggtgcctagtcaacgtgtggtgccgagagagcgaaaacgctctcgtgccaaccggaaatcgctgcgacggaccctcaaaagcggcctcacgccagaggaagcgcgtgcactgggcctggtcggtacctccgaacttcagctttag

SEQ ID NO: 218011 - DNA, 4320 bp, Artificial Sequence
  derived and/or modified sequence
atggccaccctggcctgcagagtgcagttcctggacgacaccgaccccttcaacagcaccaacttccccgagcccagcagaccccccctgttcaccttcagagaggacctggccctgggcacccagctggccggcgtgcacagactgctgcaggccccccacaagctggacgactgcaccctgcagctgagccacaacggcgcctacctggacctggaggccaccctggccgagcagagagacgagctggagggcttccaggacgacgccggcagaggcaagaagcacagcatcatcctgagaacccagctgagcgtgagagtgcacgcctgcatcgagaagctgtacaacagcagcggcagagacctgagaagagccctgttcagcctgaagcagatcttccaggacgacaaggacctggtgcacgagttcgtggtggccgagggcctgacctgcctgatcaaggtgggcgccgaggccgaccagaactaccagaactacatcctgagagccctgggccagatcatgctgtacgtggacggcatgaacggcgtgatcaacagaaacgagaccatccagtggctgtacaccctgatcggcagcaagttcagactggtggtgaagaccgccctgaagctgctgctggtgttcgtggagtacagcgagagcaacgcccccctgctgatccaggccgtgaccgccgtggacaccaagagaggcgtgaagccctggagcaacatcatggagatcctggaggagaaggacggcgtggacaccgagctgctggtgtacgccatgaccctggtgaacaagaccctgagcggcctgcccgaccaggacaccttctacgacgtggtggactgcctggaggagctgggcatcgccgccgtgagccagagacacctgaacaagaagggcaccgacctggacctggtggagcagctgaacatctacgaggtggccctgagacacgaggacggcgacgagaccaccgagcccccccccagcggctgcagagacagaagaagagccagcgtgtgcagcagcggcggcggcgagcacagaggcctggacagaagaagaagcagaagacacagcgtgcagagcatcaagagcaccctgagcgcccccaccagcccctgcagccagagcgcccccagcttcaagcccaaccaggtgagagacctgagagagaagtacagcaacttcggcaacaacagctaccacagcagcagacccagcagcggcagcagcgtgcccaccacccccaccagcagcgtgagccccccccaggaggccagactggagagaagcagccccagcggcctgctgaccagcagcttcagacagcaccaggagagcctggccgccgagagagagagaagaagacaggagagagaggagagactgcagagaatcgagagagaggagagaaacaagttcagcagagactacctggacaagagagaggagcagagacaggccagagaggagagatacaagtacctggagcagctggccgccgaggagcacgagaaggagctgagaagcagaagcgtgagcagaggcagagccgacctgagcctggacctgaccagccccgccgcccccgcctgcctggcccccctgagccacagccccagcagcagcgacagccaggaggccctgaccgtgagcgccagcagccccggcaccccccaccacccccaggccagcgccggcgaccccgagcccgagagcgaggccgagcccgaggccgaggccggcgccggccaggtggccgacgaggccggccaggacatcgccagcgcccacgagggcgccgagaccgaggtggagcaggccctggagcaggagcccgaggagagagccagcctgagcgagaaggagagacagaacgagggcgtgaacgagagagacaactgcagcgccagcagcgtgagcagcagcagcagcaccctggagagagaggagaaggaggacaagctgagcagagacagaaccaccggcctgtggcccgccggcgtgcaggacgccggcgtgaacggccagtgcggcgacatcctgaccaacaagagattcatgctggacatgctgtacgcccacaacagaaagagccccgacgacgaggagaagggcgacggcgaggccggcagaacccagcaggaggccgaggccgtggccagcctggccaccagaatcagcaccctgcaggccaacagccagacccaggacgagagcgtgagaagagtggacgtgggctgcctggacaacagaggcagcgtgaaggccttcgccgagaagttcaacagcggcgacctgggcagaggcagcatcagccccgacgccgagcccaacgacaaggtgcccgagaccgcccccgtgcagcccaagaccgagagcgactacatctgggaccagctgatggccaaccccagagagctgagaatccaggacatggacttcaccgacctgggcgaggaggacgacatcgacgtgctggacgtggacctgggccacagagaggcccccggccccccccccccccccccccccaccttcctgggcctgcccccccccccccccccccccctgctggacagcatcccccccccccccgtgcccggcaacctgctggtgccccccccccccgtgttcaacgccccccagggcctgggctggagccaggtgcccagaggccagcccaccttcaccaagaagaagaagaccatcagactgttctggaacgaggtgagacccttcgactggccctgcaagaacaacagaagatgcagagagttcctgtggagcaagctggagcccatcaaggtggacaccagcagactggagcacctgttcgagagcaagagcaaggagctgagcgtgagcaagaagaccgccgccgacggcaagagacaggagatcatcgtgctggacagcaagagaagcaacgccatcaacatcggcctgaccgtgctgcccccccccagaaccatcaagatcgccatcctgaacttcgacgagtacgccctgaacaaggagggcatcgagaagatcctgaccatgatccccaccgacgaggagaagcagaagatccaggaggcccagctggccaaccccgagatccccctgggcagcgccgagcagttcctgctgaccctgagcagcatcagcgagctgagcgccagactgcacctgtgggccttcaagatggactacgagaccaccgagaaggaggtggccgagcccctgctggacctgaaggagggcatcgaccagctggagaacaacaagaccctgggcttcatcctgagcaccctgctggccatcggcaacttcctgaacggcaccaacgccaaggccttcgagctgagctacctggagaaggtgcccgaggtgaaggacaccgtgcacaagcagagcctgctgcaccacgtgtgcaccatggtggtggagaacttccccgacagcagcgacctgtacagcgagatcggcgccatcaccagaagcgccaaggtggacttcgaccagctgcaggacaacctgtgccagatggagagaagatgcaaggccagctgggaccacctgaaggccatcgccaagcacgagatgaagcccgtgctgaagcagagaatgagcgagttcctgaaggactgcgccgagagaatcatcatcctgaagatcgtgcacagaagaatcatcaacagattccacagcttcctgctgttcatgggccaccccccctacgccatcagagaggtgaacatcaacaagttctgcagaatcatcagcgagttcgccctggagtacagaaccaccagagagagagtgctgcagcagaagcagaagagagccaaccacagagagagaaacaagaccagaggcaagatgatcaccgacagcggcaagttcagcggcagcagccccgccccccccagccagccccagggcctgagctacgccgaggacgccgccgagcacgagaacatgaaggccgtgctgaagaccagcagccccagcgtggaggacgccacccccgccctgggcgtgagaaccagaagcagagccagcagaggcagcaccagcagctggaccatgggcaccgacgacagccccaacgtgaccgacgacgccgccgacgagatcatggacagaatcgtgaagagcgccacccaggtgcccagccagagagtggtgcccagagagagaaagagaagcagagccaacagaaagagcctgagaagaaccctgaagagcggcctgacccccgaggaggccagagccctgggcctggtgggcaccagcgagctgcagctgtag

SEQ ID NO: 218012 - protein, 179 aa, Artificial Sequence
  derived and/or modified sequence
MVVGAFPMAKLLYLGIRQVSKPLANRIKEAARRSEFFKTYICLPPAQLYHWVEMRTKMRIMGFRGTVIKPLNEEAAAELGAELLGEATIFIVGGGCLVLEYWRHQAQQRHKEEEQRAAWNALRDEVGHLALALEALQAQVQAAPPQGALEELRTELQEVRAQLCNPGRSASHAVPASKK

SEQ ID NO: 218013 - protein, 126 aa, Artificial Sequence
  derived and/or modified sequence
MRTKMRIMGFRGTVIKPLNEEAAAELGAELLGEATIFIVGGGCLVLEYWRHQAQQRHKEEEQRAAWNALRDEVGHLALALEALQAQVQAAPPQGALEELRTELQEVRAQLCNPGRSASHAVPASKK

SEQ ID NO: 218014 - DNA, 540 bp, Artificial Sequence
  derived and/or modified sequence
atggtggtgggtgctttcccaatggccaagctgctgtacctgggcattcgccaggtgtccaagcccctggccaaccggatcaaggaggcggcgaggaggtctgagttctttaaaacctatatctgcctgccccctgcacagctctaccactgggtcgagatgaggactaaaatgcggatcatgggctttcggggaacagtgatcaagcctttgaatgaggaagcggccgccgagctgggggctgagctgcttggcgaagccactatattcatagtgggcgggggatgtctagtgctggaatactggcgacaccaggcccagcagagacacaaggaagaggagcagagagccgcttggaatgctttgagggatgaggtcggacacctcgcgttggctttggaagccctgcaggctcaggtacaggcggctcctccccagggcgctttggaagaactcagaaccgagttgcaggaagtgcgggcacagctctgcaacccagggagatcggcatcccatgcagtacccgcctcaaaaaagtag

SEQ ID NO: 218015 - DNA, 540 bp, Artificial Sequence
  derived and/or modified sequence
atggtggtgggcgccttccccatggccaagctgctgtacctgggcatccggcaggtgtccaagcccctggccaaccgcatcaaggaggccgcccggcgctctgagttcttcaagacctacatctgcctgcccccagcccagctgtaccactgggtggagatgaggaccaagatgaggatcatgggcttccggggcaccgtcatcaagcccctgaatgaggaggccgctgctgagctgggcgctgagctgctgggggaggccaccatcttcatcgtgggcggcggctgcctggtgctggagtactggaggcaccaggcccagcagaggcacaaggaggaggagcagagagctgcctggaatgccctgagagatgaggtgggccacctggccctggccctggaggccctgcaggcccaggtgcaggccgccccaccccagggcgccctggaggagctgaggacagagctgcaggaggtgcgggcccagctgtgcaaccctggccgcagcgccagccatgctgtgcctgccagcaagaagtag

SEQ ID NO: 218016 - DNA, 540 bp, Artificial Sequence
  derived and/or modified sequence
atggtggtgggcgccttccccatggccaagctgctgtacctgggcatacgtcaggtgtccaaaccgctcgccaacagaataaaagaagccgcccgcaggtcggaattttttaaaacatatatttgtttaccaccggcacagctctaccactgggttgagatgcggaccaagatgcgcatcatgggttttcggggcacagtcataaaacccctaaacgaggaagccgctgccgaactcggagcagaattgctgggggaggccactatctttatcgtgggcggcgggtgtctagtcctagagtactggagacatcaagcacaacagcggcacaaagaggaagagcagagagcagcttggaacgccctgcgggacgaggtgggccacctagctctggcactggaagcccttcaggctcaggtgcaagcggctccaccacagggagccctggaggaactgagaacagaacttcaagaagtgcgcgctcagctgtgtaaccctggcagaagcgcctctcatgccgtccccgcatccaaaaaatag

SEQ ID NO: 218017 - DNA, 7871 bp, Artificial Sequence
  derived and/or modified sequence
actgacgcacgcatggccacgagagggcgggggaggagtgaagaggttgaggcgccccgcccagtcagcaaggttgcgcgtgccctgtgagaccgccaagatggtggtgggcgcgttccctatggcgaagctgctatacttgggcatccggcaggtcagcaagccgcttgccaaccgtattaaggaggccgcccgccgaagcgagttcttcaagacctatatctgcctcccgccggctcaactgtatcactgggtggagatgcggaccaagatgcgcatcatgggcttccggggcacggtcatcaagccgctgaacgaggaggcggcagctgagctgggcgcagagctgctgggcgaagccaccatcttcatcgtgggcggcggctgcctagtgctggagtactggcgccaccaggcgcagcagcgccacaaggaggaggagcagcgtgctgcctggaacgcgctgcgggacgaggtgggccacctggcgctggcgctggaagcgctgcaggcgcaggtgcaggcggcgccgccacagggcgccctggaggaactgcgcacagagctgcaagaggtgcgcgcccagctctgcaatcccggccggtccgcttcccacgcagtgcctgcgtccaagaaataggagcttgctggatggaacctgaatttggacatggcctatgtacctaacgtggccttcttcccgcaccacccttgcctgcgctggcccagtggaaaccaccaggatcttgatgcaacttggcatttggttacccctgctgataagagcagccgttacctgccactgggaccagcaggtgaagcgttgcaacatagccccctccatcatccttcacctcctatcccccactccaaaccaggacgacctgcaaggtcccagccagcaggacaccgtgggcactctggcaaatgaaaaaatggaacctggtcttgagctgaatcaatgtgttattgttacccccacccccggtttacctgatcagtgttaacctttactgggacactcatctgttacactggaacaccttcttctttttgtcaatcggcacagaccactgtaaggaaatgcagtgtgttgcagtggccttttctccccctcaccttctaaggtcagctctagctgagcatcagtgctctcttaaggaggaaaaaaacggtgcggctgggagcggtggctcacgcctgtaatcctagcaccttgggaggccgaggcgggcggatcacttgaggtcaggagttccagaccagcctggccaacatggtgaaactccgtctctactaaaaatacaaaaattagccgggtgtggtggggtgcgcttgtaatcccagctactcgggaggctgaggcaggagaattgcttgaacccatgaggtggaggttgcggtgagccaagatggcaccattgcaccctagcctgggcaacagagcaagacaccgtcttaaaaccaaaagttaaccgggcgtggtggtgggtgcctgtaatcctagctacttgggaggctgaggcaggagaattgcttgaacttgggaggtggaggccaagattgtaccactgtattccagcccgggtgacagagcaagactgtgtctcaaaaaaaaaaaaaaaatcctggctgggcacggtggctcacacctgcaatcccagcactttggaaggtcgaggtgggcgggtcatttgaagtcgggaggtcgggagatcgggagctcgagaccagcctgaccaatatgatgaaaccccgtctctactaaaaatacataaattagctgggcatggtggcatgcacctgtaatcccagctacttgggaggctgagacaggagaattgcttgaacccgggaggcagaggttgcagtgagccgagattgcgcaattgcatgccagcctgggtaacgagcaaaactccatcttaaaaaaacccacaaaaggtcctggcctgcagtcaatccctggaatcattgtaccttcccttgagacccgaagtggactattccaacagaaccccctcatccttgagtctatggcacaacccactggaatggcactacaggatcttttctgtgaatgtcctccaacccccctttccgtggtgggaaatttgatcctaactagggctaatccagcctgtccttcagcctcagccccctattttcctgtcctcagagtccctggagcttgtactgtgtggcatgtcctttcttgccttccccaccttgctcagtagcatttctcagggacccagtcgaatccaagcccatggattcaattgtcacatccttcatcttccatccgtgtctcctaatctgtgtgctcttgctttctttcctcggagctctggactgacccgacagcctgtcttcatgtagcagtaccctcctgcctccatagcccccggtcccacccccatcctaccaattaggccagcagttggccttaactgcttgattaatttccttggactgccataacagatcaccattgggtggtgaacttgatggcttaagtccaacaggaatttaattcacacagttctggagtccagaagtctgaaaccaaggtgctgacagggacacgctccctcttccagctcctggtgattccaggccttccttggctctgcctgcagcttcacatggccttttccctcttctattttgtctcttacaagaacacctgtcattgcatttagggcccatcttaagttcaggatgatcccacctcaagacccttaattacatctgaaaaaacactttttccaaataaactgtcataagcacaggtcctgggggttagtatgtggacttgtctgttgggggcacaccattcaagccattcagcccactattcctcctcaccccaagagtacgctggcgtccaggtgcagtggctcacacctgtaatcccagcactttgggagaccagggcaggagggatctctttgagcccaggagctgaagaccagcctgggcaacatagtgagaccccatctctacaaaagtaaaataaaaaattagccaggtgcggtgatgcatgcctgtagtcccagctacttgggaggctgaggcaggaggatcacctgagccctggaggtcgaggctgcagcgagccgtgatcgcgccactacactccagcctggatgacagagtgagaccctttctcagaaaaaaagtaccctgggactcctgccaaccccgcgggccatttggccttcctgctagctgagaggaacagtctaggaaccacccttttctactgggtttctcttccaggatctgccactgaagcgggagggggtgggtcccagtagcctgcagtctgtccttccgactgtagctctctcattagaggagctgcaaggtgatgaaggcatcctgaggctgtacctgaaccaccatgtggatctccacaatgggtacagagcttattaaaatcaggagggaaactgggagggttctgatggggagaggcccaagagtcaccctatgagctggggaaactaaggccaggggtaagcaaagggacttgccagagatgccacagccagtgaggggctgactgcccagggtggtgaagtagtaggggcagagtgagaggcttggattaccccagctgcagagtgaggagggagaggcgatggctgagcagaggctgggagggtgacgatctctacacagaggcccagaccatcccagaggtggcgttgatagtgggagaccctctctatcccctctcagagcagccccagatcacaccagagatcatagcattgtgtaaactgggtgaccattccacctgggcccgcttttgggaagctgcaggtgaaagtgggagggccgggctttccccgacttccatcctcacctcccttctctaaagaggtaaaactggcctggaccaagatctgcccagatagaaagccaagaaacaggttctgaaacttttcttttcttcttttctcttcttttttcttttcttttctttcggagacagtctagctccgtcaccctgacggagtgcagtggtgcaatctcggctcactgcaacttctacctcccaggctcaaccaatgatcctgcctcagcttccgaagtagctgggattacatgtgcccaccacccacgcctggctaatttttgtattttagtggagacggggtttctccaagttgcccaggctgatcttgaactcctgacctcaggtaatccgcccgcctcggcctcccaaagtgctgggattacaggcgtgagccaccgcgcctggcctgaaacagcatttcagttccttctggaagagggggagaagctggagcagagggaactgaccgagtgggtcctgagtgggctgtgtttaaaactgggagtgacccaggccagctcacgcctgtcatcccagcactttgagaggccaaggtggactgatcacatgatgttaggagatcgagaccagcctggccaacatggcaaaaccccgtctctactaaaaatacaaaaattagccgggcatgttggcacattcctgaatcccagctactcgggaggctgaggcacgagaattgcttgaacccaggaggtggaggttgcagtgagctgagatcgcgccactgcactccagcctgggtgacagagtgagactcaactcaaaaaaaaaaaacagaggtgggagtgtgaacacaggcaggagctccaattcctgaccccagcgctgtcctgacccagatggagtgctgctctcacatctcagagacttcgcactcagccctgccctgccctgccctgacaggcagccagtcatcgtgggcagcagggccatctacttcccccactgcggcgtcaggggtggccagagtgtgtggaagtggaaagaacgtcctctcaaaatgcaagaggccagaggatggttcactgctcgtgtgttctgctagctagaattctgtgtaccttgtaatttggggagaggggttagaataaatttgtaaatgaagctgattatcttcaagttgatgcattcttttttcatatttaaaaagtccttgggactgggcgcagtggctcacacctgtaatcctagcactttgggaggccagggtgggtggatcacctgaggtcaggagttcaagaccaacctgatcaacatggtgaaacctcgtctctactaaaaatacaaaaattagctgggcatggtggttgtgcacctgtaatcccacctactcgggaggctgaggcaggagaatctcttggacccgggaggcggaggttgcagtgagccgagatcatgccattatactccagcctgggtgacagagcgagacttcatctctaaataaataaataaataaataaataaataaggtccatgtcaaccttaggaaaaatatcctttatttattctttcactcaaaaaactcactgaggtggtcccgcaccgggacatggacccagtgtccttggtagggcgtctcccgcaaaaaaaaaaaaaataaaaaaaataaaacacaaaactcactgagttacccactctctgccccaccctatgctggggtcacagtggtgacagagacagccccagccctgccgtcaccgggtcttacagatgctcacacgtacatttcttttccagtgttccctgccccaccccatagttgtttaggaagcaggggctgggctgaatccggaatcctccctctggagtgactcaggactataaacccattcatcccagctcacaaaaccctgggaggtgccctgagggctgtgcccctcccatctcctggcaggccctgctgtccctcttgttggtttctctgtagggcaggccattgcctggagggaggcaaaatggctgagagccaccccaggagaaaatgggctttacataagccccaacctgatctattggctcacggagctactcctgggctggtcgctgtgttgctgagtggcaggcttgggtcccccagtggcaatggcttgtagctggagtcggtgtggacagagagaggagaagcatggcaactctgagtgtactgaggatcaactgcaccaggctccattctagtagctgggagccagttgggagcaagcagaggccctcactggagctgacattctagtgccagagaccggcaataaagaaggaaagagtggccaggcgtggtggctcacacctgtaatctcagcactttgggaggccgaggcgggccaatcccctgaggtcgggagttcgagaccagcctgaccgacatggagaaaccccatctctactaaaaatacaaaattagcagggcatggtggtgcatgcctgtaatcccagccactcaggaggctgtggcaggagaatcgcttgaacccgggaggcggaggttgcggtgagccaatattgcaccattgcactccagcctgggcaacaagaacgagactccatctcaaaaaaaaaaggaaaaagctaatccagcatagggtgatgaggactgagaggaatggaggcagggtaggagttccggacttacgggcaccgctgatctagacaggtgggcagggaggaggcagcgcttcagatggagggagataggaagagggctgtgagtatctgtgaaagtcctaggacagatgtggccttggcctgttcctggaacagcaagagtttctggctgtcagaatagagcagaggctcgctgaccaaggcctttgggccaaatcaaggggacccttgcttcctgtctttgtaaataaagacttattggaacccaggcgctcattcgtttgcatattttccacagttgcttttgcagtacagtgacagagctgagtatttgcacagagatcctagggctctcgtactctctggccctttacagaaaaagtttaccatcccctggaatagagtaagcgaggggagaagttaggtgagggggccaggcaagcaaaggctgccccttgccttgattggcacaactgtggaggtcatcccagctctggagccccaacaggatcactcaggcctctgcttccaccacatctggcttcagcttccccctctgtggagtcctccctccctccctccttccccataggaaatgaccccagtgctcagcagtaacccccactgcgcgcagatctcagaacctccacctcaatctacagccacgtgccacaataagaagcagagttttaggccaggcgcggtggctcacgcctgtaatctcagtactttggaagaccaaggtgggaggatcacttgaagtcaggagttcgagaccagcctgcccaacatggtgaagccccgtctctaataaaaagaatacaaaaattagccgggtgtggtggtgcacatctgtaatcccagctacatgagaggctgacataggagaattgcttgagcccaggaggtggacgttgcagtgagccaagattgcactactgcattccagcctaggtgccagagtgagacttggtctcaaaacaaaacaaaacaaaaaattagccaggcatggtggcacacacctgtagtcccagctacttggggggctgaggcaggaggatcgcttgaacccgggtgtttaaggctgcagtgaactgagatcaggccacagcacctcaacctgggagacaaagtgagaccctgtctcaaaaaaaaaaaaaagcagagtttatgtaatccatcgtgtgcatatttatacaataatttacaattctatgtattttaaaagtgtataattcatatattatgtgacacaatatataatggaatataaaatatatattttatgtcatgtgtaacataacatcatctattatatgtagtgtatgtgcttatgtacatatcattggaatgaaagtttcattaaataattaccctt

SEQ ID NO: 218018 - DNA, 1146 bp, Artificial Sequence
  derived and/or modified sequence
agccgctgttctgccccgcgggggcatccgctgggtccccgcgccgttgtcaagaccggggacctggacgcagcggagagaggtgccgccgcccgccccgtccagtcgccgcgcgcagtgtatcactgggtggagatgcggaccaagatgcgcatcatgggcttccggggcacggtcatcaagccgctgaacgaggaggcggcagctgagctgggcgcagagctgctgggcgaagccaccatcttcatcgtgggcggcggctgcctagtgctggagtactggcgccaccaggcgcagcagcgccacaaggaggaggagcagcgtgctgcctggaacgcgctgcgggacgaggtgggccacctggcgctggcgctggaagcgctgcaggcgcaggtgcaggcggcgccgccacagggcgccctggaggaactgcgcacagagctgcaagaggtgcgcgcccagctctgcaatcccggccggtccgcttcccacgcagtgcctgcgtccaagaaataggagcttgctggatggaacctgaatttggacatggcctatgtacctaacgtggccttcttcccgcaccacccttgcctgcgctggcccagtggaaaccaccaggatcttgatgcaacttggcatttggttacccctgctgataagagcagccgttacctgccactgggaccagcaggtgaagcgttgcaacatagccccctccatcatccttcacctcctatcccccactccaaaccaggacgacctgcaaggtcccagccagcaggacaccgtgggcactctggcaaatgaaaaaatggaacctggtcttgagctgaatcaatgtgttattgttacccccacccccggtttacctgatcagtgttaacctttactgggacactcatctgttacactggaacaccttcttctttttgtcaatcggcacagaccactgtaaggaaatgcagtgtgttgcagtggccttttctccccctcaccttctaaggtcagctctagctgagcatcagtgctctcttaaggaggaaaaaaacggtgcggctgggagcggtggctcacgcctgtaatcctagcaccttgggaggccgaggcgggcggatcacttgaggtcaggagttccagaccagcctg

SEQ ID NO: 218019 - DNA, 540 bp, Artificial Sequence
  derived and/or modified sequence
atggttgtgggagcattcccgatggctaaacttctctacctggggatcagacaggtctctaagccgctagctaaccggatcaaggaggcagcccgacgatctgaattcttcaaaacttatatttgtctgcctcccgctcagttgtaccattgggtggagatgcggactaagatgaggattatgggcttcagggggaccgttataaaaccattgaacgaagaggctgccgcagaattgggggcagagttgctgggagaggccactatattcatcgttggtggcggatgcctggtgttagaatactggcggcaccaggcccagcagagacacaaggaagaggagcaacgtgccgcatggaacgccctgcgagatgaggtgggacacctggccttggccctcgaagcactgcaggcacaagtgcaggccgcacctcctcagggcgcattggaggaacttcgaactgagctgcaagaggttcgcgctcagctctgtaatcctggcagaagtgcaagccacgcagtcccggcttcaaaaaagtag

SEQ ID NO: 218020 - DNA, 540 bp, Artificial Sequence
  derived and/or modified sequence
atggtggtgggcgccttccccatggccaagctgctgtacctgggcatcagacaggtgagcaagcccctggccaacagaatcaaggaggccgccagaagaagcgagttcttcaagacctacatctgcctgccccccgcccagctgtaccactgggtggagatgagaaccaagatgagaatcatgggcttcagaggcaccgtgatcaagcccctgaacgaggaggccgccgccgagctgggcgccgagctgctgggcgaggccaccatcttcatcgtgggcggcggctgcctggtgctggagtactggagacaccaggcccagcagagacacaaggaggaggagcagagagccgcctggaacgccctgagagacgaggtgggccacctggccctggccctggaggccctgcaggcccaggtgcaggccgcccccccccagggcgccctggaggagctgagaaccgagctgcaggaggtgagagcccagctgtgcaaccccggcagaagcgccagccacgccgtgcccgccagcaagaagtag

SEQ ID NO: 218021 - protein, 2443 aa, Artificial Sequence
  derived and/or modified sequence
MAAEEGVASAASAGGSWGTAAMGRVLPMLLVPVPAEAMGQLGSRAQLRTQPEALGSLTAAGSLQVLSLTPGSRGGGRCCLEGPFWHFLWEDSRNSSTPTEKPKLLALGENYELLIYEFNLKDGRCDATILYSCSREALQKLIDDQDISISLLSLRILSFHNNTSLLFINKCVILHIIFPERDAAIRVLNCFTLPLPAQAVDMIIDTQLCRGILFVLSSLGWIYIFDVVDGTYVAHVDLALHKEDMCNEQQQEPAKISSFTSLKVSQDLDVAVIVSSSNSAVALNLNLYFRQHPGHLLCERILEDLPIQGPKGVDEDDPVNSAYNMKLAKFSFQIDRSWKAQLSSLNETIKNSKLEVSCCAPWFQDILHLESPESGNHSTSVQSWAFIPQDIMHGQYNVLQKDHAKTSDPGRSWKIMHISEQEEPIELKCVSVTGFTALFTWEVERMGYTITLWDLETQGMQCFSLGTKCIPVDSSGDQQLCFVLTENGLSLILFGLTQEEFLNRLMIHGSASTVDTLCHLNGWGRCSIPIHALEAGIENRQLDTVNFFLKSKENLFNPSSKSSVSDQFDHLSSHLYLRNVEELIPALDLLCSAIRESYSEPQSKHFSEQLLNLTLSFLNNQIKELFIHTEELDEHLQKGVNILTSYINELRTFMIKFPWKLTDAIDEYDVHENVPKVKESNIWKKLSFEEVIASAILNNKIPEAQTFFRIDSHSAQKLEELIGIGLNLVFDNLKKNNIKEASELLKNMGFDVKGQLLKICFYTTNKNIRDFLVEILKEKNYFSEKEKRTIDFVHQVEKLYLGHFQENMQIQSFPRYWIKEQDFFKHKSVLDSFLKYDCKDEFNKQDHRIVLNWALWWDQLTQESILLPRISPEEYKSYSPEALWRYLTARHDWLNIILWIGEFQTQHSYASLQQNKWPLLTVDVINQNTSCNNYMRNEILDKLARNGVFLASELEDFECFLLRLSRIGGVIQDTLPVQNYKTKEGWDFHSQFILYCLEHSLQHLLYVYLDCYKLSPENCPFLEKKELHEAHPWFEFLVQCRQVASNLTDPKLIFQASLANAQILIPTNQASVSSMLLEGHTLLALATTMYSPGGVSQVVQNEENENCLKKVDPQLLKMALTPYPKLKTALFPQCTPPSVLPSDITIYHLIQSLSPFDPSRLFGWQSANTLAIGDAWSHLPHFSSPDLVNKYAIVERLNFAYYLHNGRPSFAFGTFLVQELIKSKTPKQLIQQVGNEAYVIGLSSFHIPSIGAACVCFLELLGLDSLKLRVDMKVANIILSYKCRNEDAQYSFIRESVAEKLSKLADGEKTTTEELLVLLEEGTWNSIQQQEIKRLSSESSSQWALVVQFCRLHNMKLSISYLRECAKANDWLQFIIHSQLHNYHPAEVKSLIQYFSPVIQDHLRLAFENLPSVPTSKMDSDQVCNKCPQELQGSKQEMTDLFEILLQCSEEPDSWHWLLVEAVKQQAPILSVLASCLQGASAISCLCVWIITSVEDNVATEAMGHIQDSTEDHTWNLEDLSVIWRTLLTRQKSKTLIRGFQLFFKDSPLLLVMEMYELCMFFRNYKEAEAKLLEFQKSLETLNTAATKVHPVIPAMWLEDQVCFLLKLMLQQCKTQYELGKLLQLFVEREHLFSDGPDVKKLCILCQILKDTSIAINHTIITSYSIENLQHECRSILERLQTDGQFALARRVAELAELPVDNLVIKEITQEMQTLKHIEQWSLKQARIDFWKKCHENFKKNSISSKAASSFFSTQAHVACEHPTGWSSMEERHLLLTLAGHWLAQEDVVPLDKLEELEKQIWLCRITQHTLGRNQEETEPRFSRQISTSGELSFDSLASEFSFSKLAALNTSKYLELNSLPSKETCENRLDWKEQESLNFLIGRLLDDGCVHEASRVCRYFHFYNPDVALVLHCRALASGEASMEDLHPEIHALLQSAELLEEEAPDIPLRRVHSTSSLDSQKFVTVPSSNEVVTNLEVLTSKCLHGKNYCRQVLCLYDLAKELGCSYTDVAAQDGEAMLRKILASQQPDRCKRAQAFISTQGLKPDTVAELVAEEVTRELLTSSQGTGHKQMFNPTEESQTFLQLTTLCQDRTLVGMKLLDKISSVPHGELSCTTELLILAHHCFTLTCHMEGIIRVLQAAHMLTDNHLAPSEEYGLVVRLLTGIGRYNEMTYIFDLLHKKHYFEVLMRKKLDPSGTLKTALLDYIKRCRPGDSEKHNMIALCFSMCREIGENHEAAARIQLKLIESQPWEDSLKDGHQLKQLLLKALTLMLDAAESYAKDSCVRQAQHCQRLTKLITLQIHFLNTGQNTMLINLGRHKLMDCILALPRFYQASIVAEAYDFVPDWAEILYQQVILKGDFNYLEEFKQQRLLKSSIFEEISKKYKQHQPTDMVMENLKKLLTYCEDVYLYYKLAYEHKFYEIVNVLLKDPQTGCCLKDMLAG

SEQ ID NO: 218022 - protein, 2079 aa, Artificial Sequence
  derived and/or modified sequence
MAAEEGVASAASAGGSWGTAAMGRVLPMLLVPVPAEAMGQLGSRAQLRTQPEALGSLTAAGSLQVLSLTPGSRGGGRCCLEGPFWHFLWEDSRNSSTPTEKPKLLALGENYELLIYEFNLKDGRCDATILYSCSREALQKLIDDQDISISLLSLRILSFHNNTSLLFINKCVILHIIFPERDAAIRVLNCFTLPLPAQAVDMIIDTQLCRGILFVLSSLGWIYIFDVVDGTYVAHVDLALHKEDMCNEQQQEPAKISSFTSLKVSQDLDVAVIVSSSNSAVALNLNLYFRQHPGHLLCERILEDLPIQGPKGVDEDDPVNSAYNMKLAKFSFQIDRSWKAQLSSLNETIKNSKLEVSCCAPWFQDILHLESPESGNHSTSVQSWAFIPQDIMHGQYNVLQKDHAKTSDPGRSWKIMHISEQEEPIELKCVSVTGFTALFTWEVERMGYTITLWDLETQGMQCFSLGTKCIPVDSSGDQQLCFVLTENGLSLILFGLTQEEFLNRLMIHGSASTVDTLCHLNGWGRCSIPIHALEAGIENRQLDTVNFFLKSKENLFNPSSKSSVSDQFDHLSSHLYLRNVEELIPALDLLCSAIRESYSEPQSKHFSEQLLNLTLSFLNNQIKELFIHTEELDEHLQKGVNILTSYINELRTFMIKFPWKLTDAIDEYDVHENVPKVKESNIWKKLSFEEVIASAILNNKIPEAQTFFRIDSHSAQKLEELIGIGLNLVFDNLKKNNIKEASELLKNMGFDVKGQLLKICFYTTNKNIRDFLVEILKEKNYFSEKEKRTIDFVHQVEKLYLGHFQENMQIQSFPRYWIKEQDFFKHKSVLDSFLKYDCKDEFNKQDHRIVLNWALWWDQLTQESILLPRISPEEYKSYSPEALWRYLTARHDWLNIILWIGEFQTQHSYASLQQNKWPLLTVDVINQNTSCNNYMRNEILDKLARNGVFLASELEDFECFLLRLSRIGGVIQDTLPVQNYKTKEGWDFHSQFILYCLEHSLQHLLYVYLDCYKLSPENCPFLEKKELHEAHPWFEFLVQCRQVASNLTDPKLIFQASLANAQILIPTNQASVSSMLLEGHTLLALATTMYSPGGVSQVVQNEENENCLKKVDPQLLKMALTPYPKLKTALFPQCTPPSVLPSDITIYHLIQSLSPFDPSRLFGWQSANTLAIGDAWSHLPHFSSPDLVNKYAIVERLNFAYYLHNGRPSFAFGTFLVQELIKSKTPKQLIQQVGNEAYVIGLSSFHIPSIGAACVCFLELLGLDSLKLRVDMKVANIILSYKCRNEDAQYSFIRESVAEKLSKLADGEKTTTEELLVLLEEGTWNSIQQQEIKRLSSESSSQWALVVQFCRLHNMKLSISYLRECAKANDWLQFIIHSQLHNYHPAEVKSLIQYFSPVIQDHLRLAFENLPSVPTSKMDSDQVCNKCPQELQGSKQEMTDLFEILLQCSEEPDSWHWLLVEAVKQQAPILSVLASCLQGASAISCLCVWIITSVEDNVATEAMGHIQDSTEDHTWNLEDLSVIWRTLLTRQKSKTLIRGFQLFFKDSPLLLVMEMYELCMFFRNYKEAEAKLLEFQKSLETLNTAATKVHPVIPAMWLEDQVCFLLKLMLQQCKTQYELGKLLQLFVEREHLFSDGPDVKKLCILCQILKDTSIAINHTIITSYSIENLQHECRSILERLQTDGQFALARRVAELAELPVDNLVIKEITQEMQTLKHIEQWSLKQARIDFWKKCHENFKKNSISSKAASSFFSTQAHVACEHPTGWSSMEERHLLLTLAGHWLAQEDVVPLDKLEELEKQIWLCRITQHTLGRNQEETEPRFSRQISTSGELSFDSLASEFSFSKLAALNTSKYLELNSLPSKETCENRLDWKEQESLNFLIGRLLDDGCVHEASRVCRYFHFYNPDVALVLHCRALASGEASMEDLHPEIHALLQSAELLEEEAPDIPLRRVHSTSSLDSQKFVTVPSSNEVVTNLEVLTSKCLHGKNYCRQVLCLYDLAKELGCSYTDVAAQDGEAMLRKILASQQPDRCKRAQAFISTQGLKPDTVAELVAEEVTRELLTSSQGTGALPPGDSQPL

SEQ ID NO: 218023 - DNA, 7332 bp, Artificial Sequence
  derived and/or modified sequence
atggccgccgaggagggcgtggccagcgccgccagcgccggcggcagctggggcaccgccgccatgggcagagtgctgcccatgctgctggtgcccgtgcccgccgaggccatgggccagctgggcagcagagcccagctgagaacccagcccgaggccctgggcagcctgaccgccgccggcagcctgcaggtgctgagcctgacccccggcagcagaggcggcggcagatgctgcctggagggccccttctggcacttcctgtgggaggacagcagaaacagcagcacccccaccgagaagcccaagctgctggccctgggcgagaactacgagctgctgatctacgagttcaacctgaaggacggcagatgcgacgccaccatcctgtacagctgcagcagagaggccctgcagaagctgatcgacgaccaggacatcagcatcagcctgctgagcctgagaatcctgagcttccacaacaacaccagcctgctgttcatcaacaagtgcgtgatcctgcacatcatcttccccgagagagacgccgccatcagagtgctgaactgcttcaccctgcccctgcccgcccaggccgtggacatgatcatcgacacccagctgtgcagaggcatcctgttcgtgctgagcagcctgggctggatctacatcttcgacgtggtggacggcacctacgtggcccacgtggacctggccctgcacaaggaggacatgtgcaacgagcagcagcaggagcccgccaagatcagcagcttcaccagcctgaaggtgagccaggacctggacgtggccgtgatcgtgagcagcagcaacagcgccgtggccctgaacctgaacctgtacttcagacagcaccccggccacctgctgtgcgagagaatcctggaggacctgcccatccagggccccaagggcgtggacgaggacgaccccgtgaacagcgcctacaacatgaagctggccaagttcagcttccagatcgacagaagctggaaggcccagctgagcagcctgaacgagaccatcaagaacagcaagctggaggtgagctgctgcgccccctggttccaggacatcctgcacctggagagccccgagagcggcaaccacagcaccagcgtgcagagctgggccttcatcccccaggacatcatgcacggccagtacaacgtgctgcagaaggaccacgccaagaccagcgaccccggcagaagctggaagatcatgcacatcagcgagcaggaggagcccatcgagctgaagtgcgtgagcgtgaccggcttcaccgccctgttcacctgggaggtggagagaatgggctacaccatcaccctgtgggacctggagacccagggcatgcagtgcttcagcctgggcaccaagtgcatccccgtggacagcagcggcgaccagcagctgtgcttcgtgctgaccgagaacggcctgagcctgatcctgttcggcctgacccaggaggagttcctgaacagactgatgatccacggcagcgccagcaccgtggacaccctgtgccacctgaacggctggggcagatgcagcatccccatccacgccctggaggccggcatcgagaacagacagctggacaccgtgaacttcttcctgaagagcaaggagaacctgttcaaccccagcagcaagagcagcgtgagcgaccagttcgaccacctgagcagccacctgtacctgagaaacgtggaggagctgatccccgccctggacctgctgtgcagcgccatcagagagagctacagcgagccccagagcaagcacttcagcgagcagctgctgaacctgaccctgagcttcctgaacaaccagatcaaggagctgttcatccacaccgaggagctggacgagcacctgcagaagggcgtgaacatcctgaccagctacatcaacgagctgagaaccttcatgatcaagttcccctggaagctgaccgacgccatcgacgagtacgacgtgcacgagaacgtgcccaaggtgaaggagagcaacatctggaagaagctgagcttcgaggaggtgatcgccagcgccatcctgaacaacaagatccccgaggcccagaccttcttcagaatcgacagccacagcgcccagaagctggaggagctgatcggcatcggcctgaacctggtgttcgacaacctgaagaagaacaacatcaaggaggccagcgagctgctgaagaacatgggcttcgacgtgaagggccagctgctgaagatctgcttctacaccaccaacaagaacatcagagacttcctggtggagatcctgaaggagaagaactacttcagcgagaaggagaagagaaccatcgacttcgtgcaccaggtggagaagctgtacctgggccacttccaggagaacatgcagatccagagcttccccagatactggatcaaggagcaggacttcttcaagcacaagagcgtgctggacagcttcctgaagtacgactgcaaggacgagttcaacaagcaggaccacagaatcgtgctgaactgggccctgtggtgggaccagctgacccaggagagcatcctgctgcccagaatcagccccgaggagtacaagagctacagccccgaggccctgtggagatacctgaccgccagacacgactggctgaacatcatcctgtggatcggcgagttccagacccagcacagctacgccagcctgcagcagaacaagtggcccctgctgaccgtggacgtgatcaaccagaacaccagctgcaacaactacatgagaaacgagatcctggacaagctggccagaaacggcgtgttcctggccagcgagctggaggacttcgagtgcttcctgctgagactgagcagaatcggcggcgtgatccaggacaccctgcccgtgcagaactacaagaccaaggagggctgggacttccacagccagttcatcctgtactgcctggagcacagcctgcagcacctgctgtacgtgtacctggactgctacaagctgagccccgagaactgccccttcctggagaagaaggagctgcacgaggcccacccctggttcgagttcctggtgcagtgcagacaggtggccagcaacctgaccgaccccaagctgatcttccaggccagcctggccaacgcccagatcctgatccccaccaaccaggccagcgtgagcagcatgctgctggagggccacaccctgctggccctggccaccaccatgtacagccccggcggcgtgagccaggtggtgcagaacgaggagaacgagaactgcctgaagaaggtggacccccagctgctgaagatggccctgaccccctaccccaagctgaagaccgccctgttcccccagtgcaccccccccagcgtgctgcccagcgacatcaccatctaccacctgatccagagcctgagccccttcgaccccagcagactgttcggctggcagagcgccaacaccctggccatcggcgacgcctggagccacctgccccacttcagcagccccgacctggtgaacaagtacgccatcgtggagagactgaacttcgcctactacctgcacaacggcagacccagcttcgccttcggcaccttcctggtgcaggagctgatcaagagcaagacccccaagcagctgatccagcaggtgggcaacgaggcctacgtgatcggcctgagcagcttccacatccccagcatcggcgccgcctgcgtgtgcttcctggagctgctgggcctggacagcctgaagctgagagtggacatgaaggtggccaacatcatcctgagctacaagtgcagaaacgaggacgcccagtacagcttcatcagagagagcgtggccgagaagctgagcaagctggccgacggcgagaagaccaccaccgaggagctgctggtgctgctggaggagggcacctggaacagcatccagcagcaggagatcaagagactgagcagcgagagcagcagccagtgggccctggtggtgcagttctgcagactgcacaacatgaagctgagcatcagctacctgagagagtgcgccaaggccaacgactggctgcagttcatcatccacagccagctgcacaactaccaccccgccgaggtgaagagcctgatccagtacttcagccccgtgatccaggaccacctgagactggccttcgagaacctgcccagcgtgcccaccagcaagatggacagcgaccaggtgtgcaacaagtgcccccaggagctgcagggcagcaagcaggagatgaccgacctgttcgagatcctgctgcagtgcagcgaggagcccgacagctggcactggctgctggtggaggccgtgaagcagcaggcccccatcctgagcgtgctggccagctgcctgcagggcgccagcgccatcagctgcctgtgcgtgtggatcatcaccagcgtggaggacaacgtggccaccgaggccatgggccacatccaggacagcaccgaggaccacacctggaacctggaggacctgagcgtgatctggagaaccctgctgaccagacagaagagcaagaccctgatcagaggcttccagctgttcttcaaggacagccccctgctgctggtgatggagatgtacgagctgtgcatgttcttcagaaactacaaggaggccgaggccaagctgctggagttccagaagagcctggagaccctgaacaccgccgccaccaaggtgcaccccgtgatccccgccatgtggctggaggaccaggtgtgcttcctgctgaagctgatgctgcagcagtgcaagacccagtacgagctgggcaagctgctgcagctgttcgtggagagagagcacctgttcagcgacggccccgacgtgaagaagctgtgcatcctgtgccagatcctgaaggacaccagcatcgccatcaaccacaccatcatcaccagctacagcatcgagaacctgcagcacgagtgcagaagcatcctggagagactgcagaccgacggccagttcgccctggccagaagagtggccgagctggccgagctgcccgtggacaacctggtgatcaaggagatcacccaggagatgcagaccctgaagcacatcgagcagtggagcctgaagcaggccagaatcgacttctggaagaagtgccacgagaacttcaagaagaacagcatcagcagcaaggccgccagcagcttcttcagcacccaggcccacgtggcctgcgagcaccccaccggctggagcagcatggaggagagacacctgctgctgaccctggccggccactggctggcccaggaggacgtggtgcccctggacaagctggaggagctggagaagcagatctggctgtgcagaatcacccagcacaccctgggcagaaaccaggaggagaccgagcccagattcagcagacagatcagcaccagcggcgagctgagcttcgacagcctggccagcgagttcagcttcagcaagctggccgccctgaacaccagcaagtacctggagctgaacagcctgcccagcaaggagacctgcgagaacagactggactggaaggagcaggagagcctgaacttcctgatcggcagactgctggacgacggctgcgtgcacgaggccagcagagtgtgcagatacttccacttctacaaccccgacgtggccctggtgctgcactgcagagccctggccagcggcgaggccagcatggaggacctgcaccccgagatccacgccctgctgcagagcgccgagctgctggaggaggaggcccccgacatccccctgagaagagtgcacagcaccagcagcctggacagccagaagttcgtgaccgtgcccagcagcaacgaggtggtgaccaacctggaggtgctgaccagcaagtgcctgcacggcaagaactactgcagacaggtgctgtgcctgtacgacctggccaaggagctgggctgcagctacaccgacgtggccgcccaggacggcgaggccatgctgagaaagatcctggccagccagcagcccgacagatgcaagagagcccaggccttcatcagcacccagggcctgaagcccgacaccgtggccgagctggtggccgaggaggtgaccagagagctgctgaccagcagccagggcaccggccacaagcagatgttcaaccccaccgaggagagccagaccttcctgcagctgaccaccctgtgccaggacagaaccctggtgggcatgaagctgctggacaagatcagcagcgtgccccacggcgagctgagctgcaccaccgagctgctgatcctggcccaccactgcttcaccctgacctgccacatggagggcatcatcagagtgctgcaggccgcccacatgctgaccgacaaccacctggcccccagcgaggagtacggcctggtggtgagactgctgaccggcatcggcagatacaacgagatgacctacatcttcgacctgctgcacaagaagcactacttcgaggtgctgatgagaaagaagctggaccccagcggcaccctgaagaccgccctgctggactacatcaagagatgcagacccggcgacagcgagaagcacaacatgatcgccctgtgcttcagcatgtgcagagagatcggcgagaaccacgaggccgccgccagaatccagctgaagctgatcgagagccagccctgggaggacagcctgaaggacggccaccagctgaagcagctgctgctgaaggccctgaccctgatgctggacgccgccgagagctacgccaaggacagctgcgtgagacaggcccagcactgccagagactgaccaagctgatcaccctgcagatccacttcctgaacaccggccagaacaccatgctgatcaacctgggcagacacaagctgatggactgcatcctggccctgcccagattctaccaggccagcatcgtggccgaggcctacgacttcgtgcccgactgggccgagatcctgtaccagcaggtgatcctgaagggcgacttcaactacctggaggagttcaagcagcagagactgctgaagagcagcatcttcgaggagatcagcaagaagtacaagcagcaccagcccaccgacatggtgatggagaacctgaagaagctgctgacctactgcgaggacgtgtacctgtactacaagctggcctacgagcacaagttctacgagatcgtgaacgtgctgctgaaggacccccagaccggctgctgcctgaaggacatgctggccggctag

SEQ ID NO: 218024 - DNA, 6240 bp, Artificial Sequence
  derived and/or modified sequence
atggccgccgaggagggcgtggccagcgccgccagcgccggcggcagctggggcaccgccgccatgggcagagtgctgcccatgctgctggtgcccgtgcccgccgaggccatgggccagctgggcagcagagcccagctgagaacccagcccgaggccctgggcagcctgaccgccgccggcagcctgcaggtgctgagcctgacccccggcagcagaggcggcggcagatgctgcctggagggccccttctggcacttcctgtgggaggacagcagaaacagcagcacccccaccgagaagcccaagctgctggccctgggcgagaactacgagctgctgatctacgagttcaacctgaaggacggcagatgcgacgccaccatcctgtacagctgcagcagagaggccctgcagaagctgatcgacgaccaggacatcagcatcagcctgctgagcctgagaatcctgagcttccacaacaacaccagcctgctgttcatcaacaagtgcgtgatcctgcacatcatcttccccgagagagacgccgccatcagagtgctgaactgcttcaccctgcccctgcccgcccaggccgtggacatgatcatcgacacccagctgtgcagaggcatcctgttcgtgctgagcagcctgggctggatctacatcttcgacgtggtggacggcacctacgtggcccacgtggacctggccctgcacaaggaggacatgtgcaacgagcagcagcaggagcccgccaagatcagcagcttcaccagcctgaaggtgagccaggacctggacgtggccgtgatcgtgagcagcagcaacagcgccgtggccctgaacctgaacctgtacttcagacagcaccccggccacctgctgtgcgagagaatcctggaggacctgcccatccagggccccaagggcgtggacgaggacgaccccgtgaacagcgcctacaacatgaagctggccaagttcagcttccagatcgacagaagctggaaggcccagctgagcagcctgaacgagaccatcaagaacagcaagctggaggtgagctgctgcgccccctggttccaggacatcctgcacctggagagccccgagagcggcaaccacagcaccagcgtgcagagctgggccttcatcccccaggacatcatgcacggccagtacaacgtgctgcagaaggaccacgccaagaccagcgaccccggcagaagctggaagatcatgcacatcagcgagcaggaggagcccatcgagctgaagtgcgtgagcgtgaccggcttcaccgccctgttcacctgggaggtggagagaatgggctacaccatcaccctgtgggacctggagacccagggcatgcagtgcttcagcctgggcaccaagtgcatccccgtggacagcagcggcgaccagcagctgtgcttcgtgctgaccgagaacggcctgagcctgatcctgttcggcctgacccaggaggagttcctgaacagactgatgatccacggcagcgccagcaccgtggacaccctgtgccacctgaacggctggggcagatgcagcatccccatccacgccctggaggccggcatcgagaacagacagctggacaccgtgaacttcttcctgaagagcaaggagaacctgttcaaccccagcagcaagagcagcgtgagcgaccagttcgaccacctgagcagccacctgtacctgagaaacgtggaggagctgatccccgccctggacctgctgtgcagcgccatcagagagagctacagcgagccccagagcaagcacttcagcgagcagctgctgaacctgaccctgagcttcctgaacaaccagatcaaggagctgttcatccacaccgaggagctggacgagcacctgcagaagggcgtgaacatcctgaccagctacatcaacgagctgagaaccttcatgatcaagttcccctggaagctgaccgacgccatcgacgagtacgacgtgcacgagaacgtgcccaaggtgaaggagagcaacatctggaagaagctgagcttcgaggaggtgatcgccagcgccatcctgaacaacaagatccccgaggcccagaccttcttcagaatcgacagccacagcgcccagaagctggaggagctgatcggcatcggcctgaacctggtgttcgacaacctgaagaagaacaacatcaaggaggccagcgagctgctgaagaacatgggcttcgacgtgaagggccagctgctgaagatctgcttctacaccaccaacaagaacatcagagacttcctggtggagatcctgaaggagaagaactacttcagcgagaaggagaagagaaccatcgacttcgtgcaccaggtggagaagctgtacctgggccacttccaggagaacatgcagatccagagcttccccagatactggatcaaggagcaggacttcttcaagcacaagagcgtgctggacagcttcctgaagtacgactgcaaggacgagttcaacaagcaggaccacagaatcgtgctgaactgggccctgtggtgggaccagctgacccaggagagcatcctgctgcccagaatcagccccgaggagtacaagagctacagccccgaggccctgtggagatacctgaccgccagacacgactggctgaacatcatcctgtggatcggcgagttccagacccagcacagctacgccagcctgcagcagaacaagtggcccctgctgaccgtggacgtgatcaaccagaacaccagctgcaacaactacatgagaaacgagatcctggacaagctggccagaaacggcgtgttcctggccagcgagctggaggacttcgagtgcttcctgctgagactgagcagaatcggcggcgtgatccaggacaccctgcccgtgcagaactacaagaccaaggagggctgggacttccacagccagttcatcctgtactgcctggagcacagcctgcagcacctgctgtacgtgtacctggactgctacaagctgagccccgagaactgccccttcctggagaagaaggagctgcacgaggcccacccctggttcgagttcctggtgcagtgcagacaggtggccagcaacctgaccgaccccaagctgatcttccaggccagcctggccaacgcccagatcctgatccccaccaaccaggccagcgtgagcagcatgctgctggagggccacaccctgctggccctggccaccaccatgtacagccccggcggcgtgagccaggtggtgcagaacgaggagaacgagaactgcctgaagaaggtggacccccagctgctgaagatggccctgaccccctaccccaagctgaagaccgccctgttcccccagtgcaccccccccagcgtgctgcccagcgacatcaccatctaccacctgatccagagcctgagccccttcgaccccagcagactgttcggctggcagagcgccaacaccctggccatcggcgacgcctggagccacctgccccacttcagcagccccgacctggtgaacaagtacgccatcgtggagagactgaacttcgcctactacctgcacaacggcagacccagcttcgccttcggcaccttcctggtgcaggagctgatcaagagcaagacccccaagcagctgatccagcaggtgggcaacgaggcctacgtgatcggcctgagcagcttccacatccccagcatcggcgccgcctgcgtgtgcttcctggagctgctgggcctggacagcctgaagctgagagtggacatgaaggtggccaacatcatcctgagctacaagtgcagaaacgaggacgcccagtacagcttcatcagagagagcgtggccgagaagctgagcaagctggccgacggcgagaagaccaccaccgaggagctgctggtgctgctggaggagggcacctggaacagcatccagcagcaggagatcaagagactgagcagcgagagcagcagccagtgggccctggtggtgcagttctgcagactgcacaacatgaagctgagcatcagctacctgagagagtgcgccaaggccaacgactggctgcagttcatcatccacagccagctgcacaactaccaccccgccgaggtgaagagcctgatccagtacttcagccccgtgatccaggaccacctgagactggccttcgagaacctgcccagcgtgcccaccagcaagatggacagcgaccaggtgtgcaacaagtgcccccaggagctgcagggcagcaagcaggagatgaccgacctgttcgagatcctgctgcagtgcagcgaggagcccgacagctggcactggctgctggtggaggccgtgaagcagcaggcccccatcctgagcgtgctggccagctgcctgcagggcgccagcgccatcagctgcctgtgcgtgtggatcatcaccagcgtggaggacaacgtggccaccgaggccatgggccacatccaggacagcaccgaggaccacacctggaacctggaggacctgagcgtgatctggagaaccctgctgaccagacagaagagcaagaccctgatcagaggcttccagctgttcttcaaggacagccccctgctgctggtgatggagatgtacgagctgtgcatgttcttcagaaactacaaggaggccgaggccaagctgctggagttccagaagagcctggagaccctgaacaccgccgccaccaaggtgcaccccgtgatccccgccatgtggctggaggaccaggtgtgcttcctgctgaagctgatgctgcagcagtgcaagacccagtacgagctgggcaagctgctgcagctgttcgtggagagagagcacctgttcagcgacggccccgacgtgaagaagctgtgcatcctgtgccagatcctgaaggacaccagcatcgccatcaaccacaccatcatcaccagctacagcatcgagaacctgcagcacgagtgcagaagcatcctggagagactgcagaccgacggccagttcgccctggccagaagagtggccgagctggccgagctgcccgtggacaacctggtgatcaaggagatcacccaggagatgcagaccctgaagcacatcgagcagtggagcctgaagcaggccagaatcgacttctggaagaagtgccacgagaacttcaagaagaacagcatcagcagcaaggccgccagcagcttcttcagcacccaggcccacgtggcctgcgagcaccccaccggctggagcagcatggaggagagacacctgctgctgaccctggccggccactggctggcccaggaggacgtggtgcccctggacaagctggaggagctggagaagcagatctggctgtgcagaatcacccagcacaccctgggcagaaaccaggaggagaccgagcccagattcagcagacagatcagcaccagcggcgagctgagcttcgacagcctggccagcgagttcagcttcagcaagctggccgccctgaacaccagcaagtacctggagctgaacagcctgcccagcaaggagacctgcgagaacagactggactggaaggagcaggagagcctgaacttcctgatcggcagactgctggacgacggctgcgtgcacgaggccagcagagtgtgcagatacttccacttctacaaccccgacgtggccctggtgctgcactgcagagccctggccagcggcgaggccagcatggaggacctgcaccccgagatccacgccctgctgcagagcgccgagctgctggaggaggaggcccccgacatccccctgagaagagtgcacagcaccagcagcctggacagccagaagttcgtgaccgtgcccagcagcaacgaggtggtgaccaacctggaggtgctgaccagcaagtgcctgcacggcaagaactactgcagacaggtgctgtgcctgtacgacctggccaaggagctgggctgcagctacaccgacgtggccgcccaggacggcgaggccatgctgagaaagatcctggccagccagcagcccgacagatgcaagagagcccaggccttcatcagcacccagggcctgaagcccgacaccgtggccgagctggtggccgaggaggtgaccagagagctgctgaccagcagccagggcaccggcgccctgccccccggcgacagccagcccctgtag

SEQ ID NO: 218025 - DNA, 7332 bp, Artificial Sequence
  derived and/or modified sequence
atggcagcagaggagggggtggcttcagctgccagcgccggtgggagctggggaaccgccgccatgggccgcgtgcttccaatgctccttgttcctgtgcctgctgaagccatggggcagctaggctcccgcgcgcaattgagaactcagcctgaagccttaggatccctcacggccgccgggagtctccaggtattgtctctgaccccaggcagccggggaggaggcaggtgttgcttagaaggccctttctggcactttctgtgggaggattctcgaaacagctcaacaccaaccgagaaacctaaactgctggcccttggagaaaactacgaactgcttatatatgagtttaatctcaaagacggaagatgcgatgcaaccatcttatactcctgctctagagaagcactccagaagttgatcgatgatcaggatatctccatttcactgctttcccttagaatcctaagcttccacaacaacacatcactcctcttcattaacaagtgtgtgattctccacattatcttccccgaacgtgatgctgccatcagagtgctgaactgcttcaccctgcccctgcctgcacaagcagtcgacatgataatcgacactcagctgtgccgggggatactgtttgtactatcttcccttgggtggatctatatattcgacgtggttgacggcacatacgtcgctcacgtagatttagctttacacaaggaagacatgtgtaatgaacagcagcaggaacctgccaaaatctcaagctttacttccctgaaagttagccaagacctggatgtagccgtaattgtttcaagcagtaacagcgccgttgcactgaacttaaatttgtatttcagacaacaccccggacacctcctctgtgaacgaatcctggaagaccttccaatacagggtcctaagggggttgatgaggacgacccggtgaactcggcctataacatgaagctagccaagttttcatttcagattgatcgatcatggaaagcccagctcagttcactgaacgagaccattaaaaactccaagctggaagtttcgtgttgcgctccttggtttcaagacatcctgcaccttgagtcacctgagtccggcaaccactccacttctgtgcaatcttgggcattcataccacaagatattatgcacggacagtataatgtcttgcagaaggaccacgccaaaacttccgaccctggtcggtcatggaaaattatgcatatttccgaacaggaagagccgattgagttaaaatgcgttagtgttacaggcttcacggctttgttcacttgggaggtggagcgaatgggctacaccatcacactctgggacctcgagacccagggcatgcagtgtttcagccttgggaccaagtgtatccccgtagattctagtggtgaccagcagctttgctttgtattaacggaaaatggtctaagcttaattcttttcggactcacgcaagaagaattcctcaaccgcttgatgattcacgggtctgcctcaacagtggataccctgtgccatctcaacggatggggacgatgtagtatccccattcacgccctggaggcaggtattgagaatcgacagttagatacggtaaacttcttcttaaagtctaaggaaaatctgtttaaccccagcagcaagtcatccgtttctgatcaattcgaccacctatcctcccatctgtacctgagaaacgtggaggagctgattcccgcactcgacctgctgtgcagtgctatcagagagtcctacagcgagccccagtctaaacacttttctgagcaattattaaatcttacactgtcattcctgaataatcagatcaaggagctgtttatccacaccgaggaactggatgagcacctgcagaagggggtcaatattctcacctcttatatcaacgagctgcgaactttcatgattaagttcccttggaagctgacagatgctatcgacgagtatgatgtgcacgaaaatgtacccaaggtgaaagaaagcaacatctggaagaagctctcgttcgaagaagtcattgctagtgccatcttaaacaacaaaattcctgaggcccaaacattcttcaggattgattcgcactcggcccagaaacttgaagagctaataggcatcgggttaaaccttgtgtttgacaacctgaaaaagaataacattaaagaagcatctgagctcctcaaaaacatgggattcgacgtgaaagggcaactgttaaagatttgtttttatactactaataaaaacattagggacttcctcgttgagatcctgaaagagaaaaactattttagtgagaaagagaagcgaaccatagactttgttcaccaggtagagaaactctacctcgggcattttcaggaaaacatgcagatacaaagcttcccaaggtactggatcaaggagcaagacttctttaaacacaagtcagtcctggatagctttttgaagtacgactgtaaggacgagttcaataagcaggaccaccgcatcgtgttgaactgggcactgtggtgggatcagctgacacaggaaagcattttgctccccaggatctcccctgaagagtataaaagttacagcccagaagcgctatggcgttatctcaccgctcgccacgattggttgaatatcatactgtggatcggagaatttcaaacacaacatagttacgcctctctgcagcagaacaagtggcctcttctgactgttgatgtaatcaatcagaatacctcgtgtaataactatatgcgcaacgaaatattagataagttagctcgaaacggtgtgttcctggcctccgagctggaggacttcgagtgcttcctgctccggctgtcaaggatcggaggtgtcattcaggatactctgcctgtgcaaaactataagactaaagaaggatgggattttcatagccagtttattctgtactgcctcgagcactccttacagcacctactgtacgtgtacctcgactgttacaagttatccccagaaaattgtccattcctggagaaaaaagaactgcatgaagcacacccttggttcgaattcctcgtacaatgccgacaggtggccagtaacttaacagatccaaagttaatatttcaggcctccttggcaaacgcacagatcctcattcctactaatcaggccagtgtgagttcaatgctgctcgaaggtcacacactgcttgcattggcaacaacaatgtatagcccaggcggcgtttcacaggtggttcagaatgaagagaatgagaactgcttgaaaaaagtagatcctcagctcctgaaaatggcacttactccatatcccaagctcaaaaccgcactattcccgcagtgtacacccccttcagtgctgcccagtgacattactatctatcacctcatccagtcactcagtcctttcgaccccagtaggctgttcggatggcagtccgcaaacaccttggcgattggggatgcgtggagtcaccttccacatttctcctcaccagacctggtgaataaatacgcgatcgtggagcgactgaatttcgcatactacttacataatggtcgaccttctttcgccttcggaacgttcctggtgcaggaactgatcaagtctaagacccctaagcaactcatccagcaggtgggcaatgaagcttatgtcatcggcctgtcctccttccacattcccagcataggggcagcatgcgtgtgttttctcgagcttctggggcttgattcactgaagctacgtgtagatatgaaggtggcaaacatcattctcagctataagtgtaggaatgaggacgcccagtacagcttcatcagagaaagtgtcgcagagaagctgtccaagctcgccgatggggaaaaaaccacaactgaggaactgctggtccttctcgaggagggtacatggaacagcatacagcagcaggaaattaaacggctgtcatcggaatccagttcccagtgggccctggtcgttcaattttgcagattgcacaatatgaagttgagcattagttacctccgggaatgcgcgaaagcgaacgattggcttcagtttatcatccactcacagttacacaattaccacccagcagaagttaaaagcctgattcagtacttttcaccagtgatacaagatcacctcagattggccttcgagaatctgccctccgtgccaaccagcaagatggacagtgatcaagtgtgcaataaatgtcctcaggagcttcaggggtccaaacaagaaatgaccgatctgttcgagatcctgttacagtgctctgaagaacccgacagctggcactggttgcttgtcgaggccgtcaagcagcaggcccccattctgtctgtgctcgcctcttgtctgcaaggcgcttctgccatatcatgtctgtgtgtttggattatcaccagtgtggaggacaatgtggccaccgaggccatggggcacatacaggatagtaccgaagaccacacttggaacctcgaggacctgagtgttatctggagaaccctgttgacccggcaaaaatcgaaaacacttattcgaggcttccagctttttttcaaggactcgcccttattgctggtcatggagatgtacgagctgtgcatgtttttcagaaattataaggaggccgaggctaaactcttggaatttcagaaaagtctggagactttgaacacggctgccaccaaggttcatcccgtgatccctgccatgtggctcgaagatcaggtttgcttcttattaaagcttatgttacagcaatgcaagacacagtacgaactagggaagctcctgcagctgttcgtagaaagggagcaccttttcagcgatggtcctgacgtcaaaaagctttgcattttatgtcagatactgaaagataccagtattgcaattaatcacactatcattacgtcatacagcatagaaaacctccagcacgagtgtagatctattttggagcggcttcagaccgatggacagtttgccctggcgcgaagggtcgctgaactggctgaattacccgtggacaacctagtgattaaagagattacccaggagatgcagacgctcaaacatatagagcaatggtctctgaagcaggcacgtattgacttttggaagaaatgtcatgagaacttcaaaaagaatagtattagtagcaaggccgccagttctttctttagcactcaagcccacgttgcttgtgagcatccaacaggctggtcttcaatggaagagcgtcacctgctcttgacgctggctgggcattggcttgcccaagaggacgtcgtccccttagataagctggaggaactagaaaagcaaatctggttgtgtaggatcactcaacacacactggggcggaatcaggaggagaccgaaccccgctttagtcgtcagatttctacttctggcgaactgtccttcgattcattagccagcgaatttagcttctccaaactcgcggccctcaatacctccaagtatctcgagcttaacagcctgccatctaaggaaacttgcgagaacaggctggactggaaagagcaagaatccttaaattttttgattggtcgcctcttggatgatggttgcgtgcatgaggcctcgcgagtgtgccggtactttcatttttataatcccgacgtggctctcgtgttacactgccgggctctggcatcaggcgaggccagcatggaagacctgcatccagaaattcatgccctcttacaatccgctgagctgttagaagaagaggcccctgacatacctctacgtagggttcatagtaccagctcccttgatagtcagaagttcgttaccgtccctagctccaacgaggtggtaaccaatctggaggtactgacatcaaaatgcctgcacggtaagaactactgtaggcaggttctttgtctgtacgatctggcaaaagaattgggctgtagctacaccgacgtggcggctcaagacggggaggccatgctgagaaagattttggccagtcagcagcctgaccggtgtaagagggcgcaggctttcatatcaacccaagggctcaaaccggacactgtagcggagctcgtggcagaggaagttactagagaattgctgacctctagccaaggcactgggcacaaacagatgtttaaccctacggaggaatctcaaaccttcctccagctgacaacgctctgccaggaccggactctggtcggcatgaaactccttgataagatctcctccgtgccacacggggagctgtcctgtaccaccgaattacttatcctagcacatcactgctttacgttgacatgccacatggagggcattatccgggtgttgcaggccgctcacatgctcacggataaccatttagccccaagtgaggaatatggcctcgtcgttcggctgttgaccggtatcggacggtacaatgagatgacttatatttttgatctcctgcacaagaaacactactttgaggtgctgatgcggaagaagcttgacccctctggaaccttaaaaactgccctgttggactacataaaaaggtgccggcccggcgactcggagaagcataatatgattgctctgtgctttagtatgtgtagagagatcggcgagaatcacgaggctgcggcccgcattcagctgaagctcatcgaatcacagccatgggaggactccctgaaggacggccaccagctgaagcagctccttctcaaagccttgaccctcatgttggatgctgccgagagctatgctaaggatagttgcgtgaggcaagcgcagcactgtcaacgcctcacaaaactgattacactgcagatccatttccttaatacagggcagaataccatgttgatcaacttaggcagacacaaattaatggactgcatactggctttgcctcgtttttatcaagcttccatcgtggctgaagcttatgacttcgtgcccgactgggccgagattctataccaacaagtaatcctgaaaggggactttaactatctcgaagagtttaagcagcagcggcttctgaagtcctcgatatttgaggagatctctaaaaaatataagcagcaccagcccacagatatggtgatggagaatctgaaaaagctcctcacatattgtgaagacgtgtacctctattacaaactggcatatgagcataagttttatgaaatcgtaaacgttcttctaaaggatccacagactggttgttgtttaaaagacatgcttgccggatag

SEQ ID NO: 218026 - DNA, 6240 bp, Artificial Sequence
  derived and/or modified sequence
atggccgctgaggaaggtgtggcctccgctgcatcagctggcggtagttggggaaccgctgcaatgggtagggtattgccaatgcttctcgtgcctgtgccagcagaggccatgggacagctggggagccgggcacagttacgcactcaacccgaggcactcggatcattgactgctgccggatcattgcaggtgctctcacttacacctggtagcagggggggtgggcggtgctgcctcgaaggacccttctggcactttctctgggaggattcccgaaacagctcaacacccactgaaaagcccaaactgctcgcccttggggagaattacgaattgttaatttatgagtttaatttgaaagatggtaggtgtgatgctaccatcctttattcatgttcccgcgaagccctacagaaactgatcgatgatcaagacatctctatctccctcctcagtttgcgaatcctgagtttccacaataacacaagcctgctattcatcaacaaatgtgtcatcctgcacatcatttttcccgagagggacgcagccatccgggtgttgaattgttttactctgccgttgcctgcccaggctgtcgatatgatcatcgacacgcaactgtgtcggggaatattatttgtattatcaagcctggggtggatttacatctttgacgtcgtggatggtacatatgtggcacatgtggatctggcccttcacaaagaggacatgtgtaatgagcagcagcaagagcctgctaagatcagttctttcaccagcctgaaggtgtcacaggacttggacgtcgcagtgattgtctcttcatcgaatagtgctgttgctctgaatctgaacctctattttcgccagcacccgggacatctgttgtgcgagagaattctggaggatctcccgatccagggacctaaaggggtggatgaagacgaccctgtgaactccgcgtataatatgaaactggctaagttttctttccagatcgatcggagctggaaggctcagttatccagcctgaacgagactatcaagaattctaaattggaggtgagctgctgcgccccgtggtttcaggacatccttcatctggagtcaccagagtctggcaaccactcaacttccgtccagagttgggcctttataccccaggatattatgcacggccaatacaacgtgctacagaaggatcacgcaaaaacaagtgatcccggtcgttcttggaaaatcatgcatattagcgaacaggaggagcctatcgagcttaaatgcgtgtctgtgacaggctttacggcactgttcacttgggaggttgaaaggatgggttataccatcactctttgggatctggaaacacagggcatgcagtgcttcagtctgggcaccaaatgtatacccgtcgatagctctggggaccagcaactttgctttgtcctaaccgaaaatggactgagtctaatcctgttcggcctcacacaagaggaatttctcaataggctgatgatacacggctccgcaagcactgttgacaccctgtgtcacttgaatgggtggggccgttgcagcattccgatccacgccctggaggccggcatcgaaaacagacagttggacacagtgaattttttcctcaagagcaaagagaatctgttcaacccatccagcaagagcagcgtgagcgatcagtttgatcacctgtcctcacacctctaccttagaaacgtggaggaactcattccagcactcgatttgctgtgctccgctatccgggagtcttactccgagccccaaagtaaacatttctctgagcagctgctaaacctgaccctgtcgttccttaataatcagatcaaagagctttttatccacactgaggaactggacgaacacctgcaaaaaggggttaatatactcactagctatatcaatgagctgaggacattcatgatcaaattcccctggaagcttaccgatgcgattgatgaatacgacgttcatgagaatgtcccaaaagtgaaggagagtaatatttggaaaaaactctcctttgaagaagtgatcgcgtccgcaatcttaaataataagatccctgaggcccagacattcttccgaatcgactcccactcagcccagaagttggaggagctcattgggattggactgaacttggtgttcgataacctaaaaaaaaataacataaaagaagcctcggagctcctaaagaacatgggcttcgacgtaaagggtcagctgctcaagatttgtttttacactaccaataagaacataagagattttctagtagaaattctcaaagagaagaactactttagcgagaaggaaaagcgaactatcgacttcgttcaccaagttgaaaagttatatctggggcattttcaggagaatatgcagatccaatctttcccacggtactggatcaaggaacaggatttcttcaagcacaaatctgtgctggactcattcttgaagtacgattgtaaagacgaatttaacaaacaggatcaccgcatcgtgctgaactgggcactatggtgggatcagctgacccaggagagtatcctgctgccccgaatctcaccagaggaatataagagttattccccggaggcattgtggcggtacctcactgctcggcacgattggttaaatatcatactttggatcggcgaattccagacccagcactcctacgccagcttacaacagaataagtggcccctcttaactgtggatgttatcaatcagaatacgtcgtgtaataattatatgagaaacgagatcctcgataagctggcaagaaacggcgtgttcctagcgagtgaacttgaggacttcgagtgctttttactccgtctgagccggatcgggggggtgatccaggatacactgcccgtccaaaattataagacaaaggagggctgggacttccactcccagttcatcctatattgtttggagcactccttacagcaccttctgtacgtgtacctcgactgctataagctttcgcctgaaaattgccctttcttagagaaaaaagaactacacgaagcccatccatggtttgagttcctagtgcagtgtcgtcaggtggctagcaatctcaccgatcctaagcttattttccaggcgtctctggcgaacgcccaaattctgattccaacaaaccaggcaagcgtgagttccatgctattggaaggtcacactttgttggccctggccacaactatgtactcacctggtggtgtgtcccaagtcgtgcaaaacgaagagaacgagaactgtctgaagaaagtggatcctcagcttctgaaaatggcactgactccatatcctaaactgaagactgcactctttccccagtgcacaccccctagcgtgctaccttccgacatcacgatttaccatctgatccagtccctgtcgccatttgacccctctaggttgttcggttggcagtctgctaacacactcgccatcggggacgcttggtcgcatctgcctcattttagctcacccgatcttgttaacaaatacgccatagttgagcggctaaactttgcctactatttacacaacggaagaccttcctttgcattcgggacttttctggtgcaggaactgatcaaaagtaaaactccaaaacagctgatccagcaggtggggaatgaagcttacgtgattggactcagcagctttcatattcccagtattggggccgcttgtgtttgcttcttggagctcttgggactggacagtttaaaattacgagttgatatgaaagttgcaaatattatcctctcttacaagtgcaggaacgaggacgcccaatatagcttcattagggagtcagtggctgagaagctttcgaagctggcagatggagagaagactacgaccgaggaacttcttgtgctgctcgaagagggcacctggaatagcattcagcagcaagaaattaagaggttgtcttcagagtctagttctcaatgggcattagttgttcagttctgcaggttgcacaatatgaagctctctatcagttacctcagagaatgcgccaaggcaaacgactggttgcagttcataattcatagccaactgcacaactatcaccctgcagaggtaaagtctttaattcagtacttctcccctgttattcaggaccatctgaggttggcctttgagaacctgcctagcgtccctaccagtaaaatggattcagatcaagtctgtaacaaatgcccgcaagaactgcagggtagtaagcaggaaatgactgacctattcgagatcctgctccagtgttcagaagagccggacagctggcattggctgctggtggaggctgtcaagcaacaagcacccatcctgagcgttttggccagttgcctgcagggggcttccgctatctcctgcctgtgcgtgtggattatcacctctgtagaggacaacgtagctaccgaggcaatgggtcatatacaggacagtaccgaggaccatacgtggaatctggaggacctcagtgtgatctggcggaccctgttaactagacaaaaatccaagacgcttattagaggatttcagctgttctttaaagacagtcctctgctgttggtgatggagatgtacgagttgtgtatgttctttcgtaattacaaggaggcagaggccaagctactcgagttccagaagagtttggagaccctgaacaccgccgcaactaaagtccacccagtcattcctgctatgtggctcgaggaccaggtctgcttcttgctgaaactgatgttacaacagtgcaagacccagtacgaacttggcaagttgcttcaactcttcgtggagagggagcacctcttttcagatggtccggacgtgaagaaactctgcatcttgtgtcagatcctcaaagacacgtctattgcaattaaccacacaatcatcactagctactctatcgagaacctccagcacgaatgccggtcaattctggagagactgcagacagatggacagttcgcccttgcgcgaagagtagcagaactggcagagttgcccgtggataacttggtgataaaagagatcacccaggaaatgcagacgctgaagcacattgagcagtggtctctgaagcaggctagaattgatttttggaaaaagtgccacgagaactttaaaaagaactcaatcagtagtaaagcagcctccagcttcttcagcactcaggcccatgtcgcatgtgagcatcccactgggtggtccagcatggaagaacgccacctgctgctgaccctcgccgggcactggctggctcaggaagatgtagtgcctttggataagttagaagaactggaaaaacaaatttggctctgtcggatcacccagcataccctgggcagaaaccaggaagagactgagccccggttttcccgacagatttccacgagcggggagctttcgtttgactccctcgccagcgagttttccttctctaaattggccgccttaaacacgtctaagtatctggagctgaactctctgccctccaaagaaacatgtgaaaatcggctggattggaaagagcaggagtccctcaactttctgatcgggaggctgctagatgatggatgtgtgcatgaggctagccgcgtctgccgatacttccacttctacaaccccgacgtagctttggtcctccactgtagagctctggcaagcggggaggctagcatggaagatctccatcctgagatccatgccctgctgcagtccgccgagttactggaggaagaggcccccgacattcccctcagaagagttcattccacgtcctcgctcgacagtcagaaatttgtcacggtccccagttcaaacgaggtggtgacaaacctagaagttctgacgagtaagtgcctgcacggcaagaactactgtcggcaggtgctgtgcctgtacgatcttgcaaaagagctcgggtgctcttacacagatgtggcagctcaggacggggaggctatgctgagaaagatcttagcttcacagcaacccgataggtgcaagagagcgcaagcctttataagtacccagggtttgaaacccgacaccgttgccgaactggtagcagaggaagtcactagggaactgcttacctcatcacagggtacaggagctctcccaccgggagacagccagcccctctag

SEQ ID NO: 218027 - DNA, 7332 bp, Artificial Sequence
  derived and/or modified sequence
atggctgctgaggagggcgtggccagcgctgccagcgctgggggctcctggggcacagctgccatgggccgggtgctgcccatgctgctggtgcctgtgcctgctgaggccatgggccagctgggcagccgggcccagctgcggacccagcctgaggccctgggcagcctgacagctgctggcagcctgcaggtgctgagcctgaccccaggcagccggggcggcggccgctgctgcctggagggccccttctggcacttcctgtgggaggacagcaggaacagcagcacccccacagagaagcccaagctgctggccctgggagaaaattatgagctgctgatctatgagttcaacctgaaggatggccgctgtgatgccaccatcctgtacagctgcagccgggaggccctgcagaagctgattgatgaccaggacatcagcatcagcctgctgagcctgcgcatcctgtccttccacaacaacaccagcctgctcttcatcaacaagtgtgtgatcctgcacatcatcttccctgagagagatgctgccatccgggtgctgaactgcttcaccctgcccctgcctgcccaggccgtggacatgatcatcgacacccagctgtgccggggcatcctgtttgtgctgagcagcctgggctggatctacatctttgatgtggtggatggcacctacgtggcccacgtggacctggccctgcacaaggaggacatgtgcaatgagcagcagcaggagcccgccaagatcagcagcttcaccagcctgaaggtgtcccaggacctggatgtggccgtgattgtgagcagcagcaacagcgctgtggccctgaacctgaacctgtacttccggcagcaccctggccacctgctgtgtgagcgcatcctggaggacctgcccatccagggccccaagggcgtggatgaagatgatcctgtgaacagcgcctacaacatgaagctggccaagttctccttccagattgaccgctcctggaaggcccagctgagcagcctgaatgagaccatcaagaacagcaagctggaggtgtcctgctgtgccccctggttccaggacatcctgcacctggagagccctgagagcggcaaccacagcacctctgtgcagagctgggccttcatcccccaggacatcatgcacggccagtacaacgtgctgcagaaggaccacgccaagaccagtgaccccggccgctcctggaagatcatgcacatcagcgagcaggaggagcccatcgagctgaagtgtgtgtctgtgacaggcttcaccgccctcttcacctgggaggtggagaggatgggctacaccatcaccctgtgggacctggagacccagggcatgcagtgcttcagcctgggcaccaagtgcatccctgtggacagcagcggggaccagcagctgtgctttgtgctgacagaaaatggcctgagcctcatcctgtttggcctgacccaggaggagttcctgaaccggctgatgatccacggcagcgccagcacagtggacaccctgtgccacctgaatggctggggccgctgcagcatccccatccacgccctggaggccggcatcgagaaccggcagctggacacagtgaacttcttcctgaagagcaaagaaaatctcttcaaccccagcagcaagagctctgtgtctgaccagtttgaccacctgagcagccacctgtacctgagaaatgtggaggagctgatcccagccctggacctgctgtgcagcgccatccgggagagctacagcgagccccagagcaagcacttcagcgagcagctgctgaacctgaccctgtccttcctgaacaaccagatcaaggagctgttcatccacacagaggagctggatgagcacctgcagaagggcgtgaacatcctgaccagctacatcaatgagctgcggaccttcatgatcaagttcccctggaagctgacagatgccattgatgaatatgatgtgcatgaaaatgtgcccaaggtgaaggagagcaacatctggaagaagctgagctttgaggaggtgattgccagcgccatcctgaacaacaagatccctgaggcccagaccttcttcagaattgacagccacagcgcccagaagctggaggagctgattggcatcggcctgaacctggtgtttgacaacctgaagaagaacaacatcaaggaggccagcgagctgctgaagaacatgggctttgatgtgaagggccagctgctgaagatctgcttctacaccaccaacaagaacatccgggacttcctggtggagatcctgaaggagaagaactacttcagcgagaaggagaagaggaccatcgactttgtgcaccaggtggagaagctgtacctgggccacttccaggagaacatgcagatccagagcttcccccgctactggatcaaggagcaggacttcttcaagcacaagtctgtgctggacagcttcctgaagtatgactgcaaggatgagttcaacaagcaggaccacagaattgtgctgaactgggccctgtggtgggaccagctgacccaggagagcatcctgctgccccgcatcagccctgaggagtacaagagctacagccctgaggccctgtggagatacctgacagcccggcatgactggctgaacatcatcctgtggattggagagttccagacccagcacagctatgccagcctgcagcagaacaagtggcccctgctgactgtggatgtgatcaaccagaacaccagctgcaacaactacatgagaaatgagatcctggacaagctggccagaaatggagtcttcctggccagcgagctggaggactttgagtgcttcctgctgcggctgagcagaattggaggagtcatccaggacaccctgcctgtgcagaactacaagaccaaggagggctgggacttccacagccagttcatcctgtactgcctggagcacagcctgcagcacctgctgtatgtgtacctggactgctacaagctgagccctgagaactgccccttcctggagaagaaggagctgcacgaggcccacccctggtttgagttcctggtgcagtgccggcaggtggccagcaacctgacagaccccaagctgatcttccaggccagcctggccaatgcccagatcctgatccccaccaaccaggcctctgtgtcctccatgctgctggagggccacaccctgctggccctggccaccaccatgtacagccctgggggcgtgtcccaggtggtgcagaatgaagaaaatgaaaactgcctgaagaaggtggacccccagctgctgaagatggccctgaccccctaccccaagctgaagacagccctcttcccccagtgcaccccacccagcgtgctgcccagcgacatcaccatctaccacctgatccagagcctgagcccctttgaccccagccggctgtttggctggcagagcgccaacaccctggccatcggagatgcctggagccacctgccccacttcagcagcccagacctggtgaacaagtatgccatcgtggagcggctgaactttgcctactacctgcacaacggccggcccagctttgccttcggcaccttcctggtgcaggagctgatcaagagcaagacccccaagcagctgatccagcaggtgggcaatgaggcctacgtgattggcctgagcagcttccacatccccagcatcggggccgcctgtgtgtgcttcctggagctgctgggcctggacagcctgaagctgcgggtggacatgaaggtggccaacatcatcctgagctacaagtgcagaaatgaagatgcccagtacagcttcatccgggagagcgtggccgagaagctgagcaagctggctgatggagagaagaccaccacagaggagctgctggtgctgctggaggagggcacctggaacagcatccagcagcaggagatcaagaggctgagcagcgagagcagcagccagtgggccctggtggtgcagttctgccgcctgcacaacatgaagctgagcatctcctacctgcgggagtgtgccaaggccaatgactggctgcagttcatcatccacagccagctgcacaactaccaccctgctgaggtgaagagcctcatccagtacttcagccctgtgatccaggaccacctgcggctggcctttgagaacctgcccagcgtgcccaccagcaagatggacagcgaccaggtgtgcaacaagtgcccccaggagctgcagggcagcaagcaggagatgacagacctgtttgagatcctgctgcagtgcagcgaggagccagacagctggcactggctgctggtggaggccgtgaagcagcaggcccccatcctgtctgtgctggccagctgcctgcagggcgccagcgccatcagctgcctgtgtgtgtggatcatcacctctgtggaggacaacgtggccacagaggccatgggccacatccaggacagcacagaggaccacacctggaacctggaggacctgagcgtcatctggaggaccctgctgacccggcagaagagcaagaccctcatccggggcttccagctgttcttcaaggacagccccctgctgctggtgatggagatgtatgagctgtgcatgttcttcaggaactacaaggaggccgaggccaagctgctggagttccagaagagcctggagaccctgaacacagctgccaccaaggtgcaccctgtgatcccagccatgtggctggaggaccaggtgtgcttcctgctgaagctgatgctgcagcagtgcaagacccagtatgagctgggcaagctgctgcagctgtttgtggagcgggagcacctgttcagtgatggcccagatgtgaagaagctgtgcatcctgtgccagatcctgaaggacaccagcatcgccatcaaccacaccatcatcaccagctacagcattgagaacctgcagcacgagtgccgcagcatcctggagcggctgcagacagatggccagtttgccctggcccggcgggtggccgagctggccgagctgcctgtggacaacctggtgatcaaggagatcacccaggagatgcagaccctgaagcacatcgagcagtggagcctgaagcaggccagaattgacttctggaagaagtgccacgagaacttcaagaagaacagcatcagcagcaaggccgccagcagcttcttcagcacccaggcccacgtggcctgtgagcaccccaccggctggagctccatggaggagcggcacctgctgctgaccctggccggccactggctggcccaggaggatgtggtgcccctggacaagctggaggagctggagaagcagatctggctgtgccgcatcacccagcacaccctgggcaggaaccaggaggagacagagccccgcttcagccggcagatcagcaccagcggggagctgagctttgacagcctggccagcgagttctccttcagcaagctggccgccctgaacaccagcaagtacctggagctgaacagcctgcccagcaaggagacctgtgaaaatcggctggactggaaggagcaggagagcctgaacttcctgattggccgcctgctggatgatggctgtgtgcatgaggccagccgggtgtgccgctacttccacttctacaacccagatgtggccctggtgctgcactgccgggccctggccagcggggaggcctccatggaggacctgcaccctgagatccacgccctgctgcagagcgctgagctgctggaggaggaggccccagacatccccctgcggcgggtgcacagcaccagcagcctggacagccagaagtttgtgacagtgcccagcagcaatgaggtggtgaccaacctggaggtgctgaccagcaagtgcctgcacggcaagaactactgccggcaggtgctgtgcctgtatgacctggccaaggagctgggctgcagctacacagatgtggccgcccaggatggagaggccatgctgaggaagatcctggccagccagcagcctgaccgctgcaagagggcccaggccttcatcagcacccagggcctgaagccagacacagtggccgagctggtggccgaggaggtgacccgggagctgctgaccagcagccagggcaccggccacaagcagatgttcaaccccacagaggagagccagaccttcctgcagctgaccaccctgtgccaggacaggaccctggtgggcatgaagctgctggacaagatcagctctgtgccccatggagagctgagctgcaccacagagctgctgatcctggcccaccactgcttcaccctgacctgccacatggagggcatcatccgggtgctgcaggccgcccacatgctgacagacaaccacctggcccccagcgaggagtatggcctggtggtgcggctgctgaccggcatcggccgctacaatgagatgacctacatctttgacctgctgcacaagaagcactactttgaggtgctgatgaggaagaagctggaccccagcggcaccctgaagacagccctgctggactacatcaagcgctgcaggcctggggacagcgagaagcacaacatgattgccctgtgcttctccatgtgccgggagattggagaaaatcatgaagctgctgcccgcatccagctgaagctgattgagagccagccctgggaggacagcctgaaggatggccaccagctgaagcagctgctgctgaaggccctgaccctgatgctggatgctgctgagagctatgccaaggacagctgtgtgcggcaggcccagcactgccagaggctgaccaagctgatcaccctgcagatccacttcctgaacacaggccagaacaccatgctgatcaacctgggccgccacaagctgatggactgcatcctggccctgccccgcttctaccaggccagcatcgtggccgaggcctatgactttgtgcctgactgggccgagatcctgtaccagcaggtgatcctgaagggggacttcaactacctggaggagttcaagcagcagaggctgctgaagagcagcatctttgaggagatcagcaagaagtacaagcagcaccagcccacagacatggtgatggagaacctgaagaagctgctgacctactgtgaagatgtgtacctgtactacaagctggcctatgagcacaagttctatgaaattgtgaatgtgctgctgaaggacccccagacaggctgctgcctgaaggacatgctggccggctag

SEQ ID NO: 218028 - DNA, 6240 bp, Artificial Sequence
  derived and/or modified sequence
atggctgctgaggagggcgtggccagcgctgccagcgctgggggctcctggggcacagctgccatgggccgggtgctgcccatgctgctggtgcctgtgcctgctgaggccatgggccagctgggcagccgggcccagctgcggacccagcctgaggccctgggcagcctgacagctgctggcagcctgcaggtgctgagcctgaccccaggcagccggggcggcggccgctgctgcctggagggccccttctggcacttcctgtgggaggacagcaggaacagcagcacccccacagagaagcccaagctgctggccctgggagaaaattatgagctgctgatctatgagttcaacctgaaggatggccgctgtgatgccaccatcctgtacagctgcagccgggaggccctgcagaagctgattgatgaccaggacatcagcatcagcctgctgagcctgcgcatcctgtccttccacaacaacaccagcctgctcttcatcaacaagtgtgtgatcctgcacatcatcttccctgagagagatgctgccatccgggtgctgaactgcttcaccctgcccctgcctgcccaggccgtggacatgatcatcgacacccagctgtgccggggcatcctgtttgtgctgagcagcctgggctggatctacatctttgatgtggtggatggcacctacgtggcccacgtggacctggccctgcacaaggaggacatgtgcaatgagcagcagcaggagcccgccaagatcagcagcttcaccagcctgaaggtgtcccaggacctggatgtggccgtgattgtgagcagcagcaacagcgctgtggccctgaacctgaacctgtacttccggcagcaccctggccacctgctgtgtgagcgcatcctggaggacctgcccatccagggccccaagggcgtggatgaagatgatcctgtgaacagcgcctacaacatgaagctggccaagttctccttccagattgaccgctcctggaaggcccagctgagcagcctgaatgagaccatcaagaacagcaagctggaggtgtcctgctgtgccccctggttccaggacatcctgcacctggagagccctgagagcggcaaccacagcacctctgtgcagagctgggccttcatcccccaggacatcatgcacggccagtacaacgtgctgcagaaggaccacgccaagaccagtgaccccggccgctcctggaagatcatgcacatcagcgagcaggaggagcccatcgagctgaagtgtgtgtctgtgacaggcttcaccgccctcttcacctgggaggtggagaggatgggctacaccatcaccctgtgggacctggagacccagggcatgcagtgcttcagcctgggcaccaagtgcatccctgtggacagcagcggggaccagcagctgtgctttgtgctgacagaaaatggcctgagcctcatcctgtttggcctgacccaggaggagttcctgaaccggctgatgatccacggcagcgccagcacagtggacaccctgtgccacctgaatggctggggccgctgcagcatccccatccacgccctggaggccggcatcgagaaccggcagctggacacagtgaacttcttcctgaagagcaaagaaaatctcttcaaccccagcagcaagagctctgtgtctgaccagtttgaccacctgagcagccacctgtacctgagaaatgtggaggagctgatcccagccctggacctgctgtgcagcgccatccgggagagctacagcgagccccagagcaagcacttcagcgagcagctgctgaacctgaccctgtccttcctgaacaaccagatcaaggagctgttcatccacacagaggagctggatgagcacctgcagaagggcgtgaacatcctgaccagctacatcaatgagctgcggaccttcatgatcaagttcccctggaagctgacagatgccattgatgaatatgatgtgcatgaaaatgtgcccaaggtgaaggagagcaacatctggaagaagctgagctttgaggaggtgattgccagcgccatcctgaacaacaagatccctgaggcccagaccttcttcagaattgacagccacagcgcccagaagctggaggagctgattggcatcggcctgaacctggtgtttgacaacctgaagaagaacaacatcaaggaggccagcgagctgctgaagaacatgggctttgatgtgaagggccagctgctgaagatctgcttctacaccaccaacaagaacatccgggacttcctggtggagatcctgaaggagaagaactacttcagcgagaaggagaagaggaccatcgactttgtgcaccaggtggagaagctgtacctgggccacttccaggagaacatgcagatccagagcttcccccgctactggatcaaggagcaggacttcttcaagcacaagtctgtgctggacagcttcctgaagtatgactgcaaggatgagttcaacaagcaggaccacagaattgtgctgaactgggccctgtggtgggaccagctgacccaggagagcatcctgctgccccgcatcagccctgaggagtacaagagctacagccctgaggccctgtggagatacctgacagcccggcatgactggctgaacatcatcctgtggattggagagttccagacccagcacagctatgccagcctgcagcagaacaagtggcccctgctgactgtggatgtgatcaaccagaacaccagctgcaacaactacatgagaaatgagatcctggacaagctggccagaaatggagtcttcctggccagcgagctggaggactttgagtgcttcctgctgcggctgagcagaattggaggagtcatccaggacaccctgcctgtgcagaactacaagaccaaggagggctgggacttccacagccagttcatcctgtactgcctggagcacagcctgcagcacctgctgtatgtgtacctggactgctacaagctgagccctgagaactgccccttcctggagaagaaggagctgcacgaggcccacccctggtttgagttcctggtgcagtgccggcaggtggccagcaacctgacagaccccaagctgatcttccaggccagcctggccaatgcccagatcctgatccccaccaaccaggcctctgtgtcctccatgctgctggagggccacaccctgctggccctggccaccaccatgtacagccctgggggcgtgtcccaggtggtgcagaatgaagaaaatgaaaactgcctgaagaaggtggacccccagctgctgaagatggccctgaccccctaccccaagctgaagacagccctcttcccccagtgcaccccacccagcgtgctgcccagcgacatcaccatctaccacctgatccagagcctgagcccctttgaccccagccggctgtttggctggcagagcgccaacaccctggccatcggagatgcctggagccacctgccccacttcagcagcccagacctggtgaacaagtatgccatcgtggagcggctgaactttgcctactacctgcacaacggccggcccagctttgccttcggcaccttcctggtgcaggagctgatcaagagcaagacccccaagcagctgatccagcaggtgggcaatgaggcctacgtgattggcctgagcagcttccacatccccagcatcggggccgcctgtgtgtgcttcctggagctgctgggcctggacagcctgaagctgcgggtggacatgaaggtggccaacatcatcctgagctacaagtgcagaaatgaagatgcccagtacagcttcatccgggagagcgtggccgagaagctgagcaagctggctgatggagagaagaccaccacagaggagctgctggtgctgctggaggagggcacctggaacagcatccagcagcaggagatcaagaggctgagcagcgagagcagcagccagtgggccctggtggtgcagttctgccgcctgcacaacatgaagctgagcatctcctacctgcgggagtgtgccaaggccaatgactggctgcagttcatcatccacagccagctgcacaactaccaccctgctgaggtgaagagcctcatccagtacttcagccctgtgatccaggaccacctgcggctggcctttgagaacctgcccagcgtgcccaccagcaagatggacagcgaccaggtgtgcaacaagtgcccccaggagctgcagggcagcaagcaggagatgacagacctgtttgagatcctgctgcagtgcagcgaggagccagacagctggcactggctgctggtggaggccgtgaagcagcaggcccccatcctgtctgtgctggccagctgcctgcagggcgccagcgccatcagctgcctgtgtgtgtggatcatcacctctgtggaggacaacgtggccacagaggccatgggccacatccaggacagcacagaggaccacacctggaacctggaggacctgagcgtcatctggaggaccctgctgacccggcagaagagcaagaccctcatccggggcttccagctgttcttcaaggacagccccctgctgctggtgatggagatgtatgagctgtgcatgttcttcaggaactacaaggaggccgaggccaagctgctggagttccagaagagcctggagaccctgaacacagctgccaccaaggtgcaccctgtgatcccagccatgtggctggaggaccaggtgtgcttcctgctgaagctgatgctgcagcagtgcaagacccagtatgagctgggcaagctgctgcagctgtttgtggagcgggagcacctgttcagtgatggcccagatgtgaagaagctgtgcatcctgtgccagatcctgaaggacaccagcatcgccatcaaccacaccatcatcaccagctacagcattgagaacctgcagcacgagtgccgcagcatcctggagcggctgcagacagatggccagtttgccctggcccggcgggtggccgagctggccgagctgcctgtggacaacctggtgatcaaggagatcacccaggagatgcagaccctgaagcacatcgagcagtggagcctgaagcaggccagaattgacttctggaagaagtgccacgagaacttcaagaagaacagcatcagcagcaaggccgccagcagcttcttcagcacccaggcccacgtggcctgtgagcaccccaccggctggagctccatggaggagcggcacctgctgctgaccctggccggccactggctggcccaggaggatgtggtgcccctggacaagctggaggagctggagaagcagatctggctgtgccgcatcacccagcacaccctgggcaggaaccaggaggagacagagccccgcttcagccggcagatcagcaccagcggggagctgagctttgacagcctggccagcgagttctccttcagcaagctggccgccctgaacaccagcaagtacctggagctgaacagcctgcccagcaaggagacctgtgaaaatcggctggactggaaggagcaggagagcctgaacttcctgattggccgcctgctggatgatggctgtgtgcatgaggccagccgggtgtgccgctacttccacttctacaacccagatgtggccctggtgctgcactgccgggccctggccagcggggaggcctccatggaggacctgcaccctgagatccacgccctgctgcagagcgctgagctgctggaggaggaggccccagacatccccctgcggcgggtgcacagcaccagcagcctggacagccagaagtttgtgacagtgcccagcagcaatgaggtggtgaccaacctggaggtgctgaccagcaagtgcctgcacggcaagaactactgccggcaggtgctgtgcctgtatgacctggccaaggagctgggctgcagctacacagatgtggccgcccaggatggagaggccatgctgaggaagatcctggccagccagcagcctgaccgctgcaagagggcccaggccttcatcagcacccagggcctgaagccagacacagtggccgagctggtggccgaggaggtgacccgggagctgctgaccagcagccagggcaccggggccctgcccccaggggacagccagcccctgtag

SEQ ID NO: 218029 - DNA, 7332 bp, Artificial Sequence
  derived and/or modified sequence
atggccgccgaggagggcgtggccagcgccgccagcgccggcggctcctggggcactgcagcaatggggcgagtgctcccgatgcttttagtgcctgtgcccgcagaagccatgggccagttgggatcacgagctcagttacggactcaaccggaagccttgggaagtctcaccgccgctggctcactccaggtgctgagcctgacaccagggagtcgcggcggcgggcggtgttgtctcgagggaccattctggcacttcctgtgggaggatagccggaattcatcaacacctacagagaagcccaaactacttgctcttggggaaaactatgaattgttgatttacgagttcaacctgaaagacggacgatgcgacgccactattttatactcctgttcacgcgaagccctccagaaactgatcgatgaccaggacataagcatctcactgctcagtctgcgaatccttagtttccataataacacttcattgttatttatcaataaatgcgtgatactgcatattattttccctgagcgcgacgctgcaattcgggtgttaaactgctttaccctgcccctgccagcccaggcggttgacatgatcatcgacacccagttgtgtcgggggatattgttcgtgttgtcatccctcgggtggatctatattttcgatgtcgttgatggtacgtacgtggctcacgtggatctggccctccacaaggaggacatgtgcaatgagcagcagcaagaacccgccaaaatctcctcttttaccagcctgaaggtgagccaggatctagacgtcgccgtaatcgtgagttcatcaaatagcgcagttgccttgaacctgaacctttatttcaggcagcatcctgggcacctgctctgcgaacggatcctggaggaccttcccatacaggggccgaagggggtcgacgaggacgacccggtgaacagcgcatataatatgaagctcgctaaattctcatttcaaatcgatcgttcatggaaagctcagttaagctcccttaacgaaaccattaaaaattctaagctggaagtcagctgttgtgccccctggtttcaggatattctgcacctggaatcaccagagtcagggaatcactccaccagcgtccagtcctgggcctttattcctcaggacattatgcacggtcaatacaacgtgcttcagaaagaccatgccaagacctccgatccaggccgctcatggaagataatgcacataagcgaacaagaggaaccaattgaacttaagtgtgtctccgtgaccggatttacggctctattcacctgggaggtcgagaggatgggctacacaatcaccctgtgggaccttgaaacccagggtatgcagtgttttagcctgggtaccaaatgcattccggtcgactcctctggagaccaacagctgtgcttcgtcttgacggaaaatggactgagtctgattctcttcgggctaactcaagaggaatttttaaaccgtctgatgatccatggcagcgcctcgactgtggacaccctatgccacctgaatggctgggggagatgcagtatccctatacacgccctggaggctggaattgaaaatcgccagctggacacagtgaactttttcttgaagtcaaaagagaacctgtttaatccctctagcaaatcgagcgtgtcagatcagttcgaccacctcagctctcacctttacctccgcaatgtagaagagctcatcccagccctggatctgctgtgtagtgcaataagggagtcctactcagagcctcagtctaagcacttttcagagcagttattgaacctcactctgtcatttctgaataatcaaatcaaggaactgttcatccatacagaagaattggatgagcatctccagaagggagtaaatattcttacttcttacattaatgagctgcgcacctttatgattaaattcccctggaagctcacagatgctatagatgagtacgacgtgcacgagaatgttcccaaggtaaaggagagtaatatttggaaaaagctgtctttcgaagaggtcatagccagcgcaatcttaaacaataaaatccctgaagcccaaacgttttttcgcattgattcacattctgctcagaagctggaagaactgattggaatcggcttaaatcttgtgttcgacaatctgaaaaagaacaatatcaaggaagctagtgagttgctcaagaacatggggttcgacgtgaaaggccagttactgaagatatgcttctacacaaccaataaaaacatcagagactttctggtggaaattctgaaggagaagaactacttttctgaaaaggagaaaagaacaattgactttgtgcatcaagtggagaaattatatctgggtcactttcaggagaacatgcagattcagagtttcccaagatattggattaaagagcaggacttcttcaagcataagtctgtgctcgactccttcctgaaatatgactgcaaagacgaattcaataagcaggaccaccgaattgtgttgaattgggcactgtggtgggatcagcttactcaagaaagcattctgctgcctcgaatttcaccggaggaatataagtcatacagcccggaggctctttggagatatctaaccgcacgccacgactggctcaacattatcttgtggattggagagttccagacccagcacagctacgcttcattacagcagaataagtggcctcttctgaccgtggatgtgatcaaccaaaatacttcctgtaataattatatgcgaaacgagattctcgacaagctcgcccggaacggagtcttcctggcttctgaactggaagactttgagtgttttcttttgcgactgtccagaataggtggcgtgattcaggatacattgccagtccagaattacaaaaccaaggaagggtgggacttccacagtcagttcattctctattgcctggaacactcgctgcagcacctgctctatgtgtacctggactgttataagttgtccccagaaaattgtccatttctggagaagaaggagctgcacgaggctcacccctggttcgaatttttggttcaatgccggcaggttgccagcaacctaaccgacccaaagctgatttttcaggcaagtctggctaacgcacagatcctcatcccgacaaatcaagcatccgtttcgagcatgttgttggagggacacactcttctggctctggccacaaccatgtattccccggggggagtaagccaggtagtacagaacgaggagaatgaaaattgcctaaagaaggtggaccctcagttattaaaaatggctctgaccccatatcctaaactgaagaccgccctgttccctcagtgcaccccccccagtgtgctgccgtccgacattaccatttaccacctgatccagagcctctcaccatttgacccttcaaggttatttggatggcagagtgcaaacacattggcaattggggacgcttggagtcaccttcctcacttctcgtcacccgatctggtaaataaatacgccatcgttgagaggctgaactttgcatattatctgcataatggaaggcctagttttgcctttggtacgtttctggttcaggaactgataaaaagtaagacccccaaacaattgatccaacaggtgggtaacgaagcgtatgtgatcggcctgtcctctttccacataccttccattggtgccgcctgcgtatgcttccttgaacttcttggtctggacagtctgaaactgcgggtggacatgaaggtcgcaaacattatcttgagctacaagtgcaggaacgaggacgcacaatacagttttatcagagagtctgttgctgagaaactgagcaagctggccgatggcgaaaagactacaaccgaagaactgcttgtgctgcttgaggaaggaacctggaatagcatccaacaacaggaaatcaaacggctgtctagcgagagcagttctcagtgggcgttggtagtccagttctgcagacttcacaacatgaaattgagtatatcatatctgagagaatgcgccaaagccaatgactggttgcaattcatcattcactcgcagctgcacaactaccacccggccgaggttaaatcactaatccagtacttctctccagtcatccaagatcacctgcggctggctttcgaaaacctccccagtgtgccaacctctaaaatggactcagaccaggtttgtaacaagtgcccacaggaactgcaaggaagcaagcaggagatgactgacctttttgaaatcttgttacaatgttccgaggagcctgattcatggcactggcttttggtggaagcggtgaagcagcaggctcccatcctgagcgtcctcgcatcctgcctccagggagctagtgcaatctcttgcttatgcgtttggatcattacttctgtcgaggacaacgtagccaccgaagctatgggacacatacaggattctacagaggaccacacgtggaaccttgaagatctgtcggtcatatggagaaccctactgactcgacagaaaagcaaaactctgatccgcggctttcagctgttctttaaggacagtcccttgctgctggtgatggaaatgtatgaactgtgtatgttttttcggaattacaaggaagcagaagcgaaactcttggagtttcagaaatccctcgagacactgaacaccgcggccaccaaggtacatccagtcataccagccatgtggcttgaggatcaggtgtgcttcctactcaaattaatgctgcagcaatgtaagacacaatacgagttgggaaaactgctgcaactgttcgtggaaagagaacacctgttctctgatggcccagatgtcaagaaactatgtattctatgccagatcctgaaggatacatctattgccatcaatcataccatcattacctcatattctatcgaaaatctgcagcacgaatgtcggtctatccttgaacggcttcaaacggatggacaattcgcccttgcccggcgagtggccgagctggctgagctgccagtggacaacttggttatcaaagagatcactcaggaaatgcagacactgaagcatattgagcagtggagtctgaaacaggcaaggatcgacttctggaaaaagtgccatgagaacttcaaaaagaattctatctcttcaaaggctgccagttccttctttagcacccaagcccacgtggcgtgcgaacaccctacaggctggtcttctatggaagagcgacacctcctcctaacattggccggccactggctggcacaggaggatgtcgttcccctggataagttagaggagctcgagaaacagatctggctgtgcagaattacccagcacactttaggtcgcaaccaagaagagaccgagcccagattcagccggcagatcagtaccagcggagaactttctttcgactccctggcatctgagttctcctttagcaagctggcggcccttaatacttccaagtatctggaactcaactcactgccatctaaagagacatgcgagaacagactcgattggaaggaacaggagtctctgaacttcctgattggcagactgttagacgacgggtgcgtgcacgaggccagtcgtgtatgtcgctatttccatttttacaacccagatgtggccttggtgcttcattgtcgtgcactggccagtggtgaggccagtatggaagatcttcacccagagatccacgccctgctgcagtcggctgaacttctggaggaagaggctcccgatatccctctcagaagagttcactccaccagcagcctggactcccaaaagttcgtgacggtcccatctagtaacgaggtcgttactaacttagaagtcctcactagcaagtgtctccatggcaaaaactactgccgacaagttctctgcctctacgatttagccaaggagttgggctgctcatacactgatgttgccgctcaggatggggaggcaatgctacgtaagatcttagcctcacagcagccggatagatgcaagagagcacaggcatttatctctacacaggggctgaagcctgacacagtggctgagctcgttgctgaggaagtaacccgggaactattgacaagctcacagggaaccggccacaagcagatgttcaatcccaccgaggaatcacagacattccttcagctcaccaccctatgccaagataggactttagtgggcatgaaactcctggacaagatttcgtccgtgccgcacggtgagctgagctgtactacggagctgctgatcttggctcaccattgttttacattgacttgccacatggaaggaatcattagggtgttgcaggccgcccatatgttgaccgacaatcatctcgctccgtccgaagagtatgggctagtagtgcgtcttctcacaggcatcggcagatacaatgagatgacttatatcttcgacttactgcacaagaaacactacttcgaggtcctgatgaggaaaaaactggatccatctggcacccttaaaactgcactactagactacatcaaaagatgcagacctggtgattccgaaaagcataacatgattgctctgtgcttctctatgtgcagagagattggcgagaatcatgaggccgcagcccgcatccagctgaagctgatcgaaagccagccttgggaggattcactgaaggacggccatcagttgaagcagctgcttctgaaggctctgactctcatgttggacgccgcagagagctacgctaaggattcctgcgtgaggcaggcccagcactgccagcgcctgaccaaattaatcaccctgcaaatccatttcctgaacaccggccagaatacgatgttgattaacctcggaagacacaagctgatggattgtattctcgctcttccacgattctaccaagcctcaatcgttgctgaggcctatgatttcgtgcctgactgggcggagatcctttatcagcaggtgatcctcaaaggtgacttcaactatttagaggagtttaagcagcagcggttactgaaaagctctatttttgaggagatttctaagaagtacaaacaacatcagccgacagatatggtgatggagaatctaaagaagctgcttacctattgcgaggacgtgtatctctattataaactggcatacgaacacaagttctatgagattgtgaatgttctgctgaaagaccctcaaacgggctgttgtctcaaggacatgcttgccggctag

SEQ ID NO: 218030 - DNA, 6240 bp, Artificial Sequence
  derived and/or modified sequence
atggccgccgaggagggcgtggccagcgccgccagcgccggcggcagctggggtaccgccgccatgggacgagtgctgccaatgctgctggtgcccgtacccgccgaggctatgggccaactgggctctcgggctcagctgcggacgcaacctgaggccttaggctcgttaacagccgcgggatcgctccaggtgttgtcactcacacctggctccaggggcggcggccggtgttgtctggagggtcctttctggcattttctgtgggaggatagtcggaactcatcgacgccgactgagaaaccaaaacttttagcactcggtgaaaactatgaattgctgatttacgaattcaacctcaaggatggccgatgtgatgctacaatcctgtatagttgcagccgggaagctttacagaaactgatcgacgatcaggacatttcaatttcccttcttagtctgcggatcttaagttttcacaataacaccagtctgctgtttattaacaagtgcgtgatcctacacattatttttcctgagcgagatgcagcgatcagagtcctcaactgctttaccttacccttaccagcccaggcagtcgacatgatcatcgacactcagctctgcaggggaattctattcgtgctctcatctctcggttggatatacatcttcgacgtcgttgacggaacatatgttgcccacgtcgacctggctctgcataaagaagacatgtgtaatgagcaacagcaggagcctgccaaaatctcctcttttaccagcttaaaagtctctcaagatttagatgtggctgttatcgtgtcctctagcaacagcgcagttgctttaaaccttaacctctactttcgacagcaccctggtcatcttttgtgtgagaggatcctcgaagatttgccgattcaggggccaaagggggtggacgaagacgatccagttaattcagcatataacatgaagctcgccaagtttagtttccaaattgacagaagctggaaagcacagcttagctcgttaaacgagactatcaagaactctaaattggaggttagttgctgcgctccctggtttcaagatattctgcacttggagtctcccgagagcgggaaccacagcactagcgtgcaatcctgggcctttatcccccaggacattatgcacggacaatacaatgttctgcagaaagaccacgccaaaacatccgatccgggacgtagctggaaaattatgcacatctccgagcaggaagaaccgattgaactgaagtgcgtctcagtgactgggttcactgcccttttcacatgggaagtggagagaatgggttatacaatcaccctctgggacctggaaacccagggtatgcagtgcttcagcctaggcaccaagtgtatccccgtggacagcagcggagaccagcagctctgcttcgtgctgaccgagaatggcctgtcattaattctgtttgggcttacacaggaggaatttttgaatcggctcatgattcatggaagtgcttccacagtggacaccctatgccatctcaacgggtggggccgttgctccatccctattcatgcattagaagccggtatcgagaacagacagctggatacagtgaatttttttttgaagtctaaggagaatctcttcaaccccagctcaaagagctctgtcagtgatcagttcgaccatctcagctcccatctctacctccgcaacgtcgaagaactcattccagctctggatctgctctgttccgctatcagagaaagttattccgagccccagagtaaacactttagtgagcagttactcaacctaacgctctctttcctgaacaatcagatcaaagagctgtttatccacacagaggagttggacgagcatctgcaaaaaggggtaaacattctcacgagctatatcaacgagctaagaacgttcatgatcaaattcccttggaaactcaccgacgccatcgatgagtatgacgtgcacgaaaatgtgcccaaagttaaggagtctaacatttggaagaagctctcatttgaagaggtgattgcaagtgctatcttaaataataagattccagaggcccagacattttttaggatagactcacacagtgcacagaagctggaggaactgattggaattggtctcaatctggtgtttgataacctcaagaagaataatataaaagaggcaagtgagctgctcaaaaatatggggttcgacgtcaaaggccagctcctaaagatttgtttctacacgaccaacaaaaatatcagggacttcctcgtggagattctgaaggagaagaactacttttctgagaaggaaaagagaacaatagatttcgtgcaccaggtcgagaagctttatttggggcatttccaagagaacatgcagatccagagtttcccgcgctactggataaaggagcaggacttttttaaacataagtcagtgttagatagcttccttaaatacgactgtaaagatgaatttaataagcaggaccaccggattgtgcttaattgggcactgtggtgggaccagttaacgcaggagagcattctgctgccaagaatcagtccagaggaatacaagtcatactcacccgaggctctgtggagatacctgactgccaggcacgactggctgaacatcattctctggataggcgaattccagacacagcattcctatgcctctttgcagcagaataaatggccattactgacagttgacgtgattaaccagaataccagttgtaataactacatgaggaacgagatcttggacaagctggcccgaaatggagtgttcttggcatctgaactggaggattttgaatgtttcctgcttagattgtccagaatcggaggcgtgatccaggataccctccccgtacagaattataaaacaaaggagggctgggacttccacagccagttcattctgtactgtctcgagcactctttgcagcacttactgtacgtgtaccttgattgctataagctgtcccctgagaactgccccttcctagaaaagaaggaactgcacgaggcacacccatggttcgagttcctggttcagtgccggcaggttgcttctaatctgacagatccgaaactcattttccaggcttcgctcgcaaacgctcagattctgattcccacaaatcaggcgtccgtgtcctccatgttactagagggacacacattgctggccctggccaccaccatgtacagcccgggaggcgtctcacaggtggtgcagaacgaagagaacgaaaactgcttgaaaaaggtggacccccagctcctgaaaatggcattgacgccctatccgaaactgaagaccgcactcttcccacagtgcaccccgcctagcgtgctgccctccgacatcactatctatcatctcatccagtccctttctccatttgaccccagccgcctgtttgggtggcagtcagccaatacactggcgatcggggacgcttggagccatctccctcacttcagctcacctgatctcgtcaacaaatacgccatcgttgagcggcttaactttgcatattacttacataacggccgcccgtcttttgcctttgggacctttctggttcaagagttgatcaaatccaagacgcccaagcagctaatacagcaggttggcaatgaagcatacgtcattggactgagtagttttcacataccatcaattggggcagcatgtgtgtgcttcctcgaacttctgggtctcgactccctgaagctgcgggtggatatgaaagtcgccaatattatcttgtcctacaaatgtcgaaacgaagatgcgcagtactcttttatcagagagagtgtggccgagaaattgtctaaattagccgatggcgagaaaacaactacagaagaattgcttgtgttgctggaggagggtacctggaattcaatccagcagcaggaaatcaaacgcctgagctctgagagctcatcacaatgggcccttgtcgtgcagttttgccgcctgcacaatatgaagttgtctataagctatctacgggagtgtgccaaagctaacgactggctccagttcatcatccatagccagttacataactatcatcccgccgaggttaagtctttaattcagtacttcagtccggtgatccaggatcatctgagattggccttcgaaaatttgccttccgtccctactagtaaaatggactccgaccaggtttgcaacaaatgtcctcaggagctgcagggaagtaagcaggagatgacagacctatttgagattttgctacagtgttccgaggagcccgattcctggcactggttgctcgtggaagcggtgaaacagcaggctcccattttgtctgtgctagcctcctgcctccagggggccagtgcaatttcttgcctgtgtgtttggataatcacctctgtggaggataacgtggccaccgaggcaatggggcatattcaggattccaccgaagaccacacttggaatctcgaggatctgtctgtgatctggcgcactttgctcactcgacagaaatctaaaacgctcatcagggggtttcagctttttttcaaggatagcccactcctccttgtaatggaaatgtacgagctttgcatgtttttcaggaactataaagaggctgaagccaagttactggagttccagaaatccctcgaaaccctcaataccgccgctaccaaggtgcacccggtcatcccagctatgtggctcgaagaccaagtctgcttcctgctcaagcttatgctacagcaatgtaagacacagtacgagctcgggaaactcctgcagctgttcgtggaacgcgaacacctcttcagtgacggacctgatgtgaaaaagctgtgtatattatgccagatcctgaaagatacatctatcgcaataaaccacaccattattacttcttactccattgaaaatctgcagcatgagtgcagatccattctcgagcggcttcaaacagatggacaattcgccctggcccggcgggtggccgagttggccgaattgcccgtggacaaccttgtgataaaagaaatcacgcaagagatgcagacgctcaaacacatcgaacagtggagcctgaaacaggctcgcatagacttctggaaaaaatgccacgagaatttcaaaaagaactccatttcctccaaggccgcctcctcctttttctccacccaggcccatgtggcatgcgaacacccaacagggtggtcctccatggaggagaggcacctgctcttgacattggccggccactggctcgctcaggaagacgtggtgcccctcgataaacttgaagagttagagaagcaaatttggctctgtagaattacacagcacacacttggaagaaaccaggaggaaaccgaaccccgctttagtagacagattagcacttctggggagctttcctttgactctttggccagcgagttttccttctcgaagcttgctgccctgaacactagcaagtatctggaactcaatagtctgcctagtaaggagacctgtgaaaacaggttggactggaaagagcaggaaagtctgaattttcttattggccggctgcttgacgacggctgcgtgcacgaggcaagtcgagtctgtcggtattttcacttttacaacccggacgtggctctcgtgttacattgccgggcactcgcatcgggtgaggcttcgatggaggatctgcatcccgaaatccacgcccttctgcagtcggctgagctcctcgaggaggaggcccccgatatccctctaaggcgtgtgcattcgacatctagcctcgactctcagaaatttgtgactgtcccgagcagtaatgaagtggtgacaaacttggaggtcctcactagtaagtgtttgcacgggaaaaattactgccggcaggtcttgtgcctgtacgatctagctaaggaactggggtgcagctacacagacgttgctgcccaggatggcgaggctatgctgcggaagatcctcgcctcccagcagccagatcggtgtaagagggctcaagcctttattagtactcagggccttaaaccagataccgtcgctgagctcgtggccgaggaggtgaccagggagctcctgacctcctctcagggcaccggcgccttaccgccaggagattcccagccgctctag

SEQ ID NO: 218031 - DNA, 7331 bp, Artificial Sequence
  derived and/or modified sequence
atggccgctgaggaaggcgttgcgagcgctgctagcgctggaggcagctggggcacggcggctatggggagagtattgcccatgttgctggtgccagtgcccgctgaggctatgggacagctggggagtcgggcacaactacggacccagcccgaggccctaggatccctgacagcagcagggagtttacaagtcctgtccctgacgcccggttcacgcggtggtgggcgatgttgccttgaaggtcccttctggcattttctctgggaggactcccgaaactcctcaaccccaacagagaagcccaaactgctcgctctgggggaaaattacgaactgctgatctacgagttcaatttgaaagacggacgctgtgatgctaccattctgtactcatgttcgcgcgaagctctccagaagttgatagatgatcaggatatatcaatatctctgttatccctgagaatcctgtcgtttcacaataatacgtccctgctcttcattaacaaatgtgtgattctgcacatcatatttcctgaacgagacgcggctatcagggtgttgaactgcttcaccctccctcttccggctcaggctgtggacatgattattgatacacagctgtgtcgcggtatactctttgtcctttcctcccttggctggatctacattttcgatgttgtcgatggcacctatgtggcccacgttgacctcgccctccataaagaggacatgtgcaacgagcagcagcaggagcccgctaaaatctcgagtttcacctctttaaaagtcagtcaggatctggacgtggccgtcatcgttagcagtagcaacagtgcagtggcgttaaatctgaatctgtatttccgtcagcaccccggacacctgctgtgcgaaaggattttggaggatttgccgatacaaggtccaaagggagttgatgaggacgacccagtgaatagcgcatacaacatgaaactggcgaaatttagcttccagatcgaccggtcgtggaaggctcagctgagtagcctgaacgagaccatcaagaactctaaattagaagtgtcttgttgtgccccatggttccaagacattctgcacctagaatcccccgagtccggtaatcacagcaccagtgtccagagctgggcatttattcctcaggacattatgcatgggcagtacaacgtgctgcagaaggaccatgcaaaaacatcagaccccggacgttcttggaagatcatgcacatttctgaacaagaggagcccattgaactgaaatgcgtgtcggtgaccggtttcacagccctatttacatgggaggttgaacggatgggatatactataacactatgggatctggagacacaaggcatgcagtgcttcagcctggggaccaaatgtatcccagtggattcttccggggatcagcagctgtgctttgttctgacagaaaatggcctttcgctcatcctgtttggactaacacaggaggaatttctcaaccggctaatgattcacggatctgcgtccacagtcgataccctgtgtcatctgaatgggtggggcagatgttccatccccattcacgctcttgaagctggtatcgaaaatagacagctggacactgtgaacttctttctaaagagtaaggagaacttgttcaaccccagtagcaaaagctcggtgagcgaccaattcgatcacttgtcctcccatctttatttacgcaacgtagaggagctaatccccgcactagatttgttatgtagcgcaatccgtgagtcctatagcgaacctcaatcaaagcactttagcgaacaactgttgaatttaactctatcatttctgaataatcagatcaaagagctttttattcacactgaggaactggatgagcacctacaaaaaggggttaatatcctgacctcatatatcaacgagctgagaacattcatgattaagtttccttggaaacttactgacgccatcgatgagtacgatgtccacgaaaacgtccctaaggtaaaagaaagcaatatctggaagaaattgtcctttgaagaggtgattgcctcagccatactcaataataaaattcccgaggcacagaccttcttccgtattgattcccatagtgcccagaagctggaagaacttatagggatagggcttaacctcgtattcgataatttgaagaaaaacaacatcaaagaagcatctgagctgctgaaaaatatggggttcgacgttaagggtcagttactgaaaatctgcttctataccacaaacaaaaatatccgggatttccttgtcgagatattaaaagaaaaaaactatttctcggagaaagagaagaggaccattgactttgtgcatcaggtggagaagctctacctgggacactttcaggagaatatgcaaattcagagcttccctcgttactggatcaaagaacaggacttcttcaagcacaaatcagtgctggattccttcctgaaatatgactgcaaagatgagtttaacaagcaggaccatagaattgttctgaattgggcactgtggtgggatcagttgactcaggagtcaatactgctgcccaggatttctcccgaagaatacaagtcttactcgcctgaggccttgtggcgttatttgacagcgcgacatgactggttaaatatcatactttggattggagagtttcaaacccagcacagctatgcctcactgcagcaaaataagtggccacttctgaccgtggacgtcatcaatcaaaacacttcctgtaataactatatgcgaaatgagatactggacaagttggctagaaatggcgtatttctagcctcagagttggaggactttgagtgcttcctgttgcggctctcacgaattggaggtgtcatccaggacacacttcccgtacagaactacaaaactaaagaaggctgggatttccacagccaatttatcttgtactgcctggagcactctttgcagcaccttctgtacgtttatctggattgttacaagctgtcccccgagaattgccccttcctggagaaaaaagagctgcacgaagctcatccatggttcgagttccttgttcagtgccgccaggtggctagcaacctaaccgatccaaaactgatctttcaagcatctctggcaaacgctcaaatcctgatccccaccaaccaggccagtgtctcctcaatgcttctggaaggacacaccctgctggcactcgcaacaacaatgtactcccctggaggggtaagccaggtcgtacagaacgaagaaaatgagaactgcctcaaaaaggtggacccgcagctgctgaaaatggcgctgaccccttatccgaaattgaaaaccgccctattcccacaatgcactcctccaagcgtcctgccttccgatattaccatttatcacctaattcagtctctgtcccccttcgacccaagcagactgtttggctggcagtcagctaatactctcgcaattggcgatgcttggtcacatctccctcacttttcctctccggatctggtaaataagtacgccatcgtagaacgcttgaatttcgcatactatcttcacaatgggcgaccaagttttgcattcggcactttcctcgtccaggagctgataaagagcaagactcctaagcagcttatccagcaggtggggaatgaagcatatgttattggcttaagctccttccacatcccgtcgatcggggcagcatgcgtgtgcttcctcgaactcctcggacttgattcactgaagctgagggtagacatgaaagtggcgaatataatcctgagctataagtgcagaaacgaagatgcacagtacagcttcattagggagtcagtcgcagagaagctctcgaagttggccgatggagagaaaacgacaacggaggagctgcttgttctgctggaagaagggacttggaattctatccagcagcaggagatcaagcggttaagttccgaatcttcttcccaatgggcattggttgtgcagttttgtcgcctgcataacatgaaactgtccatctcctatcttcgggaatgcgctaaagccaatgactggctgcagtttatcattcatagccaactgcataactaccatccagccgaggtgaaatccctgatacaatacttcagcccagtgatccaagaccacctgcggctggctttcgagaatctgcccagcgttcctacaagtaaaatggacagcgatcaggtgtgcaataagtgcccacaagagctccagggctccaaacaggagatgacagacctgtttgagatattactacagtgttccgaggagccggatagttggcattggttactggttgaagctgtgaagcagcaggccccaatcctgtctgtgctcgcttcgtgtctgcagggggctagcgctatcagctgcctctgtgtgtggataataacttctgtagaggacaacgtggccacagaggcaatgggccacatccaggatagtaccgaggaccacacttggaacttggaggatctctccgttatttggcggacattattgacccggcagaagtccaaaacactcataagaggatttcaacttttcttcaaagacagccccctgctgctggtgatggagatgtacgagttgtgtatgtttttcaggaattataaagaagccgaagccaagctcttagagtttcagaagagcctagaaaccttgaatacagctgccaccaaagttcatcctgtgatacccgcaatgtggctggaggatcaggtgtgtttcttgctcaaactcatgttacagcaatgcaaaacccagtacgagctcggaaaacttctgcagctcttcgtggagagagagcacctgttctcagacggcccagacgtgaagaaactctgcattttatgtcaaattctgaaggacacctccatcgcaatcaaccacactattattacctcttacagcatcgaaaacctgcagcacgaatgcaggagtatcctggagcgcttgcaaacggatggtcagtttgctctggcaagaagggtcgccgagctggccgagctgccagtcgataacctcgtgatcaaggaaattactcaggaaatgcaaaccctcaaacacatagaacagtggtcattgaaacaagcccgtattgacttttggaagaagtgtcacgagaactttaagaagaactctataagctccaaagccgcaagcagcttttttagtactcaggcccatgtggcctgcgagcaccctaccggatggagcagcatggaagagcgccacctgctgttaaccctggccggtcattggctcgcccaggaggatgtggtgcctctggacaagctggaggaactggagaaacagatctggctatgtcgcatcacacagcataccctcggcaggaatcaggaagaaaccgaaccacggttttcgagacaaatctctactagtggggaactgagctttgactccctggctagcgagttttcattctctaaactcgctgctctgaatactagcaagtatttggagctcaattccttacccagcaaggagacctgcgaaaaccgcctggattggaaagaacaagagagtctgaatttcctgatcggccgtctgctggacgatggatgcgtgcacgaggcgtctagggtctgcagatatttccacttctacaatcccgatgtggccctggtgctccactgtcgggctctcgcttccggcgaagcaagtatggaggacctgcaccccgagattcatgcactgctccaaagcgccgagctgctggaggaggaagcccctgatattcccctgcggagggtgcactctacatcaagtctggatagccaaaagttcgtgaccgtcccttcgtctaacgaggtagtcactaacctcgaggtgttgacttctaagtgtttgcacggtaagaactattgccgacaggtgctttgtctctatgacttagctaaggagctggggtgtagctataccgatgtggccgcacaggatggcgaagctatgcttcgtaagattctggcctcacagcagcctgacagatgcaagagggcacaggctttcatctccacccaggggctcaaacccgacacagtcgctgaacttgtggctgaggaagtgacaagggaactcctcacttcttcacaaggcaccggccacaaacaaatgttcaaccctaccgaggagagccagacgttcctgcagttgaccactctctgccaggacagaacactggtcggaatgaaactcctcgataagatctcatctgtgccgcacggagaattgtcttgcacgactgagttactcattctagcgcaccactgctttaccctaacatgccacatggaggggattattcgagtcctgcaggcagcacacatgcttactgacaaccaccttgccccaagcgaagaatacggccttgtagttcggctcttgacaggtattgggcgatacaatgaaatgacttacatcttcgatttactccacaagaagcactactttgaagtgctgatgcgcaagaagctggacccttctggaacactgaaaaccgcgttgttagactatatcaaacgctgtcggccaggggatagcgagaagcataatatgattgccctttgtttttccatgtgcagggagattggtgaaaaccatgaggcagccgcacggattcaactcaaacttatcgaatctcagccgtgggaggattccttgaaggatggccaccagctcaaacagttgcttcttaaggctttaactctgatgctggacgcagccgaaagctatgccaaggacagctgcgtgcggcaggcccagcactgccagcgcctgaccaagctgatcacgttgcagattcactttctgaataccggccagaataccatgctgattaatctagggcgtcacaagctaatggattgtatcttagcactgccaaggttttatcaagcctcaatcgtggctgaggcatatgacttcgtcccagactgggcagagatcctgtaccagcaggtaatactgaagggtgacttcaattatttagaagaatttaaacagcagagactgcttaaatccagcatttttgaggagatttccaagaagtacaaacaacatcagcctaccgatatggttatggaaaacctaaagaagttgcttacatattgtgaggatgtgtatctttactacaagctggcatacgagcacaaattttatgagattgtcaatgtcctgctgaaagaccctcagaccggttgctgcctgaaggacatgctggctggtta

SEQ ID NO: 218032 - DNA, 6239 bp, Artificial Sequence
  derived and/or modified sequence
atggctgccgaagagggcgtagcgtcggctgcgtcagccggaggtagctggggtacagcagcgatgggacgcgtcctgccaatgttgctcgtccccgtgcctgcagaagctatggggcagttaggatccagggctcagctcagaacccagccggaagcccttggatcacttaccgcggcaggtagcctccaggttctcagcctcacccccggatcgagggggggaggtcgctgttgtttagaggggcctttctggcattttctttgggaagactccaggaactcctctacgcccactgagaaacccaaacttctcgcattgggggaaaattacgagctcctgatttatgaatttaatttgaaggacggtcggtgtgatgctaccatcctgtattcctgttctagggaggccttacagaaattaatcgacgatcaagacatttccatctcactcctgtccctgcgcatcttaagtttccacaataacacaagcctgctgtttatcaataaatgcgttattctgcacataattttcccagagagagacgctgctatccgggtcctgaactgctttacgcttcccctccccgctcaggccgtggatatgatcatcgacacacagctctgtcgtggcatccttttcgtccttagctcactcgggtggatctacatcttcgacgtcgtggacgggacctacgtggcccatgtcgacttggctctgcataaggaggatatgtgcaacgagcagcagcaggagccggcaaaaatttcatcatttacatcattgaaggtctcccaggatctcgatgttgctgtgatcgtgtcctcttccaattctgcggtggcgctgaacctgaacttatatttcaggcaacaccccggtcacctcctgtgcgaacgcatactggaggatctaccaatccaaggcccaaaaggtgtggacgaggatgatcccgttaattcggcatataacatgaagctggcgaagttctcatttcagattgacagatcctggaaagcccagctgagtagtctcaatgaaaccattaaaaactcaaagctagaggtttcttgctgtgctccctggttccaggatattctgcacctcgaaagcccggagtctgggaaccactcgacgtctgtgcagtcatgggccttcatcccacaggatatcatgcacgggcaatataacgttctacagaaagatcacgcaaagacaagtgatccagggcgatcttggaaaatcatgcatatatctgagcaggaggaaccaatcgagctcaaatgtgtgagcgtgactgggttcacagcccttttcacctgggaggtggagcgcatgggatataccatcacgctgtgggacctggaaacgcaggggatgcagtgtttttccctcggaactaagtgtattccggtggactcttcaggtgaccagcagctctgcttcgtcctcacagagaacgggctgtccctcattctgtttggacttacacaagaggagtttctcaatcgccttatgatccacgggtcagcatctaccgttgatacactttgccatctcaatgggtggggcagatgttctatcccgattcatgccctggaggccggtattgagaatcggcagttggacaccgtgaatttcttcctgaagagcaaggagaacctgttcaacccttcatccaagtccagcgtaagcgatcagtttgaccatttatctagccatctctatttacgaaatgtggaggagctgattcccgcactggatctgctgtgctccgctattagagagtcgtacagcgagccccagtccaaacacttcagcgagcaattactgaacctgaccctaagcttcctgaataatcaaattaaagagctgttcatccacaccgaagagcttgacgaacatttacagaaaggcgtaaatatactgacgtcctatatcaatgagctcaggacattcatgatcaaattcccctggaaactgaccgacgcaatcgacgagtacgatgtccatgagaatgttcctaaagtgaaagagagcaacatttggaagaaactttcttttgaggaggtaatcgcgagcgccatcctcaataacaagattcccgaggcacaaaccttttttcgtattgatagccactccgcacagaaactcgaggaattgattggcatcggcctcaatcttgtgtttgataatttaaaaaaaaacaatatcaaagaagcaagcgaactcctgaagaacatgggctttgacgtcaaagggcagctgctcaagatctgcttttatacaactaataaaaacatcagggacttcctggttgaaattctgaaggaaaagaattacttctcagaaaaagagaaaagaaccatcgattttgtccaccaagtcgagaagctgtacctgggtcatttccaagagaacatgcaaatccagagttttcccagatactggataaaggagcaggattttttcaagcacaagtcagtcctggattcattcctgaaatatgattgcaaggacgaattcaataaacaggatcaccgtattgtgttgaactgggccctgtggtgggatcagctgacgcaggagtctatactcctccctcgcatttcaccagaggagtacaaaagctacagccccgaagccctatggaggtatctcactgctcgacatgactggctgaatatcatcttgtggatcggagaattccagacacagcacagttacgcctccctgcaacagaacaaatggcctctcctgacggtggacgtgatcaatcagaatacctcctgtaacaactatatgcggaatgaaatcctagataaactcgcccgaaacggggtgttcctcgcttcggagctggaagatttcgagtgttttctgcttcggctgtctcgcattggcggagtgattcaagacacactgccagtgcaaaactacaaaacaaaggagggatgggacttccattcacagttcattctctactgcttggagcacagtctccaacaccttctttacgtctacctggattgctacaagctgagccctgagaattgcccattcttggagaagaaagagcttcatgaggcacatccttggtttgaatttctcgtgcaatgtagacaagtcgctagtaacctcacggaccctaaactgatttttcaggcgagcctggcgaacgctcaaatcctcattcctacaaaccaggcctcagtctcctcgatgctgttggaaggccacactctcctcgccctggccactacaatgtacagtcccggaggcgtgtcccaggtcgttcaaaacgaagagaacgagaattgtctgaaaaaggtcgaccctcagctcctgaaaatggcgcttaccccataccccaagttgaaaacggccctgttcccccaatgcactccaccaagcgtcttgccatctgacatcacaatttaccatctgattcaatcattaagccccttcgatcccagccggttgttcggctggcagtctgccaatactctggccattggcgacgcctggagccatttacctcacttttccagccccgacttggtaaacaagtacgctatcgtggagcggctgaatttcgcatattacctacataatggtcggcctagtttcgctttcggcacctttttggtgcaggagctgattaagtcgaaaactcccaagcaactgatccagcaggtgggaaacgaggcctacgtgattgggctctcttcttttcacatcccatcaatcggggcagcgtgtgtctgtttcctggaactactgggactagattccctcaagcttagagtggacatgaaagtagcgaatatcattctgtcttacaagtgtcggaacgaagacgcccagtattcatttatccgtgagagtgtggccgagaagttatccaaactggctgatggagagaagacaacgacagaagagctgctggtgctcttggaggaaggaacctggaacagcattcagcagcaggagattaaaaggctgagctccgagtcctcttcccaatgggccctggtggtgcagttttgtcgcctccacaacatgaaactctccatctcctacctaagagagtgcgcaaaagccaatgattggctgcagtttatcattcactcacaattgcacaattatcacccagctgaagttaaaagtttgatccagtattttagcccagtgatccaggaccacctccgcctcgctttcgaaaatctgccaagtgtaccaacttctaagatggacagcgaccaggtttgcaataaatgcccccaggagctgcaaggatctaagcaggagatgactgatctcttcgagatcttgcttcaatgtagtgaagagcccgatagctggcactggctcttagtggaagccgtgaaacagcaagctcccatactttctgtgctcgcttcatgcctgcagggtgcctctgcaatctcatgtttatgtgtgtggatcattacatctgtggaggataacgtggcgaccgaggccatgggtcacatacaggatagcacagaagaccacacatggaatctcgaggacctgtctgtgatctggaggactctactgacacgtcagaaatctaaaactttgatcagggggttccagctgttcttcaaagattctcctctcctcctcgttatggaaatgtatgaattgtgcatgtttttcaggaattataaagaggccgaggcgaagttgctcgagttccagaaaagccttgaaaccctgaataccgctgccacgaaggtgcacccagtcatacctgccatgtggctggaggaccaggtgtgtttccttctgaagctgatgctgcagcaatgcaaaactcagtatgaattgggcaagctgctgcagcttttcgtggagcgggaacacctcttctcagacggccctgacgtaaaaaaactgtgtatactctgtcagattctgaaggacactagcattgctataaatcacacaatcattaccagctatagtattgagaacctgcagcatgaatgcagaagcatccttgagaggctgcaaaccgatggtcagttcgcgctagcgagacgggttgcagaactggctgaactgcccgtggacaacttagtgatcaaagaaatcacccaggaaatgcagaccctcaagcacatcgaacagtggagcctgaaacaggccaggattgatttttggaaaaagtgtcacgaaaactttaagaagaatagcatcagcagcaaagcggctagttccttcttcagcacgcaagcccatgtagcctgcgagcacccaacagggtggagttctatggaggaaaggcacctgcttttgaccctcgccggacattggttggcccaggaggacgtggttccactggacaaactggaggaactcgaaaaacagatctggctgtgtcgtattacccaacacacacttggcagaaatcaggaagaaaccgagcctcgcttttccaggcagatttcgacatccggtgaactttcatttgattcattggcatctgagttctccttctccaaacttgccgcactaaacacgtctaagtatctagagcttaattcgctcccatccaaagagacatgcgaaaacaggctagattggaaggagcaggaatccctgaattttttgatagggagacttctagatgatgggtgtgtgcacgaggcttcaagagtgtgccgatatttccatttctacaatcccgacgtagcattggttctgcattgccgagcccttgccagcggcgaggcctccatggaggacttgcatccagagatccatgctctcttgcagtctgcagaattgctcgaagaagaggccccagacatccccctgcgacgggttcacagcaccagttccttagattcgcagaagttcgtgaccgtcccatcatcgaatgaagtggtaacaaacttagaggtactcacatccaagtgtcttcatgggaagaattattgtaggcaggtgctctgtctttatgacctggccaaagagctgggctgttcgtacaccgatgtggcagcacaggatggtgaggctatgttgaggaagattcttgcctcccaacaacccgaccggtgcaagagggcccaagcctttatttccacccaagggctcaagccagatacggtagccgagctcgtcgccgaggaggtcacccgggagcttcttacaagctctcagggcaccggcgctctgccaccgggagactcgcagcctttgta

SEQ ID NO: 218033 - DNA, 7774 bp, Artificial Sequence
  derived and/or modified sequence
gtaaccgccgggccaagatggctgcagaggaaggggtcgcgagtgctgcttccgccggcggtagctggggcaccgcggccatggggcgggttctaccgatgctgttggtgccagtccccgccgaggcgatggggcagctcggctcccgggcgcagctgcgcacacagccggaggctctggggagcctgacggctgcgggcagcctccaagtgctttctttgacgcctggcagccggggcgggggtcgctgctgcctggagggccccttctggcactttctatgggaggattctcgtaacagcagcacaccaactgaaaagcccaaactgctcgctcttggtgaaaattatgaactgcttatctatgaatttaatttgaaagatggaagatgtgatgcaaccattttgtatagctgtagtagggaggcattgcaaaagctcattgacgatcaagatatcagtatttccttattgtctttgagaatcctgtcatttcacaataacacatcattactgttcatcaacaaatgtgtcatcctacatattatatttcctgaaagagatgctgcaattagagtactcaactgtttcacacttcccttgcctgcacaggcagtggacatgattattgacacgcagctctgcagaggaattctttttgttttgagtagtttaggctggatctacatttttgatgttgtggatggtacatatgtagctcatgtggatttagcacttcacaaagaagacatgtgtaatgagcagcaacaggagccagccaagatttcttcatttacttcactgaaagtttctcaagacctcgatgttgcagtgattgtcagctcctccaactccgcagttgctcttaacttaaatttgtatttcaggcaacacccaggacacctactgtgtgaaagaatactagaagatcttcctattcaaggacctaagggcgtagatgaagatgatcctgttaactctgcctacaacatgaaactggccaagttttccttccaaattgataggtcttggaaagcccagctatcatcattgaatgaaacaataaagaactccaaactggaggtttcctgttgtgctccatggttccaggatattttgcatttggagtcacctgaatctggtaaccacagtacaagtgtgcagagctgggccttcattccacaggacataatgcatgggcaatataatgttctacagaaagatcatgccaagaccagtgatccaggaagatcatggaaaataatgcacatcagtgaacaagaggaacccatagagcttaaatgtgtgtctgtgacaggattcactgcactgtttacttgggaagtggaaaggatgggctataccattaccctctgggatttggagacccagggcatgcagtgtttttcccttggcacaaagtgtattcctgtagacagtagtggagaccagcagctgtgctttgttttgacagagaatggactctctctgattttgtttggtttgactcaagaagagtttttaaacagactcatgatccatggaagtgccagcactgtggacactctttgtcatctcaatggctggggaaggtgctcaattcccatacatgcactagaggccgggatagaaaatcgtcagctggacacagtaaatttctttttgaagagcaaggaaaatctttttaatccatcctcaaaatcttctgtatctgatcagtttgatcacttgtcatcccatttatatttaagaaatgtggaagagctgataccagcattggatttactttgctcggcaattagagaaagttattctgaaccccaaagcaaacacttttcagaacaattgcttaatcttacactgtctttccttaacaaccaaataaaggagcttttcattcacactgaagaactagatgaacatctgcaaaaaggagtgaacattttgactagctacattaatgaacttcgaaccttcatgataaagtttccttggaagctaacagatgctatagatgaatatgatgtacatgaaaatgtccccaaagtaaaggagagcaatatatggaagaaactcagctttgaggaagttattgccagcgccattttaaacaacaaaataccagaggcacagactttcttcaggattgatagtcattctgctcaaaaacttgaggagcttattggcataggcctaaatttggtctttgacaatttaaaaaagaacaatataaaggaagcctctgaacttttgaagaatatggggtttgatgtaaaaggccaattgctcaagatctgcttctatacaactaataaaaatatacgtgactttttggttgaaattttaaaagaaaaaaattatttttctgaaaaagagaaaagaactatagacttcgtgcatcaagttgagaagctttatttgggacatttccaagaaaatatgcaaatccagtcatttcccaggtactggataaaggaacaagattttttcaagcacaagtctgttttggactcattcctgaaatatgattgtaaagatgaatttaacaaacaggaccatagaattgtgttaaattgggctctgtggtgggatcaactaacacaagaatccatccttctccccaggataagtccagaagaatacaaatcatattcccctgaagccctctggagatacctcacagctcgccatgattggttaaacattatcttatggattggagaatttcaaacccagcatagttatgcttcacttcagcagaacaaatggccccttctgactgttgatgttattaaccagaatacttcctgtaacaactacatgaggaatgaaattttagataagctggccaggaatggggtttttttggcatctgaactggaagactttgaatgcttcctcctaagactgagccgtattggaggtgtaatacaggataccctccctgttcaaaactacaagaccaaagaaggttgggatttccattctcaattcattctctattgtttggagcacagtctgcagcatcttctttatgtctaccttgactgttacaaacttagtcctgaaaattgtccctttttggaaaaaaaagagttacatgaagcacacccttggtttgaatttttagttcagtgtcgacaagttgccagtaacttaacagatcccaaactgatcttccaggctagccttgcaaatgctcagattttgattcccaccaatcaggccagtgtaagcagtatgctattggaaggacataccctcctggcccttgctactacaatgtattctcctgggggtgtcagtcaggttgttcagaatgaagaaaatgaaaactgtttgaagaaagtggatccccagctattgaagatggcattaactccttaccccaagctaaaaactgctctcttcccacagtgcactcctcctagtgtcctgccatctgatattacaatctaccaccttattcagtcattatcaccctttgatcctagcagattgtttggctggcagtctgctaacacactagctataggagatgcatggagtcatctcccacatttctctagccctgacctggttaataaatatgctatagtggaacgtctgaattttgcttattatttacataatgggcggccatcatttgcatttggtacttttctggtccaggaattaatcaagagcaagactcccaagcagctgatccagcaagtaggcaatgaagcctatgttatagggctctcctccttccacataccttcaataggagctgcatgtgtttgtttcttagaattgcttggccttgacagcctcaagctcagagttgatatgaaagtggccaatataattttgagctacaagtgcagaaatgaagatgctcagtacagctttatcagagagtctgtagccgaaaaactatctaaactagctgatggtgaaaagacaaccacagaagaattgcttgttctcttagaagaaggtacatggaacagcattcagcaacaggaaataaagaggttatccagtgaatctagcagccaatgggcattagtggtgcagttctgcaggctacacaatatgaaactaagcatatcttaccttagagaatgtgccaaagcaaatgattggctgcagttcattattcacagccaactccacaactaccacccagcagaggtgaaatcccttatccagtacttcagcccagtcattcaagaccacttaaggctggcttttgagaacttgccctcagtgcccacctccaaaatggacagcgatcaagtctgcaataagtgcccccaggaacttcaaggaagcaaacaagagatgaccgatttatttgaaattctgctccaatgctcagaggagccagactcctggcactggcttctggttgaagcagtgaaacaacaggcccctatcctcagtgttctggcctcatgtctccagggtgccagtgccatttcttgtctctgtgtttggatcatcacttctgtggaggacaatgttgcaactgaagcaatgggacacattcaggactcaacagaggaccatacctggaaccttgaggatctttcagtcatctggagaacattattaacaagacaaaagagcaaaactctcatcagaggtttccagcttttctttaaggattccccgttactactggtgatggagatgtatgaactgtgtatgttcttcaggaattataaagaagctgaagctaaacttctggagtttcagaagagccttgaaacgcttaacacagcagccacaaaggtccaccctgtcatccctgccatgtggctggaggatcaggtgtgtttccttttgaagcttatgctacagcagtgtaagacccagtatgagctggggaagcttttacagctctttgttgaaagagagcatctcttctctgatggtccagatgtgaaaaagctttgcatcctttgccagattttgaaggatacatccatagccattaatcatacaattattaccagctacagcattgagaatcttcagcatgaatgtagatctattttggaaagactgcagacagatggacaattcgctttggccaggagggtagcagaattagctgagttacctgtggacaacttggttattaaagagataacacaggaaatgcagaccctaaaacacattgaacagtggtcactaaaacaagcaagaattgacttctggaaaaaatgccatgagaattttaagaaaaattcaatttcaagcaaagcagcttcttcctttttctcaacccaggcccatgtggcatgtgagcacccaactggatggagcagcatggaggagcgccatctgctgctcaccttggcagggcactggcttgcccaggaggacgtggtgcccttggataagctggaggagctggagaagcagatctggctgtgccgcatcacccagcacactcttggaagaaatcaggaggaaacagagcccagattttctcgacagatctcaactagtggtgaactttcctttgatagtttagccagtgagttttccttctccaagttggctgctctgaacacatcaaaatacttagaacttaacagccttccatccaaagagacatgcgagaatagattggattggaaagagcaggagtcactaaactttttgattgggcgcctactggatgatggctgtgtgcatgaagcaagtagagtatgccggtattttcatttttataatccagatgtcgccttggtattgcactgcagagcactggcctcaggggaagctagtatggaggatctgcacccagagatccatgctctcctacaaagtgctgagctgcttgaggaagaagcacccgacattcccctaaggagagtccacagcacttcaagtctggatagtcagaagtttgtgacagtgccctccagtaatgaagtggtaactaacctggaagtgctgacaagcaaatgcctccatgggaagaactactgtcgacaggtcctctgtctgtatgatcttgccaaggagttgggctgttcctacacagatgttgctgctcaggatggtgaagccatgctccggaaaatcttggcctctcagcagcctgaccgatgcaaacgagcccaggccttcatcagcacacagggccttaagccagatactgtggctgaactcgtggcagaagaggtgacacgggagctgcttacttcatcacagggaacaggacataagcagatgttcaacccaacagaggaaagccagacatttcttcagctgaccactctgtgtcaagaccgcacattggtaggcatgaagttgttggataagatttcctccgttccccatggggaactgtcttgcaccacagagctcctgatcctggcccatcattgcttcaccctgacgtgccacatggagggcatcatccgagtcctacaggccgcccacatgctcacagataaccacctggcccccagtgaggagtatgggctggtggtacggctcctcactggcattggaaggtacaacgagatgacatacatatttgatttgctgcataaaaagcactactttgaagtgctaatgaggaagaagttggatccgagtggtaccctgaaaacagccctgctggactacatcaaacgctgccgtcctggagacagtgaaaagcacaatatgattgccctgtgcttcagcatgtgccgggagattggcgagaaccacgaggcagctgcccgcatccaactgaaattgattgagtctcagccctgggaggacagcctcaaggatgggcaccagctgaaacaactgctgctgaaggccctgactctgatgttggatgcagcagagagttatgccaaggactcctgtgtgcgacaggcccagcactgtcagcggctcaccaagttgataactctgcagattcactttctgaacactggccagaacacaatgctcatcaacttgggccgccacaagctgatggactgtattctggccctacctcggttctaccaggcttctattgtggctgaggcctacgattttgttccagattgggctgaaattttataccagcaagtgattcttaaaggagactttaattacttggaagaatttaagcagcaaaggttattaaagtccagtatatttgaagagatttccaaaaaatataaacaacatcagcctactgacatggtcatggaaaacctgaagaaattactcacatattgtgaagatgtttacctgtattacaagttggcatacgaacacaagttttatgaaattgtaaatgtgcttctgaaggaccctcagacaggttgctgtctaaaggacatgctagcaggttagatgatttcataggtgtctgttttcttgtactgttagcagattctgacagatgtgatgagaagaagaatgcattggagatctttgctaaagttgaacaatcccggtactgtaccatatcagtcctttgtgggtagtaggtagcaagtaagaaacttttcaggaggaaattcctatttaaaatagattgattttagatgattgttcatccacaccattttatatagatactagtattaagatcaaaagcttcctcttcctcaggacagcttctactttagatgatccaataatgattaaagaatacctgtacctgcagattccagtttcaaagaaatttaattattatttacacagttaaggaacaggtgatacattttcatttgttagaaactgatctttctgtaataaaatagattttcaattca

SEQ ID NO: 218034 - DNA, 6426 bp, Artificial Sequence
  derived and/or modified sequence
gaaagtgaccggaagtaaccgccgggccaagatggctgcagaggaaggggtcgcgagtgctgcttccgccggcggtagctggggcaccgcggccatggggcgggttctaccgatgctgttggtgccagtccccgccgaggcgatggggcagctcggctcccgggcgcagctgcgcacacagccggaggctctggggagcctgacggctgcgggcagcctccaagtgctttctttgacgcctggcagccggggcgggggtcgctgctgcctggagggccccttctggcactttctatgggaggattctcgtaacagcagcacaccaactgaaaagcccaaactgctcgctcttggtgaaaattatgaactgcttatctatgaatttaatttgaaagatggaagatgtgatgcaaccattttgtatagctgtagtagggaggcattgcaaaagctcattgacgatcaagatatcagtatttccttattgtctttgagaatcctgtcatttcacaataacacatcattactgttcatcaacaaatgtgtcatcctacatattatatttcctgaaagagatgctgcaattagagtactcaactgtttcacacttcccttgcctgcacaggcagtggacatgattattgacacgcagctctgcagaggaattctttttgttttgagtagtttaggctggatctacatttttgatgttgtggatggtacatatgtagctcatgtggatttagcacttcacaaagaagacatgtgtaatgagcagcaacaggagccagccaagatttcttcatttacttcactgaaagtttctcaagacctcgatgttgcagtgattgtcagctcctccaactccgcagttgctcttaacttaaatttgtatttcaggcaacacccaggacacctactgtgtgaaagaatactagaagatcttcctattcaaggacctaagggcgtagatgaagatgatcctgttaactctgcctacaacatgaaactggccaagttttccttccaaattgataggtcttggaaagcccagctatcatcattgaatgaaacaataaagaactccaaactggaggtttcctgttgtgctccatggttccaggatattttgcatttggagtcacctgaatctggtaaccacagtacaagtgtgcagagctgggccttcattccacaggacataatgcatgggcaatataatgttctacagaaagatcatgccaagaccagtgatccaggaagatcatggaaaataatgcacatcagtgaacaagaggaacccatagagcttaaatgtgtgtctgtgacaggattcactgcactgtttacttgggaagtggaaaggatgggctataccattaccctctgggatttggagacccagggcatgcagtgtttttcccttggcacaaagtgtattcctgtagacagtagtggagaccagcagctgtgctttgttttgacagagaatggactctctctgattttgtttggtttgactcaagaagagtttttaaacagactcatgatccatggaagtgccagcactgtggacactctttgtcatctcaatggctggggaaggtgctcaattcccatacatgcactagaggccgggatagaaaatcgtcagctggacacagtaaatttctttttgaagagcaaggaaaatctttttaatccatcctcaaaatcttctgtatctgatcagtttgatcacttgtcatcccatttatatttaagaaatgtggaagagctgataccagcattggatttactttgctcggcaattagagaaagttattctgaaccccaaagcaaacacttttcagaacaattgcttaatcttacactgtctttccttaacaaccaaataaaggagcttttcattcacactgaagaactagatgaacatctgcaaaaaggagtgaacattttgactagctacattaatgaacttcgaaccttcatgataaagtttccttggaagctaacagatgctatagatgaatatgatgtacatgaaaatgtccccaaagtaaaggagagcaatatatggaagaaactcagctttgaggaagttattgccagcgccattttaaacaacaaaataccagaggcacagactttcttcaggattgatagtcattctgctcaaaaacttgaggagcttattggcataggcctaaatttggtctttgacaatttaaaaaagaacaatataaaggaagcctctgaacttttgaagaatatggggtttgatgtaaaaggccaattgctcaagatctgcttctatacaactaataaaaatatacgtgactttttggttgaaattttaaaagaaaaaaattatttttctgaaaaagagaaaagaactatagacttcgtgcatcaagttgagaagctttatttgggacatttccaagaaaatatgcaaatccagtcatttcccaggtactggataaaggaacaagattttttcaagcacaagtctgttttggactcattcctgaaatatgattgtaaagatgaatttaacaaacaggaccatagaattgtgttaaattgggctctgtggtgggatcaactaacacaagaatccatccttctccccaggataagtccagaagaatacaaatcatattcccctgaagccctctggagatacctcacagctcgccatgattggttaaacattatcttatggattggagaatttcaaacccagcatagttatgcttcacttcagcagaacaaatggccccttctgactgttgatgttattaaccagaatacttcctgtaacaactacatgaggaatgaaattttagataagctggccaggaatggggtttttttggcatctgaactggaagactttgaatgcttcctcctaagactgagccgtattggaggtgtaatacaggataccctccctgttcaaaactacaagaccaaagaaggttgggatttccattctcaattcattctctattgtttggagcacagtctgcagcatcttctttatgtctaccttgactgttacaaacttagtcctgaaaattgtccctttttggaaaaaaaagagttacatgaagcacacccttggtttgaatttttagttcagtgtcgacaagttgccagtaacttaacagatcccaaactgatcttccaggctagccttgcaaatgctcagattttgattcccaccaatcaggccagtgtaagcagtatgctattggaaggacataccctcctggcccttgctactacaatgtattctcctgggggtgtcagtcaggttgttcagaatgaagaaaatgaaaactgtttgaagaaagtggatccccagctattgaagatggcattaactccttaccccaagctaaaaactgctctcttcccacagtgcactcctcctagtgtcctgccatctgatattacaatctaccaccttattcagtcattatcaccctttgatcctagcagattgtttggctggcagtctgctaacacactagctataggagatgcatggagtcatctcccacatttctctagccctgacctggttaataaatatgctatagtggaacgtctgaattttgcttattatttacataatgggcggccatcatttgcatttggtacttttctggtccaggaattaatcaagagcaagactcccaagcagctgatccagcaagtaggcaatgaagcctatgttatagggctctcctccttccacataccttcaataggagctgcatgtgtttgtttcttagaattgcttggccttgacagcctcaagctcagagttgatatgaaagtggccaatataattttgagctacaagtgcagaaatgaagatgctcagtacagctttatcagagagtctgtagccgaaaaactatctaaactagctgatggtgaaaagacaaccacagaagaattgcttgttctcttagaagaaggtacatggaacagcattcagcaacaggaaataaagaggttatccagtgaatctagcagccaatgggcattagtggtgcagttctgcaggctacacaatatgaaactaagcatatcttaccttagagaatgtgccaaagcaaatgattggctgcagttcattattcacagccaactccacaactaccacccagcagaggtgaaatcccttatccagtacttcagcccagtcattcaagaccacttaaggctggcttttgagaacttgccctcagtgcccacctccaaaatggacagcgatcaagtctgcaataagtgcccccaggaacttcaaggaagcaaacaagagatgaccgatttatttgaaattctgctccaatgctcagaggagccagactcctggcactggcttctggttgaagcagtgaaacaacaggcccctatcctcagtgttctggcctcatgtctccagggtgccagtgccatttcttgtctctgtgtttggatcatcacttctgtggaggacaatgttgcaactgaagcaatgggacacattcaggactcaacagaggaccatacctggaaccttgaggatctttcagtcatctggagaacattattaacaagacaaaagagcaaaactctcatcagaggtttccagcttttctttaaggattccccgttactactggtgatggagatgtatgaactgtgtatgttcttcaggaattataaagaagctgaagctaaacttctggagtttcagaagagccttgaaacgcttaacacagcagccacaaaggtccaccctgtcatccctgccatgtggctggaggatcaggtgtgtttccttttgaagcttatgctacagcagtgtaagacccagtatgagctggggaagcttttacagctctttgttgaaagagagcatctcttctctgatggtccagatgtgaaaaagctttgcatcctttgccagattttgaaggatacatccatagccattaatcatacaattattaccagctacagcattgagaatcttcagcatgaatgtagatctattttggaaagactgcagacagatggacaattcgctttggccaggagggtagcagaattagctgagttacctgtggacaacttggttattaaagagataacacaggaaatgcagaccctaaaacacattgaacagtggtcactaaaacaagcaagaattgacttctggaaaaaatgccatgagaattttaagaaaaattcaatttcaagcaaagcagcttcttcctttttctcaacccaggcccatgtggcatgtgagcacccaactggatggagcagcatggaggagcgccatctgctgctcaccttggcagggcactggcttgcccaggaggacgtggtgcccttggataagctggaggagctggagaagcagatctggctgtgccgcatcacccagcacactcttggaagaaatcaggaggaaacagagcccagattttctcgacagatctcaactagtggtgaactttcctttgatagtttagccagtgagttttccttctccaagttggctgctctgaacacatcaaaatacttagaacttaacagccttccatccaaagagacatgcgagaatagattggattggaaagagcaggagtcactaaactttttgattgggcgcctactggatgatggctgtgtgcatgaagcaagtagagtatgccggtattttcatttttataatccagatgtcgccttggtattgcactgcagagcactggcctcaggggaagctagtatggaggatctgcacccagagatccatgctctcctacaaagtgctgagctgcttgaggaagaagcacccgacattcccctaaggagagtccacagcacttcaagtctggatagtcagaagtttgtgacagtgccctccagtaatgaagtggtaactaacctggaagtgctgacaagcaaatgcctccatgggaagaactactgtcgacaggtcctctgtctgtatgatcttgccaaggagttgggctgttcctacacagatgttgctgctcaggatggtgaagccatgctccggaaaatcttggcctctcagcagcctgaccgatgcaaacgagcccaggccttcatcagcacacagggccttaagccagatactgtggctgaactcgtggcagaagaggtgacacgggagctgcttacttcatcacagggaacaggtgccctaccccccggggattcccaacctctctgacagcattctctagttcccagtgttaaggatttggatgttgtgcttatatacatcctgtatgtggttctctcaagtttctggattgcagtaatgtattttgtttaaataaaacaaaatacatgctttattttttacaaaatacatgtacaaaatac

SEQ ID NO: 218035 - protein, 944 aa, Artificial Sequence
  derived and/or modified sequence
MDKKSFEMVLDEIRKAVLTEYKLKAIEYVHGYFSSEQVVDLLRYFSWAEPQLKAMKALQHKMVAVQPTEVVNILNCFTFSKDKLVALELLASNIIDAQNSRPIEDLFRVNMSEKKRCKRILEQAFKGGCKAPHAMISSCGTIPGNPYPKGRPSRINGIFPGTPLKKDGEECTNEGKGIAARILGPSKPPPSTYNPHKPVPYPIPPCRPHATIAPSAYNNAGLVPLANVIAPPPPPYTPNPVGTENEDLSNPSKPIQNQTFSTPASQLFSPHGSNPSTPAATPVPTASPVKAINHPSASAAATVSGMNLLNTVLPVFPGQVSSAVHTPQPSIPNPTVIRTPSLPTAPVTSIHSTTTTPVPSIFSGLVSLPGPSATPTAATPTPGPTPRSTLGSSEAFASTSAPFTSLPFSTSSSAASTSNPNSASLSSVFAGLPLPLPPTSQGLSNPTPVIAGGSTPSVAGPLGVNSPLLSALKGFLTSNDTNLINSSALSSAVTSGLASLSSLTLQNSDSSASAPNKCYAPSAIPTPQRTSTPGLALFPGLPSPVANSTSTPLTLPVQSPLATAASASTSVPVSCGSSASLLRGPHPGTSDLHISSTPAATTLPVMIKTEPTSPTPSAFKGPSHSGNPSHGTLGLSGTLGRAYTSTSVPISLSACLNPALSGLSSLSTPLNGSNPLSSISLPPHGSSTPIAPVFTALPSFTSLTNNFPLTGNPSLNPSVSLPGSLIATSSTAATSTSLPHPSSTAAVLSGLSASAPVSAAPFPLNLSTAVPSLFSVTQGPLSSSNPSYPGFSVSNTPSVTPALPSFPGLQAPSTVAAVTPLPVAATAPSPAPVLPGFASAFSSNFNSALVAQAGLSSGLQAAGSSVFPGLLSLPGIPGFPQNPSQSSLQELQHNAAAQSALLQQVHSASALESYPAQPDGFPSYPSAPGTPFSLQPSLSQSGWQ

SEQ ID NO: 218036 - DNA, 2835 bp, Artificial Sequence
  derived and/or modified sequence
atggacaagaagagcttcgagatggtgctggacgagatcagaaaggccgtgctgaccgagtacaagctgaaggccatcgagtacgtgcacggctacttcagcagcgagcaggtggtggacctgctgagatacttcagctgggccgagccccagctgaaggccatgaaggccctgcagcacaagatggtggccgtgcagcccaccgaggtggtgaacatcctgaactgcttcaccttcagcaaggacaagctggtggccctggagctgctggccagcaacatcatcgacgcccagaacagcagacccatcgaggacctgttcagagtgaacatgagcgagaagaagagatgcaagagaatcctggagcaggccttcaagggcggctgcaaggccccccacgccatgatcagcagctgcggcaccatccccggcaacccctaccccaagggcagacccagcagaatcaacggcatcttccccggcacccccctgaagaaggacggcgaggagtgcaccaacgagggcaagggcatcgccgccagaatcctgggccccagcaagcccccccccagcacctacaacccccacaagcccgtgccctaccccatccccccctgcagaccccacgccaccatcgcccccagcgcctacaacaacgccggcctggtgcccctggccaacgtgatcgccccccccccccccccctacacccccaaccccgtgggcaccgagaacgaggacctgagcaaccccagcaagcccatccagaaccagaccttcagcacccccgccagccagctgttcagcccccacggcagcaaccccagcacccccgccgccacccccgtgcccaccgccagccccgtgaaggccatcaaccaccccagcgccagcgccgccgccaccgtgagcggcatgaacctgctgaacaccgtgctgcccgtgttccccggccaggtgagcagcgccgtgcacaccccccagcccagcatccccaaccccaccgtgatcagaacccccagcctgcccaccgcccccgtgaccagcatccacagcaccaccaccacccccgtgcccagcatcttcagcggcctggtgagcctgcccggccccagcgccacccccaccgccgccacccccacccccggccccacccccagaagcaccctgggcagcagcgaggccttcgccagcaccagcgcccccttcaccagcctgcccttcagcaccagcagcagcgccgccagcaccagcaaccccaacagcgccagcctgagcagcgtgttcgccggcctgcccctgcccctgccccccaccagccagggcctgagcaaccccacccccgtgatcgccggcggcagcacccccagcgtggccggccccctgggcgtgaacagccccctgctgagcgccctgaagggcttcctgaccagcaacgacaccaacctgatcaacagcagcgccctgagcagcgccgtgaccagcggcctggccagcctgagcagcctgaccctgcagaacagcgacagcagcgccagcgcccccaacaagtgctacgcccccagcgccatccccaccccccagagaaccagcacccccggcctggccctgttccccggcctgcccagccccgtggccaacagcaccagcacccccctgaccctgcccgtgcagagccccctggccaccgccgccagcgccagcaccagcgtgcccgtgagctgcggcagcagcgccagcctgctgagaggcccccaccccggcaccagcgacctgcacatcagcagcacccccgccgccaccaccctgcccgtgatgatcaagaccgagcccaccagccccacccccagcgccttcaagggccccagccacagcggcaaccccagccacggcaccctgggcctgagcggcaccctgggcagagcctacaccagcaccagcgtgcccatcagcctgagcgcctgcctgaaccccgccctgagcggcctgagcagcctgagcacccccctgaacggcagcaaccccctgagcagcatcagcctgcccccccacggcagcagcacccccatcgcccccgtgttcaccgccctgcccagcttcaccagcctgaccaacaacttccccctgaccggcaaccccagcctgaaccccagcgtgagcctgcccggcagcctgatcgccaccagcagcaccgccgccaccagcaccagcctgccccaccccagcagcaccgccgccgtgctgagcggcctgagcgccagcgcccccgtgagcgccgcccccttccccctgaacctgagcaccgccgtgcccagcctgttcagcgtgacccagggccccctgagcagcagcaaccccagctaccccggcttcagcgtgagcaacacccccagcgtgacccccgccctgcccagcttccccggcctgcaggcccccagcaccgtggccgccgtgacccccctgcccgtggccgccaccgcccccagccccgcccccgtgctgcccggcttcgccagcgccttcagcagcaacttcaacagcgccctggtggcccaggccggcctgagcagcggcctgcaggccgccggcagcagcgtgttccccggcctgctgagcctgcccggcatccccggcttcccccagaaccccagccagagcagcctgcaggagctgcagcacaacgccgccgcccagagcgccctgctgcagcaggtgcacagcgccagcgccctggagagctaccccgcccagcccgacggcttccccagctaccccagcgcccccggcacccccttcagcctgcagcccagcctgagccagagcggctggcagtag

SEQ ID NO: 218037 - DNA, 2835 bp, Artificial Sequence
  derived and/or modified sequence
atggacaagaagtccttcgaaatggtgttggacgagattcgtaaagctgtcctgacggaatacaagctcaaggctattgagtatgtgcacggctactttagcagcgaacaagtggtggatcttttgcggtactttagctgggccgaaccacagctgaaggcaatgaaggccctgcaacataaaatggttgccgtgcagcccacagaggtcgtgaacattctgaattgcttcacattctcaaaagacaagctggtggcactggaactcctagctagtaacataatcgacgcccaaaacagccgccctattgaggatctctttagggtgaacatgagtgagaagaagcgatgcaagaggattttggagcaggcttttaagggcggatgtaaagctccccatgcgatgatttccagctgcgggactattccagggaacccgtatcccaagggacgcccctcacggatcaatggcattttccctgggacaccccttaagaaggatggcgaagagtgtactaacgaaggtaagggaattgccgcgaggatccttggcccgagtaagccgcccccatcaacatacaatcctcacaagccagtgccctacccaatcccaccttgccgaccgcacgctaccattgcccccagcgcttataataatgccggcctagttccccttgccaacgttatcgcgccaccgccgcccccatacacccctaaccccgtgggcactgaaaatgaagatctatctaatcctagcaagccaatacagaaccagaccttctcaacccctgcgagtcagttgttttctccacacggttctaacccaagcacacccgccgccacaccggtacccacagcctcacctgttaaggctatcaaccaccctagcgcatccgcagctgcaactgttagcggaatgaatctacttaacaccgtactgccggtctttccaggccaggtgtcatctgctgtgcacacccctcagccatctatcccgaaccctacagtgattcgcacccccagcctgccaacggccccagttactagcatacactccacaacaactaccccggttccatccattttctccgggctggtctcactgcctggtccatccgctaccccaaccgccgccacgccaacacccggaccaactccgagatcaacccttggctcaagtgaggctttcgcctcaacaagtgcccctttcacctccctcccgttttccacgtcaagctcagctgccagtacctctaaccctaattccgccagtttatcctcagtttttgctggtctgccactccctttaccacccacaagccagggactgagtaaccccaccccggtcattgccgggggaagcacaccttcagtagccggccccctcggcgtcaacagtcccttactgagcgccttgaagggtttcttaacttcaaacgacaccaatttgatcaactccagcgccctgagtagtgcggtgacttcagggcttgcaagcttgagttcactgacactgcagaacagcgactcaagtgccagcgcacctaacaaatgttatgctccgagtgcaattcctacccctcagcgcaccagcacaccaggtctggccctctttcctggcctgccctccccagtggctaattcaactagtactcccctgacattgcccgtgcagtccccgctcgccacagcagcaagcgcaagtactagtgtgccagtaagttgtgggtcgtcagctagtctgctgcgtggcccccatcccggcacatccgatttgcatattagctcgacaccagccgctaccacacttcccgtaatgataaaaaccgaacccacaagccccacccctagtgcattcaaaggaccatctcatagcggcaaccccagtcatggcacactgggcctgtcaggaaccctgggcagggcttacacttctaccagtgtgcctatctctctgtccgcttgtttaaaccccgcactgagcggtttatctagtctttctacccctttaaatgggtctaatcccctcagtagtatctcgctacctccgcacgggtcgagtacgccaatcgcaccggtctttaccgcgctgccgtccttcaccagcctcaccaataacttccctctgaccggaaacccctctttaaacccatcagtttcgctgccaggaagccttatcgccacaagctctaccgcagcgaccagtacatctttacctcatccttcctccaccgccgctgtgctgtccggcttatcagcttctgcgccagtgagtgcagcaccatttccattaaacctttctactgccgtgccttcgctctttagcgtgacccagggtccactatccagcagcaatccatcttaccccgggttctccgtctctaatacgccgtccgtgactccagctctgccttcattccccggtcttcaggctcccagtactgtcgccgcagtgactcctttacctgttgccgctacagctccctcccctgctcctgtgctgcctgggtttgcaagcgccttcagctcaaacttcaattccgcccttgtcgcacaggccgggctgtcttccggactccaggcagctggtagttctgtcttcccagggttgctgtccctgccaggcattcctggtttcccccagaacccatcccagagctcactccaggaacttcaacataacgccgctgcgcaatcagcactccttcagcaggtgcactcagccagcgccctggaaagttatcccgcccagcccgatggatttccgagctatccttccgcgcctgggactccattctctcttcaaccgagcctatcccaatcaggatggcagtag

SEQ ID NO: 218038 - DNA, 2835 bp, Artificial Sequence
  derived and/or modified sequence
atggacaagaagagctttgagatggtgctggatgagatcaggaaggctgtgctgacagagtacaagctgaaggccatcgagtatgtgcacggctacttcagcagcgagcaggtggtggacctgctgcgctacttctcctgggccgagccccagctgaaggccatgaaggccctgcagcacaagatggtggccgtgcagcccacagaggtggtgaacatcctgaactgcttcaccttcagcaaggacaagctggtggccctggagctgctggccagcaacatcattgatgcccagaacagccggcccatcgaggacctcttccgggtgaacatgtctgagaagaagcgctgcaagaggatcctggagcaggccttcaagggcggctgcaaggcccctcatgccatgatcagcagctgtggcaccatccctggcaacccctaccccaagggccggcccagccgcatcaatggcatcttccctggcacccccctgaagaaggatggagaggagtgcaccaatgaaggcaagggcattgctgcccgcatcctgggccccagcaagcccccacccagcacctacaacccccacaagcctgtgccctaccccatccccccctgccggccccacgccaccatcgcccccagcgcctacaacaatgccggcctggtgcccctggccaacgtgattgcccctcctcctccaccctacacccccaaccctgtgggcacagaaaatgaagacctgagcaaccccagcaagcccatccagaaccagaccttcagcaccccagccagccagctgttcagcccccacggcagcaaccccagcaccccagctgccacccctgtgcccacagccagccctgtgaaggccatcaaccaccccagcgccagcgctgctgccaccgtgtctggcatgaacctgctgaacacagtgctgcccgtcttccctggccaggtgagcagcgctgtgcacaccccccagcccagcatccccaaccccaccgtcatccgcacccccagcctgcccacagcccctgtgaccagcatccacagcaccaccaccacccctgtgcccagcatcttcagcggcctggtgtccctgcccggccccagcgccacccccacagctgccacccccaccccaggccccacccccaggagcaccctgggcagcagcgaggcctttgccagcaccagcgcccccttcaccagcctgcccttcagcaccagcagcagcgctgccagcaccagcaaccccaacagcgccagcctgagctctgtgtttgctggcctgcccctgcccctgccccccaccagccagggcctgagcaaccccacccctgtgattgctgggggcagcaccccatctgtggccggccccctgggcgtgaacagccccctgctgagcgccctgaagggcttcctgaccagcaatgacaccaacctgatcaacagcagcgccctgagcagcgctgtgaccagcggcctggccagcctgagcagcctgaccctgcagaacagcgacagcagcgccagcgcccccaacaagtgctacgcccccagcgccatccccaccccccagaggaccagcaccccaggcctggccctcttccctggcctgcccagccctgtggccaacagcaccagcacccccctgaccctgcctgtgcagagccccctggccacagctgccagcgccagcacctctgtgcctgtgtcctgtggcagcagcgccagcctgctgcggggcccccaccctggcaccagtgacctgcacatcagcagcaccccagctgccaccaccctgcctgtgatgatcaagacagagcccaccagccccaccccatctgccttcaagggccccagccacagcggcaaccccagccacggcaccctgggcctgagcggcaccctgggccgggcctacaccagcacctctgtgcccatcagcctgagcgcctgcctgaacccagccctgagcggcctgagcagcctgagcacccccctgaatggcagcaaccccctgagcagcatcagcctgcccccccacggcagcagcacccccatcgcccctgtgttcaccgccctgcccagcttcaccagcctgaccaacaacttccccctgaccggcaaccccagcctgaaccccagcgtgtccctgcccggcagcctcatcgccaccagcagcacagctgccaccagcaccagcctgccccaccccagcagcacagctgctgtgctgagcggcctgagcgccagcgcccctgtgtctgctgcccccttccccctgaacctgagcacagctgtgcccagcctcttctctgtgacccagggccccctgagcagcagcaaccccagctacccaggcttctctgtgagcaacacccccagcgtgaccccagccctgcccagcttccctggcctgcaggcccccagcacagtggccgctgtgacccccctgcctgtggccgccacagcccccagccctgcccctgtgctgcccggctttgccagcgccttcagcagcaacttcaacagcgccctggtggcccaggccggcctgagcagcggcctgcaggccgccggcagctctgtgtttcctggcctgctgagcctgcccggcatccctggcttcccccagaaccccagccagagcagcctgcaggagctgcagcacaatgctgctgcccagagcgccctgctgcagcaggtgcacagcgccagcgccctggagagctacccagcccagccagatggcttccccagctaccccagcgcccctggcacccccttcagcctgcagcccagcctgagccagagcggctggcagtag

SEQ ID NO: 218039 - DNA, 2835 bp, Artificial Sequence
  derived and/or modified sequence
atggacaagaagagcttcgagatggtgctggacgagatccggaaggctgtgctcaccgaatacaagctaaaggcaattgagtatgttcacggctatttttcctcagagcaggtggtggatctcctgcggtacttcagctgggcagagcctcagctgaaagcaatgaaggctctccagcataagatggttgcagttcagccaacagaggtggtgaatatcctgaactgtttcaccttctcgaaagacaaactggtggccctagaactgctcgccagcaacatcattgacgctcagaattccaggcctatcgaagatctctttagggtgaacatgtctgaaaagaaaaggtgcaaaaggatcctggaacaggccttcaaaggaggctgcaaagccccgcatgcaatgatatcctcttgcggaacgatcccaggcaatccataccctaagggaaggccttccagaattaatggcattttcccagggactccactgaaaaaagatggcgaggagtgcacgaacgaaggcaaaggcatagcagccaggattcttggacctagcaagccgccgccttccacctacaacccgcataagcccgtgccctatcccattccaccatgcaggccacacgccaccattgcaccctctgcctacaataatgccggcctggtaccattggcaaacgtgatcgctcctcctccccccccttacaccccaaatccagtgggcactgagaacgaagatcttagcaatccttccaagccaatccagaaccagactttctccactcctgcttcgcagcttttctcaccgcacggctcaaacccgtccaccccagcagctaccccagtacctaccgccagccctgtaaaggcaatcaaccatccatcagcaagtgctgccgccacagtgtccgggatgaatctgctgaataccgttcttccggtttttcctgggcaggtttcttctgccgtgcacaccccccagcctagtattcccaaccccaccgtgatcagaacacccagccttcctaccgcccctgtaacttctatacacagcactaccaccacacccgtcccgtcgatattttctggattggtcagcctgcctgggcccagcgcaactcctaccgccgcgacccccacgcctggccccacacccaggtccactctgggctcctctgaagcatttgcctctaccagcgcccctttcacaagcctccccttcagtaccagctcgagtgccgcatccacgagcaaccctaatagtgcatcattgtcctccgtttttgccgggcttcccctccccctcccacctacaagccagggcctgtctaaccctacacccgttatcgcaggaggaagcacacctagcgtggctggccctcttggagttaatagcccccttcttagcgccttgaagggatttctgaccagtaatgacacaaatctcatcaatagcagcgcgctgtcctcggcagtcacatctgggctggctagtttgtctagtctcacgttacaaaactccgatagcagcgcatctgcacctaataagtgttatgctccctcagctatccccaccccgcagaggaccagtacaccgggccttgctctctttcccggcttgccatccccagtcgcgaacagcactagtacgcctctgacgctgcccgtgcagagccctctggccaccgccgccagtgcctctacctctgtgcctgtttcctgtgggagctcagcttccttgctgcgcggacctcacccagggacaagtgatttgcatatttcttcaactcccgctgccacgacccttcccgtaatgatcaaaacagaacctaccagccccaccccatcagcatttaaaggtcctagccatagcgggaacccctcacacggcacactggggctttctggtaccctgggcagggcgtacacctctactagcgtcccaatcagcctgtccgcctgcctcaaccccgcacttagcggcctgtctagcctgagcactccgctgaacgggagcaatcctcttagttctataagtcttcctccacacggctcctcaacacccattgcgccagtgttcaccgcattgccatccttcacctctttgactaacaatttcccattgactggaaacccttccctaaatccttcggtttccctcccaggctctctgatcgcgacgagtagcactgcagccacaagtactagcttgccccatccatccagcactgccgccgtgctgagtggactgtctgcttcagcgcctgttagcgccgcgccattcccattgaatctaagtaccgccgtgccaagccttttctctgttacgcaggggcccctcagttcatccaaccctagctaccctggattttccgtcagtaataccccaagcgttaccccggcgctgccctcctttccaggcctacaggcgccttcgaccgtggcagcagtcacgccattgccagtcgcagctacagccccttctcctgcccccgtgcttccaggattcgcaagtgcattctcatctaactttaacagtgccctggtggctcaggccggcctgagctccggccttcaggccgccgggagcagcgtgtttccaggactgcttagtcttccagggatccctggttttccacagaacccatcccagtcttcactgcaggaattgcagcacaacgcagcagcccagagcgccctccttcagcaggtacactctgcaagcgccctggaatcgtatccagcccagcccgacggtttcccaagttacccgtccgctccgggtacccctttcagtctgcaaccatcactgagtcagtcaggttggcaatag

SEQ ID NO: 218040 - DNA, 2835 bp, Artificial Sequence
  derived and/or modified sequence
atggacaaaaaaagttttgaaatggtgttggacgagattagaaaagcagtgttgacggagtataagctcaaggccatcgaatacgtgcatggatatttcagctcggagcaggtggtcgacctccttcggtacttctcctgggcagagcctcaacttaaggctatgaaagccctccaacataagatggtggcagtacagcccaccgaggtggtcaacatcctgaactgttttacgttttctaaagacaaactggttgctctcgagctcctcgctagcaacataatcgatgctcagaatagccggcctatcgaggatctgtttcgggtcaacatgtctgaaaaaaagaggtgtaagcggatcttggaacaggcttttaaaggcggatgcaaggccccacacgccatgattagctcttgtgggacaattcctgggaacccctacccaaaaggacggcctagtagaatcaacggtattttccccggaacgccccttaagaaagatggtgaagaatgcaccaatgaaggtaaagggattgcggctaggatactgggcccaagtaagccacctcctagcacatataacccccacaagccggtgccataccccattccgccttgccgccctcatgctaccatcgccccaagtgcttacaataacgcagggctagtacccctcgctaatgttatcgcccctcctccccctccctatactccaaatccggtcggcaccgagaatgaagatctctcgaatcccagtaagcccatacagaaccagactttttccactccggcatctcagctcttctctccacatggatccaatcctagtacccccgcagccacccctgtacctactgcttcacctgtgaaagcaataaatcacccttcagcgagtgctgccgctacggtctcaggtatgaacttgctgaataccgtcctgcccgtattccccggacaggtgtctagtgcggtacacacaccccaacctagcatccccaatccgacggtgatccggacccctagtctcccgaccgcacccgtaacttccattcattcaaccactaccactccagtgccttctatcttttctgggctagtgagtcttcccggtccctctgctacgcccaccgccgctactccgacacccggaccaacccctaggtccacacttggcagctccgaggcgttcgcctccacctcggctccatttactagcctgcccttctctaccagttcgtctgctgccagcacaagcaacccaaacagcgcttctctgagttctgtgtttgcaggcctgccgctgccactcccccctaccagccaggggctgtctaaccccaccccagtaattgcaggaggatccacaccgagtgtggctggccctctaggagttaacagccccttgctgagcgctttgaaagggttcttgaccagcaacgacaccaatctcataaattcgtccgctctgtctagtgctgtaaccagcgggctggcctccctgtcatccctcacattgcaaaactctgactcctccgcgtccgccccaaacaaatgctatgcccctagcgccattccaacaccacagcgcacgagcactcctggcttagcactgttccctggacttccaagccctgtggcgaactccacgtcgactccgctgactctaccagtgcaaagcccgttggccaccgcagctagtgcaagtactagtgtgcctgtgtcctgcggatcttctgcgagcttattgcggggacctcaccctggcacttctgacttgcacatctctagcaccccagctgcaactactctgcccgtcatgatcaaaacagagccaacaagtcccacacctagcgcatttaagggcccaagccatagtggaaacccctctcacgggacgctggggctttctggaaccttaggcagggcttacaccagtacgagcgtgcccatttccctgtccgcttgtctcaatcctgcactgagtggcctttcatcactgagcactcctttgaatggaagcaaccccctcagtagcatatcattaccaccacatggttccagtaccccgattgcccctgttttcaccgctttacccagttttactagtctcacaaacaacttccccctgacaggaaatccatcattgaacccatccgtcagcctgcctggaagcctgatagctacgtcatccaccgccgctacatccacttcccttccccaccccagcagcacagccgcagtgctgtccggcctatctgccagcgctccagtgtctgccgctcctttccccctgaatttgtccacagccgtcccttctctgttttcagtgacacagggccctttatcgagttctaacccttcgtacccgggattctcagtctccaacaccccatctgttacacctgcgctcccatcatttccgggactgcaggccccatctactgtagcggcagtgacgcccctgccagtcgccgcaaccgcgccatcaccagccccagtgctgccaggcttcgcaagcgcctttagcagcaactttaatagtgccctcgttgctcaggcgggattgagctcaggcctacaggctgccggttcatctgtcttccccggtttgctgtctctgcctggtatcccgggtttcccacagaacccatctcagagcagcttgcaggagctgcagcataacgcagcggctcaaagcgcactgctccagcaggtgcactctgcatcagcattagagtcttaccctgcacagcctgatggtttcccttcttacccttcagcgccaggcaccccattttcactgcagccttccctgagtcaaagcggatggcaatag

SEQ ID NO: 218041 - DNA, 5168 bp, Artificial Sequence
  derived and/or modified sequence
ccaagctggcggcgcagtgttgagtttacttgggcgcgactggctttattgtaggtccccatgagctggtgggggctgtaggggtaaccaggcagggcgtctggcgctgttggggctgcgtttttccggagtccccctatgcgaggccgtgcccctcttcgcccggctcctggtgctccccagccgccggcccgctcccggaagctgcagcagctggtaacaaagagcctgccgggccgcctgctgccggggccgaggtatccaggagtcgggcggagcggctggggatgagcgcgagccggaccatgcgtccgggttcgcggcggtgagggtcgcggccggcggccgaggcgcaggtgcgggtcgagagaccggcgcctccctccccgccgcccgtggactctgagcgcaggtgtttctactctgccggccgctccacctgggaaagcgccttcaagagctacctctggcggcacctggccctcagctgcagggaaaccgcactcaaacctgccgccgagcccgggtttttctgcaaaactcagaggacctggctcttgcccgaggtgccctgaaccattgtgtgaataagctggggaagcctgactggagtgttttttctttttaataaaaagagtttttctgaatctcaatttttagaaattttttttgcgaagtttgcaatactctctacctcttcgcatcctctcttgctcgtggagtctttttcctcctcagctataaatattttttactatcggcggagcagaccagggatgaacgtcttttaattgcaagtataactgttaaaaccacgtcgggatagtagtcaagatggataaaaagtcctttgaaatggtgctggatgaaattagaaaggctgttttgacagaatacaaattaaaagcaattgaatatgtgcatggatacttttctagtgaacaggtggttgatttgctgagatatttttcctgggccgagccccagttgaaggcaatgaaagcattacagcataaaatggtggctgtccagccaacagaagtggtcaatatactcaactgtttcactttcagtaaagacaaactagttgctcttgaactgttagcctcgaacattattgatgcacagaattctcgtcctattgaagatttattcagggtaaatatgtctgagaagaaacggtgcaagagaatacttgaacaggctttcaaggggggctgcaaagctcctcatgctatgatatcttcttgtggaacaatcccaggaaatccatatcccaaaggaagacctagccgcataaatggaattttcccaggaactcctttgaaaaaagatggtgaagaatgtactaacgaaggcaaaggaatagctgcacgaattcttgggccatccaaaccacctccttcaacatataatccacataaacctgttccttatccgatacctccatgccgaccacatgcaactattgcaccaagtgcttataacaatgcaggtctggtaccattagcgaatgtcatagctccacctccacctccatatactcctaatcctgtaggaacagagaatgaagacctttcgaatccgtcaaaacctatacagaatcaaacattttccaccccagcaagtcaactcttttctcctcatggttctaatccttcaacacctgctgcaactcctgttcctactgcatccccagtcaaggcaattaatcatccatcagcatcagcagctgccaccgtttctggaatgaacctgctgaatactgtccttcctgtgttcccagggcaggtctcctcagccgttcacacacctcagccatcaataccaaacccaacagttatcagaaccccttcattgcccactgcacctgttacatccatccacagtacaaccaccactcctgttccttccattttttctggcctagtgtcactgccaggtccttctgccactcctaccgcagccactcctaccccaggacctacaccacggtccactcttggttccagtgaagcatttgcttctacttctgcacctttcactagcctccccttttccaccagctcttctgctgcttctaccagcaacccaaattctgcttcattgtcatcagtttttgcagggctccctttgcccttaccaccaacatcccaaggcctatccaacccgactcctgtaattgctggtggctctactcccagcgttgccggtccacttggtgtgaacagtcctcttttgtctgcgttaaaaggttttctgacatccaatgacaccaatttaatcaactcctctgctttatcctctgctgtcacaagtgggctggcttcactatcttctcttactcttcagaactctgactcttctgcttcagcccctaacaagtgctatgccccatcagccatccctaccccacagaggacttccactccagggttggccctgttcccaggcctgccgtctcccgtggctaactcaacttccactcccctgacattgcctgtacagtctcctttagccactgctgcatcagcttccacgtcagtgccagttagctgtggctcctcagcctcccttttgcgtggcccccacccaggtacctcagatctgcatatttcatctacccctgctgcaacaactcttcctgttatgatcaaaactgagcccacaagtcctactccctcggccttcaaaggtccatctcattctgggaatccctctcatggcactttaggtttgtcagggacattgggccgtgcatatacttcaacatccgtgcccatcagtttatctgcttgccttaatcctgcattgtcaggtctctccagcttgagtactcctttaaatggttcaaatcctctttcctctatttcccttccaccacatggttcctccactcccattgcaccagtattcactgctcttccttcttttacttctttgaccaacaattttcctttaactggcaacccatctcttaatccgtcagtatctctcccagggtcattaatagccacctcatctaccgctgccacctccacatctctccctcatcctagctcaacggcagctgttctctcagggctttctgcttcagcaccagtctcagcagcacctttccccctcaacctgtccactgctgttccctcacttttctctgttactcaaggacctctgtcatcttcaaatccctcctatccaggcttttctgtctctaataccccaagcgttacccctgctcttccctcattcccggggctgcaggcgccctctacagtcgcagctgtcacaccactacctgtggctgccacagccccatccccagctccagtcctcccaggattcgcctcagcattcagttccaatttcaactccgctcttgttgcacaagccggtttatcatctggacttcaagctgcaggcagttctgtttttccaggccttttgtccctcccgggtatccctgggtttcctcagaatccttcacaatcatccttgcaagaattacagcataatgcggctgcgcagtcagcattgttacagcaggtccattcagcttcggctctggaaagctatccagctcagcctgatgggtttcctagttatccttcagcgccaggaacaccattttctttgcaaccaagcctgtcccagagtgggtggcagtgaatacttttaacttttattctccttcagagcaacatcagaattgcctgagaactgcaatgaacaatctgacaaatgtgaagctggccaaaagtcggaaaatgagaatgagggtaatcctggagaaattgtgacaacaatttgaaaattgtggttgcattttaaagtgtgaacactcccctatgtaaatatgctgacaataaattgtatggagaatggtatttaaaaagtgtttggagacttttcacctgtcctataaaattttgaattgtgtatgtgatctacatagaaagaatattaaagagtaggttgaactctttatagccgaatacagccttaaatatgcttgtatagcatccactggcagaagtaatagttgtgcctcagacttgggggttgcatgtggccctgggggagttactacccttggtatgcatgagcggttcctattagcatcagtgggaactcagtactctgtatgtatccacaaaagggaacttgagacccacagttattcttaatttctgatattaacaaccgtacatactgctgaatttaactcaaaatatttcaggtaagtgaaagtggtgcttaatgtagactatagaatgactttcaggtgttttcaactgaaagtatatatccagaactgcatccttatagaaatacaagtaagacttaggataatttgccttcaaaacagttttcctaatctcagcagtatccagtgagtgaagaacacttgactgactcttgggccacctctgttacttactgtactatggaagctcctggtgaatgtttacaattatgggatgtagtatttctatttgtactttaagtcaaatgcttatatgaaatatgtgacaacaaatagagaagactggctctgttagtaattatgcagtatgtactctatttaaggatctgtggtagtataacatgagtgaatgtcattaattttgaagtaataactgccacatgtgggaagtaggggagtaaggagaatgaattccaatctgtgattaaaagtgtaaactatagactctactgtagtacatttcaggatctagaagttttacttttataaagatggtgtccggaagatgttgctaatgtattttacttcaacatagggaacaaactttttaagtatattaataaacctgtatggttagtttttaacagttttttaaaataaactatggatatgacaaatattctgtgttttactaagtgcttggataggctttctaattttgtatacgtgctagagttaattattgaacatttttatccaaatttagttgtaactctgtttatactactgattgctcattcgtttaaatgatattttaatgtaaaagtcataaccaacatatgaacagacagatttatgtctttaaacacagaatgtaagctatagtttaatctgataccagttgctggaagttgccatttgtttttcttaaatctatacccataaaacttcttttaagatt

SEQ ID NO: 218042 - protein, 853 aa, Artificial Sequence
  derived and/or modified sequence
MPSTNRAGSLKDPEIAELFFKEDPEKLFTDLREIGHGSFGAVYFARDVRTNEVVAIKKMSYSGKQSTEKWQDIIKEVKFLQRIKHPNSIEYKGCYLREHTAWLVMEYCLGSASDLLEVHKKPLQEVEIAAITHGALQGLAYLHSHTMIHRDIKAGNILLTEPGQVKLADFGSASMASPANSFVGTPYWMAPEVILAMDEGQYDGKVDVWSLGITCIELAERKPPLFNMNAMSALYHIAQNESPTLQSNEWSDYFRNFVDSCLQKIPQDRPTSEELLKHIFVLRERPETVLIDLIQRTKDAVRELDNLQYRKMKKLLFQEAHNGPAVEAQEEEEEQDHGVGRTGTVNSVGSNQSIPSMSISASSQSSSVNSLPDVSDDKSELDMMEGDHTVMSNSSVIHLKPEEENYREEGDPRTRASDPQSPPQVSRHKSHYRNREHFATIRTASLVTRQMQEHEQDSELREQMSGYKRMRRQHQKQLMTLENKLKAEMDEHRLRLDKDLETQRNNFAAEMEKLIKKHQAAMEKEAKVMSNEEKKFQQHIQAQQKKELNSFLESQKREYKLRKEQLKESKELQIKKQFQDTCKIQTRQYKALRNHLLETTPKSEHKAVLKRLKEEQTRKLAILAEQYDHSINEMLSTQALRLDEAQEAECQVLKMQLQQELELLNAYQSKIKMQAEAQHDRELRELEQRVSLRRALLEQKIEEEMLALQNERTERIRSLLERQAREIEAFDSESMRLGFSNMVLSNLSPEAFSHSYPGASGWSHNPTGGPGPHWGHPMGGPPQAWGHPMQGGPQPWGHPSGPMQGVPRGSSMGVRNSPQALRRTASGGRTEQGMSRSTSVTSQISNGSHMSYT

SEQ ID NO: 218043 - DNA, 276 bp, Artificial Sequence
  derived and/or modified sequence
atggtttgttatctgtactgggagacctttcctagcatctcccatctgctcaagataactctcagcgctcgcgactgccacgtgtgcggcctgaatctgtttattttcatggatcccgttgaaaaccaggcacttcaccccgtgatcatggctttgatcctgatgccgagcctccactgctttgggaatattctgatcctgctgttcctcaagtcgccggcacagctcttttgccggatgtccgtggatctggccctgctgtttccacacaaatag

SEQ ID NO: 218044 - DNA, 2562 bp, Artificial Sequence
  derived and/or modified sequence
atgcccagcaccaacagagccggcagcctgaaggaccccgagatcgccgagctgttcttcaaggaggaccccgagaagctgttcaccgacctgagagagatcggccacggcagcttcggcgccgtgtacttcgccagagacgtgagaaccaacgaggtggtggccatcaagaagatgagctacagcggcaagcagagcaccgagaagtggcaggacatcatcaaggaggtgaagttcctgcagagaatcaagcaccccaacagcatcgagtacaagggctgctacctgagagagcacaccgcctggctggtgatggagtactgcctgggcagcgccagcgacctgctggaggtgcacaagaagcccctgcaggaggtggagatcgccgccatcacccacggcgccctgcagggcctggcctacctgcacagccacaccatgatccacagagacatcaaggccggcaacatcctgctgaccgagcccggccaggtgaagctggccgacttcggcagcgccagcatggccagccccgccaacagcttcgtgggcaccccctactggatggcccccgaggtgatcctggccatggacgagggccagtacgacggcaaggtggacgtgtggagcctgggcatcacctgcatcgagctggccgagagaaagccccccctgttcaacatgaacgccatgagcgccctgtaccacatcgcccagaacgagagccccaccctgcagagcaacgagtggagcgactacttcagaaacttcgtggacagctgcctgcagaagatcccccaggacagacccaccagcgaggagctgctgaagcacatcttcgtgctgagagagagacccgagaccgtgctgatcgacctgatccagagaaccaaggacgccgtgagagagctggacaacctgcagtacagaaagatgaagaagctgctgttccaggaggcccacaacggccccgccgtggaggcccaggaggaggaggaggagcaggaccacggcgtgggcagaaccggcaccgtgaacagcgtgggcagcaaccagagcatccccagcatgagcatcagcgccagcagccagagcagcagcgtgaacagcctgcccgacgtgagcgacgacaagagcgagctggacatgatggagggcgaccacaccgtgatgagcaacagcagcgtgatccacctgaagcccgaggaggagaactacagagaggagggcgaccccagaaccagagccagcgacccccagagccccccccaggtgagcagacacaagagccactacagaaacagagagcacttcgccaccatcagaaccgccagcctggtgaccagacagatgcaggagcacgagcaggacagcgagctgagagagcagatgagcggctacaagagaatgagaagacagcaccagaagcagctgatgaccctggagaacaagctgaaggccgagatggacgagcacagactgagactggacaaggacctggagacccagagaaacaacttcgccgccgagatggagaagctgatcaagaagcaccaggccgccatggagaaggaggccaaggtgatgagcaacgaggagaagaagttccagcagcacatccaggcccagcagaagaaggagctgaacagcttcctggagagccagaagagagagtacaagctgagaaaggagcagctgaaggagagcaaggagctgcagatcaagaagcagttccaggacacctgcaagatccagaccagacagtacaaggccctgagaaaccacctgctggagaccacccccaagagcgagcacaaggccgtgctgaagagactgaaggaggagcagaccagaaagctggccatcctggccgagcagtacgaccacagcatcaacgagatgctgagcacccaggccctgagactggacgaggcccaggaggccgagtgccaggtgctgaagatgcagctgcagcaggagctggagctgctgaacgcctaccagagcaagatcaagatgcaggccgaggcccagcacgacagagagctgagagagctggagcagagagtgagcctgagaagagccctgctggagcagaagatcgaggaggagatgctggccctgcagaacgagagaaccgagagaatcagaagcctgctggagagacaggccagagagatcgaggccttcgacagcgagagcatgagactgggcttcagcaacatggtgctgagcaacctgagccccgaggccttcagccacagctaccccggcgccagcggctggagccacaaccccaccggcggccccggcccccactggggccaccccatgggcggccccccccaggcctggggccaccccatgcagggcggcccccagccctggggccaccccagcggccccatgcagggcgtgcccagaggcagcagcatgggcgtgagaaacagcccccaggccctgagaagaaccgccagcggcggcagaaccgagcagggcatgagcagaagcaccagcgtgaccagccagatcagcaacggcagccacatgagctacacctag

SEQ ID NO: 218045 - DNA, 2562 bp, Artificial Sequence
  derived and/or modified sequence
atgccatccaccaaccgagcagggagcttgaaggatcctgaaatagctgaattattcttcaaagaggatccggaaaagctatttacagatctccgggagattggccacggctctttcggtgccgtatatttcgccagggacgtaagaactaatgaagtcgtggcaattaagaaaatgagttacagtgggaagcagagcaccgaaaaatggcaggacatcatcaaggaagtgaaatttttacagcgtatcaagcacccaaactccatcgagtacaaaggctgttatctgagagagcacactgcatggctggttatggaatactgtctgggaagcgcatccgatttactggaagtgcataagaagcccttacaggaagtggagatcgccgctataacacatggggccctgcaaggtctggcttacctccattcacacaccatgattcaccgggacatcaaagctggaaacatccttctcaccgagcctgggcaggtgaaacttgctgatttcggctccgcgagcatggcgtctcccgcaaacagtttcgtgggtaccccatattggatggcccccgaggtgatcctggccatggatgagggtcagtatgacgggaaagtggatgtgtggtccctcggtatcacgtgtattgagttggccgagcgaaaacccccgctgtttaacatgaatgccatgagcgctctctatcacatagctcagaacgagtctcctaccctgcagtcaaacgaatggagcgattacttccggaacttcgtggatagctgcctgcagaaaatcccacaggaccggccaacttccgaggagctgcttaagcacatttttgtgctgcgcgagaggcctgaaaccgtgctcatcgacctcattcagcgaacaaaggacgcagtccgcgaactcgataacctgcagtaccgcaagatgaagaagctgctgttccaggaagcccacaacggccccgccgtggaggcgcaagaagaagaagaggagcaggatcacggggtcggacggactgggaccgtgaactccgtagggagtaaccagagtattccctctatgtccattagtgctagctcccaatcttcaagcgtgaactcacttccggatgtgagcgatgacaagagcgagttggatatgatggagggtgatcacaccgttatgtctaactcatctgtcatacaccttaaaccagaggaggaaaattatcgagaggagggggaccccaggaccagagcgagcgaccctcaaagccccccccaagtgagccgacacaaatcacattaccgtaacagggagcacttcgccacaatcaggaccgcttcgctggtgacaagacagatgcaggagcacgaacaagattctgaacttagggaacaaatgtctggatacaaacgaatgagacgccaacaccagaagcagttaatgaccctggagaacaaactcaaggctgaaatggatgaacataggttgcgcctggataaagacctggagacacaacggaacaactttgccgcagaaatggagaagttgattaagaaacatcaagccgcaatggaaaaagaggccaaggttatgagtaacgaggagaagaaattccaacaacacatacaggctcagcagaaaaaagagctgaactctttcctcgagtcccagaagcgagaatataaacttcgcaaggaacagctgaaggaatccaaagaattgcagataaagaaacagttccaggacacctgcaagatccagacacgccagtataaggccctgagaaaccacctactggaaaccactcccaaatcagaacacaaagccgtgcttaaacggctaaaggaagaacagactcgcaaactcgcaatcctggcagagcagtacgatcatagtatcaatgaaatgctgagcacccaggccctccgactggacgaggcccaggaggccgaatgtcaggtcctgaagatgcaactccagcaagagctggagctcctgaatgcataccaaagtaagattaagatgcaggcggaagcccagcacgaccgggaactacgcgaactggagcagcgggtctctctccgccgggccctgttggaacagaaaattgaagaagaaatgcttgcgcttcaaaatgagaggacggaaagaattaggagcttgctggaaaggcaagctagggaaatagaggcctttgactccgaaagcatgcggttggggttctcaaatatggttctcagtaacttgagccccgaagcatttagtcattcataccccggagccagcggttggagccataatcccaccggcggacccggccctcattggggacacccaatgggcgggccaccgcaggcatggggacaccccatgcagggcggcccgcaaccttgggggcaccccagcggccccatgcagggagtgcccagaggaagttctatgggcgtgaggaatagtccgcaggccttgcgaagaaccgcttccggtggccgcactgaacaaggcatgagccggagcaccagtgttacttcccaaatttcaaacggttcgcacatgagttatacatag

SEQ ID NO: 218046 - DNA, 2562 bp, Artificial Sequence
  derived and/or modified sequence
atgcccagcaccaacagagctggcagcctgaaggaccctgagattgctgagctgttcttcaaggaggaccctgagaagctgttcacagacctgcgggagatcggccacggcagctttggagctgtgtactttgccagagatgtgaggaccaatgaggtggtggccatcaagaagatgagctacagcggcaagcagagcacagagaagtggcaggacatcatcaaggaggtgaagttcctgcagaggatcaagcaccccaacagcattgagtacaagggctgctacctgcgggagcacacagcctggctggtgatggagtactgcctgggcagcgccagtgacctgctggaggtgcacaagaagcccctgcaggaggtggagattgctgccatcacccatggagccctgcagggcctggcctacctgcacagccacaccatgatccaccgggacatcaaggccggcaacatcctgctgacagagcccggccaggtgaagctggccgactttggcagcgcctccatggccagccctgccaacagctttgtgggcaccccctactggatggcccctgaggtgatcctggccatggatgagggccagtatgatggcaaggtggatgtgtggagcctgggcatcacctgcatcgagctggccgagaggaagcccccactcttcaacatgaatgccatgtctgccctgtaccacatcgcccagaatgaaagccccaccctgcagagcaatgagtggagcgactacttcaggaactttgtggacagctgcctgcagaagatcccccaggaccggcccaccagcgaggagctgctgaagcacatctttgtgctgcgggagaggcctgagaccgtgctgattgacctgatccagaggaccaaggatgctgtgcgggagctggacaacctgcagtacaggaagatgaagaagctgctcttccaggaggcccacaacggccctgctgtggaggcccaggaggaggaggaggagcaggaccatggagtgggccgcacaggcaccgtgaacagcgtgggcagcaaccagagcatccccagcatgagcatcagcgccagcagccagagcagctctgtgaacagcctgcctgatgtgtctgatgacaagtctgagctggacatgatggagggggaccacacagtgatgagcaacagcagcgtcatccacctgaagccagaggaggagaactaccgggaggagggggaccccaggacccgggccagtgacccccagagccccccccaggtgagccgccacaagagccactacagaaaccgggagcactttgccaccatcagaacagccagcctggtgacccggcagatgcaggagcacgagcaggacagcgagctgcgggagcagatgagcggctacaagaggatgaggcggcagcaccagaagcagctgatgaccctggagaacaagctgaaggccgagatggatgagcaccggctgcggctggacaaggacctggagacccagaggaacaactttgctgctgagatggagaagctgatcaagaagcaccaggccgccatggagaaggaggccaaggtgatgagcaatgaggagaagaagttccagcagcacatccaggcccagcagaagaaggagctgaacagcttcctggagagccagaagcgggagtacaagctgaggaaggagcagctgaaggagagcaaggagctgcagatcaagaagcagttccaggacacctgcaagatccagacccggcagtacaaggccctgaggaaccacctgctggagaccacccccaagtctgagcacaaggctgtgctgaagaggctgaaggaggagcagaccaggaagctggccatcctggccgagcagtatgaccacagcatcaatgagatgctgagcacccaggccctgcggctggatgaggcccaggaggccgagtgccaggtgctgaagatgcagctgcagcaggagctggagctgctgaatgcctaccagagcaagatcaagatgcaggccgaggcccagcacgaccgggagctgcgggagctggagcagagggtgtccctgcggcgggccctgctggagcagaagattgaggaggagatgctggccctgcagaatgaaagaacagagcgcatccgcagcctgctggagcggcaggcccgggagattgaggcctttgacagcgagagcatgaggctgggcttcagcaacatggtgctgagcaacctgagccctgaggccttcagccacagctacccaggggccagcggctggagccacaaccccactggaggccctggcccccactggggccaccccatgggcggccccccccaggcctggggccaccccatgcagggcggcccccagccctggggccaccccagcggccccatgcagggcgtgccccggggcagctccatgggcgtgaggaacagcccccaggccctgcggaggacagccagcggcggccgcacagagcagggcatgagccgcagcacctctgtgaccagccagatcagcaatggcagccacatgagctacacctag

SEQ ID NO: 218047 - DNA, 2562 bp, Artificial Sequence
  derived and/or modified sequence
atgcccagcaccaaccgggccggcagcctgaaggaccccgagatcgccgaactattctttaaagaagacccggagaagctgttcactgaccttagagagatcggccacggaagcttcggcgcagtctactttgcacgtgacgtaagaactaacgaggtggtggctattaagaagatgtcatactccggaaagcagtccactgagaaatggcaggatattattaaagaggtaaagttcctgcaacgcatcaaacaccccaactctatcgaatacaaaggctgttacctgcgagaacatactgcctggctggtgatggagtactgtctcggctctgcttcagacctcctggaagtgcacaagaaaccactccaggaagttgaaattgctgctatcacccacggggcactgcagggtctcgcctacctccatagccatactatgatccatagggatatcaaggccgggaacatcctgcttactgaacccgggcaggtcaaactggcagacttcggctctgcctctatggcgtctcctgccaactcttttgtcggaaccccctactggatggctcctgaggtgattctggctatggatgaaggacagtatgacggtaaggttgacgtgtggagtctgggcattacatgcatcgaactagccgaaaggaagccgcctctgttcaacatgaatgccatgtccgctctctatcatatcgcccagaatgagagtccgaccctccagagcaacgagtggagcgattacttcagaaatttcgttgattcctgtctacagaaaattccacaggatcgacccactagcgaagagcttctgaaacacattttcgtgctccgcgagcggcccgaaaccgtgctcatcgacttgatccagagaacaaaagatgcagttcgggaactagacaacctccagtataggaagatgaaaaagctgctcttccaggaggcgcacaatgggcctgctgtcgaggctcaggaagaagaagaagagcaagatcacggggttggccggacagggaccgtgaattctgtagggtctaaccaaagcattccatctatgtccatttctgcgtcaagtcagagttcctctgtaaattctttgcctgatgtctccgacgacaaatctgaattggacatgatggagggtgatcacactgttatgtccaattcctcggtcattcatctcaaacctgaggaagagaactatcgggaagagggcgacccccggacacgcgcatccgatccacagtctcctcctcaagtaagccggcacaaatcgcattaccgaaacagagaacattttgccacaatcaggactgcctccctcgtaacaaggcagatgcaggagcacgagcaagattctgaactgcgggagcagatgagtggatacaaacgcatgcgcaggcagcaccaaaagcagttgatgacgctggaaaacaaactgaaggcagagatggatgagcaccggctgagactggacaaggatttggaaactcagagaaacaacttcgccgcagagatggagaaactgatcaaaaagcaccaagcagccatggaaaaggaggcaaaggtgatgagcaatgaggaaaaaaaatttcagcaacacattcaagcacagcagaagaaagagctcaactcgttcctggaaagtcagaaaagggagtacaagctgagaaaggagcaacttaaggaatccaaggagttgcagatcaaaaagcagtttcaggacacttgtaaaatccagacaaggcagtacaaggctctacgtaaccacctgctggagacgacccctaagtcggaacacaaagccgtcctgaagcggctgaaggaggaacagacacggaagctcgctatactcgccgagcagtacgatcacagtattaacgaaatgctgtctacacaggcgcttaggcttgatgaggcccaagaggcggagtgtcaggtactcaagatgcagcttcagcaggagctggaattgctgaacgcatatcagtccaaaataaaaatgcaggccgaggcccaacatgatagagagctgagggagctggaacaacgggtgtctcttagaagggcattgttggagcagaagatcgaagaggagatgctggctcttcagaatgaaagaacggaacgaatccgctcccttctggagcggcaggctcgggaaattgaggcctttgactcagagtctatgcgcttgggattttccaatatggtgttatccaatctcagtccagaggcgttctcccatagttaccctggcgccagcggatggagtcataaccctaccggagggcctgggcctcattgggggcatcccatgggtggccctccacaggcctggggacacccaatgcaggggggaccccagccctggggtcacccttctgggcccatgcaaggggtccctaggggcagctcaatgggagtccgcaactcgcctcaggcattgcgcagaaccgctagcggaggacgaacagagcaaggaatgtcacggtccacttccgtcactagccagatcagtaacggctcccatatgtcttacacgtag

SEQ ID NO: 218048 - DNA, 2562 bp, Artificial Sequence
  derived and/or modified sequence
atgccaagcacaaatagggccggttctctgaaagatcccgaaattgcagagctattttttaaggaagatcctgagaaactgtttacagacttgcgggaaataggtcatggaagctttggtgccgtgtattttgcgagagatgttaggacaaacgaagtggtggcaattaaaaagatgtcgtatagtggaaagcagtctactgaaaaatggcaagacattatcaaggaggtaaagtttttacagaggatcaaacacccaaattccattgagtacaaaggatgctatctgcgcgagcacacagcttggctggtcatggaatactgccttggctccgccagcgacctcctggaggtgcataagaagcctttacaagaggtggagattgctgctattactcatggtgcactgcagggactggcttacttgcattcacatacaatgatacaccgcgacatcaaggctggaaacatcctgcttaccgaaccaggacaggtcaagctcgctgactttggtagtgccagtatggcaagcccagctaatagctttgtgggaacaccttactggatggctcctgaagtgatattggccatggatgagggccagtatgatggaaaggttgatgtctggagcctcggcattacatgcatcgagctggccgagaggaaaccccctttgtttaacatgaatgcaatgtccgccctgtatcacattgcccagaacgagagcccgactcttcagagcaatgaatggtctgactatttccgtaattttgtcgacagctgcctccagaagattccacaagaccggcctacctccgaggagctgctgaagcacatcttcgtgctgagggaacggccagaaacagtgctgatagacctgatccaacgtactaaggacgccgtacgcgaactggataacctgcagtaccgtaaaatgaaaaaactcttgtttcaagaagctcataacggcccagctgtggaagcacaggaagaggaagaagaacaagaccacggagtgggcaggacggggactgtgaactccgtcggttccaaccaatccattccctctatgtctatctctgcctctagtcaatcttcatctgtgaattcactgcccgatgtgagtgacgacaagtcagagctggatatgatggaaggggatcacaccgttatgtctaattcaagcgtcatccacctaaaaccggaggaggaaaattacagggaagagggcgatcctaggacacgtgcctcggacccccagtcacctcctcaagtctctcggcacaagagccactatcgcaatagagaacactttgcaaccattcgcacagcatcgttggtgacccggcagatgcaggagcacgagcaggactccgagttacgggagcaaatgtctggatacaagcgcatgcgccgacaacaccagaaacagctgatgacacttgaaaataagctcaaggccgagatggacgagcaccgcctgagactcgacaaggacctggaaacccagaggaacaattttgcagccgaaatggagaaacttatcaaaaaacatcaggctgcaatggaaaaagaggccaaagtaatgtccaatgaagagaagaagtttcagcagcacattcaggcccaacagaaaaaagaactcaactctttcctggaatctcagaaaagggagtacaagctgcggaaggagcagctgaaggagtctaaagaactgcagatcaaaaaacaatttcaggacacctgcaagatacagacacggcagtataaagccttgaggaaccatttattggagactacacctaaaagcgagcacaaggccgtgctaaagagactgaaagaggagcagaccaggaaacttgccatccttgctgagcagtacgatcattctatcaatgaaatgttgagcactcaggctctaaggctcgatgaggcccaagaggctgaatgccaggtcctgaaaatgcagctccagcaagaactcgagctgctaaacgcttaccagtccaaaatcaaaatgcaggcagaagcacaacacgacagagagcttagggagctcgaacaacgcgtgtcactccgaagagcgctactggaacaaaaaatagaagaggaaatgctcgccctgcagaatgaacgaaccgagagaattagatcattactcgaacgccaggctagggagattgaggcattcgacagcgagtctatgaggcttggcttttccaatatggtactttccaacctctcccccgaggctttcagccacagctaccctggagcttccgggtggtcgcataaccccactggcggacccggacctcattggggccatcccatggggggaccaccccaggcatggggtcaccccatgcagggcggaccgcagccatgggggcacccatctggcccaatgcagggtgttcctcggggatcctcaatgggggtccggaatagccctcaagctctgcgccgaacagccagcggcggacggaccgaacagggcatgagccggtcaacatcagtcacctcacaaatctctaacgggagtcatatgagctacacatag

SEQ ID NO: 218049 - DNA, 4068 bp, Artificial Sequence
  derived and/or modified sequence
ctcctcctcactcctcaccctccagggtagcggctaccggagcgctgcagggggctgcgcctgcctgctccgccccagacctgtcggcgaaaggtagtttatgccaacgtgacttcattcatacagatgaaccaaggatcgggatagcagtataaaattagaatcaagacagctgactgctcagcaggatgccatcaactaacagagcaggcagcctgaaggaccctgaaattgcagagctcttcttcaaagaagatccagagaagctcttcacagatctcagagaaattggccatggaagctttggagcagtgtattttgcacgagatgtgcgtaccaatgaagtggtggccatcaagaaaatgtcttatagtggaaagcagtctactgagaaatggcaggatattattaaggaagtcaagtttctacaaagaataaaacatcccaacagtatagaatacaaaggctgttatttacgtgaacacacagcatggcttgtaatggaatattgtttaggatctgcttcggatttactagaagttcacaaaaagccattacaagaagtggaaatagcagcaattacacatggtgctcttcagggattagcctacttacattctcatactatgattcatagagatatcaaagcaggaaatatccttctgacagaaccaggccaggtgaaacttgctgactttggctctgcttccatggcatcacctgccaattcctttgtgggaacgccgtattggatggccccagaagtaattttagccatggatgaaggacaatatgatggcaaagtagatgtgtggtctcttggaataacatgtattgaactagcggaaaggaagcctcctttatttaatatgaatgcaatgagtgccttatatcacatagcccaaaatgaatcccctacactacagtctaatgaatggtctgattattttcgcaactttgtagattcttgcctccagaaaatccctcaagatcgacctacatcagaggaacttttaaagcacatatttgttcttcgggagcgccctgaaaccgtgttaatagatctcattcagaggacaaaggatgcagtaagagagctggacaatctgcagtatcgaaagatgaagaaactccttttccaggaggcacataatggaccagcagtagaagcacaggaagaagaagaggaacaagatcatggtgttggccggacaggaacagttaatagtgttggaagtaatcaatccattcccagcatgtccatcagtgccagcagccaaagcagtagtgttaacagtcttccagatgtctcagatgacaagagtgagctagacatgatggagggagaccacacagtgatgtctaacagttctgttatccatttaaaaccagaggaagaaaattacagagaagagggagatcctagaacaagagcatcagatccacaatctccaccccaagtatctcgtcacaaatcacactatcgtaatcgagaacactttgctactatacggacagcatcactggttacgaggcaaatgcaagaacatgagcaggactctgagcttagagaacaaatgtctggctataagcgaatgaggcgacaacatcaaaagcaactgatgactctggaaaacaagctaaaggctgagatggatgaacatcgcctcagattagacaaagatcttgaaactcagcgtaacaattttgctgcagaaatggagaaacttatcaagaaacaccaggctgccatggagaaagaggctaaagtgatgtccaatgaagagaaaaaatttcagcaacatattcaggcccaacagaagaaagaactgaatagttttctcgagtcccagaaaagagagtataaacttcgaaaagagcagcttaaagagtctaaagaactccaaataaaaaagcagtttcaggatacctgcaaaatccaaaccagacagtacaaagcattaagaaatcacctgctggagactacaccaaagagtgagcacaaagctgttctgaaacggctcaaggaggaacagacccggaaattagctatcttggctgagcagtatgatcacagcattaatgaaatgctctccacacaagccctgcgtttggatgaagcacaggaagcagagtgccaggttttgaagatgcagctgcagcaggaactggagctgttgaatgcgtatcagagcaaaatcaagatgcaagctgaggcacaacatgatcgagagcttcgcgagcttgaacagagggtctccctccggagggcactcttagaacaaaagattgaagaagagatgttggctttgcagaatgagcgcacagaacgaatacgaagcctgttggaacgtcaagccagagagattgaagcttttgactctgaaagcatgagactaggttttagtaatatggtcctttctaatctctcccctgaggcattcagccacagctacccgggagcttctggttggtcacacaaccctactgggggtccaggacctcactggggtcatcccatgggtggcccaccacaagcttggggccatccaatgcaaggtggaccccagccatggggtcacccttcagggccaatgcaaggggtacctcgaggtagcagtatgggagtccgcaatagcccccaggctctgaggcggacagcttctgggggacggacggagcagggcatgagcagaagcacgagtgtcacttcacaaatatccaatgggtcacacatgtcttatacataacttaataattgagagtggcaattccgctggagctgtctgccaaaagaaactgcctacagacatcatcacagcagcctcctcacttgggtactacagtgtggaagctgagtgcatatggtatattttattcatttttgtaaagcgttctgttttgtgtttactaattgggatgtcatagtacttggctgccgggtttgtttgtttttggggaaattttgaaaagtggagttgatattaaaaataaatgtgtatgtgtgtacatatatatacacacacatacacatatattatgcatgtggtgaaaagaattggctagataggggatttttctgaacactgcaaaaatagaacgtagcaaaatggcttcagttatcacttttgggtgtctgtatcctaagaagtttctgaaaagatctaaagcctttttatcccatatcccaaattcttatgagccactcacagcaggcagcatatgttgaaataagttattactggtacacacctgcattgcctcaccagtgtatttatttgttattaaattgatctgacttctcagcctcatttggactaaaaaaagaaagcagaaatccatgaacacattgcttctcggccttttggctaagatcaagtgtagaaatccatgaacactaaaggacttcattgattttttcagagagtagaaaacaacttagtttttcttttttcctgaatgcgtcataggcttgtgagtgatttttgtccattcaattgtgccttctttgtattatgataagatgggggtacttaaggagatcacaagttgtgtgaggattgcattaacaaacctatgagccttcaatggggaagaccagaagggtgagaggggccctgaaagttcatatggtgggtatgtcccgcagcagagtgaggagatgaagcttacgtgtcctgacgttttgttgcttatactgtgatatctcatcctagctaagctctataatgcccaagaccccaaacagtacttttactttgtttgtacaaaaacaaagacatatagccaatacaaatcaaatgccggaggtgtttgatgccatatttgcaaattgccatctattgaaattctcgtcacactacatagacataattgttatctccttttggcttatgtgattttctgtttacaagtagaatagccaattatttaaatgtttagttgccacagtgaaccaggagtcactgagccaatgactttaccagctgctgactaatcttcatcaccactgtagattttgctgcatgtgcaggtcctctatttttaattgctgttttcgttgctgca

SEQ ID NO: 218050 - protein, 169 aa, Artificial Sequence
  derived and/or modified sequence
MKGSRIELGDVTPHNIKQLKRLNQVIFPVSYNDKFYKDVLEVGELAKLAYFNDIAVGAVCCRVDHSQNQKRLYIMTLGCLAPYRRLGIGTKMLNHVLNICEKDGTFDNIYLHVQISNESAIDFYRKFGFEIIETKKNYYKRIEPADAHVLQKNLKVPSGQNADVQKTDN

SEQ ID NO: 218051 - protein, 81 aa, Artificial Sequence
  derived and/or modified sequence
MKGSRIELGDVTPHNIKQLKRLNQVIFPVSYNDKFYKKFGFEIIETKKNYYKRIEPADAHVLQKNLKVPSGQNADVQKTDN

SEQ ID NO: 218052 - DNA, 510 bp, Artificial Sequence
  derived and/or modified sequence
atgaaagggagtagaatcgagctgggcgatgtaacccctcacaacatcaaacagttgaagcggcttaaccaagtgatcttccctgttagctataacgataaattctataaagacgtcctagaagtgggtgaactcgcgaagcttgcatacttcaacgatatcgccgtcggtgccgtgtgttgtcgagtggaccacagccagaaccagaagaggctgtatattatgactctcggttgcctggccccttaccggcgattaggcattggcacaaagatgctgaatcacgtgctcaacatttgcgagaaggacgggaccttcgacaacatttacctccacgtgcagatctcaaatgaaagcgccattgacttctaccgcaagtttggattcgagatcattgagaccaagaagaattactataagcgcattgagccagccgatgcacatgtgttgcagaagaatctcaaggtgccatccggacagaatgcggatgtgcagaaaaccgataattag

SEQ ID NO: 218053 - DNA, 510 bp, Artificial Sequence
  derived and/or modified sequence
atgaagggcagccgcatcgagctgggagatgtgaccccccacaacatcaagcagctgaagaggctgaaccaggtgatcttccctgtgtcctacaatgacaagttctacaaggatgtgctggaggtgggggagctggccaagctggcctacttcaatgacattgctgtgggcgctgtgtgctgccgggtggaccacagccagaaccagaagaggctgtacatcatgaccctgggctgcctggccccctaccgccgcctgggcatcggcaccaagatgctgaaccacgtgctgaacatctgtgagaaggatggcacctttgacaacatctacctgcacgtgcagatcagcaatgaaagtgccatcgacttctacaggaagtttggatttgagatcatcgagaccaagaagaactactacaagagaattgaaccagcagatgcccacgtgctgcagaagaacctgaaggtgcccagcggccagaatgctgatgtgcagaagacagacaactag

SEQ ID NO: 218054 - DNA, 510 bp, Artificial Sequence
  derived and/or modified sequence
atgaagggcagccggatcgagctgggcgacgtgaccccccacaacataaaacagttaaaacggctcaaccaggtgatttttccagtgtcatacaacgacaaattctataaagatgtgcttgaggtcggcgagttggctaagttagcttacttcaatgacatcgcagtgggtgccgtttgctgcagggttgatcatagccagaaccagaaacgactgtacatcatgacactaggttgcctcgctccctacagacggcttggaatcgggaccaagatgcttaaccatgtgttaaacatctgtgagaaagacggcacgtttgacaatatttacctccatgtgcagattagcaacgagtccgcaattgacttttaccggaaatttgggttcgaaattattgaaactaaaaagaactactataagcggatagagcccgccgatgctcatgtcctgcagaaaaatttgaaggtcccctctgggcaaaacgccgatgtgcagaaaaccgacaactag

SEQ ID NO: 218055 - DNA, 3601 bp, Artificial Sequence
  derived and/or modified sequence
cgcgccggcgcgcgaggggcggggtgaaaggtcacagcgcggcagcgggtctggctggcggcagcggcgggagggagccgagagacccgagtgcacgtgtggagaagcggcggcacaagcgcggcggcgggagacactcccgcccccaccagactcaagccctcactcgactctcgcggccttcgttgctcgcacagctccctgcccaggctaggaggccggcttgcggggttgagtggcccgagctaagggtgcggagacctaagggcggcgactacgacggcgttgatatcggtggtaacgacggcctcagcaggcggggaagatgaaaggtagccggatcgagctgggagatgtgacaccacacaatattaaacagttgaaaagattgaatcaggtcatctttccagtcagctacaatgacaagttctacaaggatgtgctggaggttggcgagctagcaaaacttgcctatttcaatgatattgctgtaggtgcagtatgctgtagggtggatcattcacagaatcagaagagactttacatcatgacactaggatgtctggcaccttaccgaaggctaggaataggaactaaaatgttaaatcatgtcttaaacatctgtgaaaaagatggtacttttgacaacatttatctgcatgtccagatcagcaatgagtcggcaattgacttctacaggaagtttggctttgagattattgagacaaagaagaactactataagaggatagagcccgcagatgctcatgtgctgcagaaaaacctcaaagttccttctggtcagaatgcagatgtgcaaaagacagacaactgaacaaattacaaatgaactttcttgcacttgcttgtcgccaaataaaagagaggcccattgattcctcccccaccccaacacttttcttttaaagcttttctccctccttgttcttgtttttctttcttcctttccttttctctgagagttttaatactttcaaggactttaaaaaaataatcatgtttgaattgttttctcttatttttgtgaggtggtttgaaggaaggacaaggtagatctgtttagttttgcagttgaagttagatggtcctaaacatttaattgtcaaataatttcaaatttaatgtcctgctttcacattgaagggcagagcctacaaaacattgtatatttcaaaagacaaaaagaagcagcagcagtatcttgttctctaattcatagacaagttgagtgtgtttgtggtactttgggtttttaaacactttgggatactaatccctagacattgccttcactccacctttagtccttctgagcactctctcgggagttggaacattgttatccttgtaagaaatactaagcttatgttgatttttaagtaattatatcttctcttcttgctggtgggtggggcagtttggtttagtgttatactttggtctaagtatttgagttaaactgcttttttgctaatgagtgggctggttgttagcaggtttgtttttcctgctgttgattgttactagtggcattaacttttagaatttgggctggtgagattaattttttttaatatcccagctagagatatggcctttaactgacctaaagaggtgtgttgtgatttaattttttcccgttcctttttcttcagtaaacccaacaatagtctaaccttaaaaattgagttgatgtccttataggtcactacccctaaataaacctgaagcaggtgttttctcttggacatactaaaaaatacctaaaaggaagcttagatgggctgtgacacaaaaaattcaattactgtcatctaatgccagctgttaaaagtgtggccactgagcatttgattttataggaaaaaatagtatttttgagaataacatagctgtgctattgcacatctgttggaggacatcccagatttgcttatactcagtgcctgtgatattgagtttaaggatttgaggcaggggtaattattaaacatattgcttctattcttggaaaaatagaagtgtaaaatgttaataatacaaatgtcactgtgacctcctccactgagaggactggtttatgccagatcattttccggcacacacggagtggctttgacagattgataactttgtaagatgggagacatctgaaatattcatgttttccttttgtagtcccatctccactatttagaaatgttctcagactttaaaataatgcacagggcttgagctttctgtcatttgactttaaaaggaagtttcattcatatttatcctcttatgtaaaattgcggtataaagtctcatttccaaatatgttaaatgacaaaattattttataaaatgtttatgcacactttataaccttaagtttttatttgagaatgtgaaagtacaaagtgcagtagacttcaacaatcttgagtgccaagaataatacagaaaaagaagacagttgatgaatgagtttatagggttctaatcttaagatggtaaaaatgtagaaagaccttgctggttttttgggggtattcgtttcttaaacaatccaaatctaagcttagaagaaaagtttagcgttaagcacctttatcttcatgaataagcttcagcttgctcttggcaagagaagagtgcttgagttacagaaggcataagtagtttgaagaatgcagcagcctttttgtaaacttcccagatatcaaaatagactttgatatataaatggttttctgagatgacactgcctctatttctataaccatttcacctggactatctaatcagtcctatgaatgtatccctaaatgtggttattgaaaacctaatagctgcctcatgacaagtacatgttatttaaggaggaaaaaatattaaattttgaattgagtgtgtaggctccctatcattatatatagagtttctttttccacggtagtcagtgacttaacctgaattgtaaatgtttgtaaagggttaattgtcctacatcaaacttagttaaataattccatccacttatggaggaggaggagaatgtggaagaggtaaaaagctgggcacaagttcatatgcctatgagtcagtaaagactgaagtaatgtcctatgttgagctggttattttgatatatgataataattatctttgaagtagaacaattctgttaactggaaaatcacaggatatatccatcatatttttcaggacagatagtttttactgtggggcaaataggttaaaattacactatgttagttgcatttaggttttaaagcaaagaatctgtagagaaatctatgcaatatatagtttgtccagattagctttcatttggggaatgaagttctgaaatatctaaagcagtttactcatcaattgaaaagtcctccaaaaagagaactattgggaaaccatggtgtggtggtggaaaagaaaagctccctcagttttttggagggaataacttaaaaaaatacttaaatggctaagtttacttggtgcagttaagaattaaacttgtcaattttaacattgctgttacatctgaaataaacttatgtgatgttctggt

SEQ ID NO: 218056 - DNA, 510 bp, Artificial Sequence
  derived and/or modified sequence
atgaaaggcagtcggattgaactgggcgatgtgaccccacacaacatcaagcagctcaaaagactaaatcaggtgattttcccagtgagttataatgacaaattctacaaggatgtgcttgaggtgggcgagctcgcgaagttggcatacttcaatgacatagcggtgggggctgtttgttgccgagtcgatcattctcaaaaccagaaaagactctatattatgaccttaggttgtttggcaccctatcggcgattgggtattggaactaaaatgctgaatcatgtgctcaacatttgtgagaaagacgggactttcgacaacatctatctgcacgttcaaatttcgaacgagtctgccattgatttttaccgtaagttcggttttgagatcattgaaactaaaaagaattattataagcgaattgaacccgcagacgcgcacgtgctacaaaagaaccttaaggtgccgtccggccaaaatgccgacgttcaaaaaacagataattag

SEQ ID NO: 218057 - DNA, 510 bp, Artificial Sequence
  derived and/or modified sequence
atgaagggcagcagaatcgagctgggcgacgtgaccccccacaacatcaagcagctgaagagactgaaccaggtgatcttccccgtgagctacaacgacaagttctacaaggacgtgctggaggtgggcgagctggccaagctggcctacttcaacgacatcgccgtgggcgccgtgtgctgcagagtggaccacagccagaaccagaagagactgtacatcatgaccctgggctgcctggccccctacagaagactgggcatcggcaccaagatgctgaaccacgtgctgaacatctgcgagaaggacggcaccttcgacaacatctacctgcacgtgcagatcagcaacgagagcgccatcgacttctacagaaagttcggcttcgagatcatcgagaccaagaagaactactacaagagaatcgagcccgccgacgcccacgtgctgcagaagaacctgaaggtgcccagcggccagaacgccgacgtgcagaagaccgacaactag

SEQ ID NO: 218058 - protein, 649 aa, Artificial Sequence
  derived and/or modified sequence
MSLMVSAGRGLGAVWSPTHVQVTVLQARGLRAKGPGGTSDAYAVIQVGKEKYATSVSERSLGAPVWREEATFELPSLLSSGPAAAATLQLTVLHRALLGLDKFLGRAEVDLRDLHRDQGRRKTQWYKLKSKPGKKDKERGEIEVDIQFMRNNMTASMFDLSMKDKSRNPFGKLKDKIKGKNKDSGSDTASAIIPSTTPSVDSDDESVVKDKKKKSKIKTLLSKSNLQKTPLSQSMSVLPTSKPEKVLLRPGDFQSQWDEDDNEDESSSASDVMSHKRTASTDLKQLNQVNFTLPKKEGLSFLGGLRSKNDVLSRSNVCINGNHVYLEQPEAKGEIKDSSPSSSPSPKGFRKKHLFSSTENLAAGSWKEPAEGGGLSSDRQLSESSTKDSLKSMTLPSYRPAPLVSGDLRENMAPANSEATKEAKESKKPESRRSSLLSLMTGKKDVAKGSEGENPLTVPGREKEGMLMGVKPGEDASGPAEDLVRRSEKDTAAVVSRQGSSLNLFEDVQITEPEAEPESKSEPRPPISSPRAPQTRAVKPRLHPVKPMNAMATKVANCSLGTATIISENLNNEVMMKKYSPSDPAFAYAQLTHDELIQLVLKQKETISKKEFQVRELEDYIDNLLVRVMEETPNILRIPTQVGKKAGKM

SEQ ID NO: 218059 - protein, 439 aa, Artificial Sequence
  derived and/or modified sequence
MRNNMTASMFDLSMKDKSRNPFGKLKDKIKGKNKDSGSDTASAIIPSTTPSVDSDDESVVKDKKKKSKIKTLLSKSNLQKTPLSQSMSVLPTSKPEKVLLRPGDFQSQWDEDDNEDESSSASDVMSHKRTASTDLKQLNQVNFTLPKKEGLSFLGGLRSKNDVLSRSNVCINGNHVYLEQPEAKGEIKDSSPSSSPSPKGFRKKHLFSSTENLAAGSWKEPAEGGGLSSDRQLSESSTKDSLKSMTLPSYRPAPLVSGDLRENMAPANSEATKEAKESKKPESRRSSLLSLMTGKKDVAKGSEGENPLTVPGREKEGMLMGVKPGEDASGPAEDLVRRSEKDTAAVVSRQGSSLNLFEDVQITEPEAEPESKSEPRPPISSPRAPQTRAVKPRLHPVKPMNAMATKVANCSLGTATIISENLNNEVMMKVCPLRSWCVR

SEQ ID NO: 218060 - DNA, 1950 bp, Artificial Sequence
  derived and/or modified sequence
atgtctctgatggtgagtgctggaagggggctgggggctgtgtggtccccgacacatgtacaagtgacagtgctgcaggccagaggcctccgagcaaagggacctggcggcacgagcgacgcttacgcagtgatccaggtgggaaaagaaaaatacgccacttcagtgtccgagcggagccttggggcccccgtgtggcgcgaagaggcaaccttcgaactgcctagcctgctcagtagtgggcctgctgccgccgccactttacaattgaccgttctgcaccgggcattgttgggactggacaagtttctagggagagcagaagtcgatctgcgggatcttcaccgagaccagggtcgcagaaagactcaatggtacaaactcaagagcaaacccggtaaaaaagataaggagaggggcgaaatcgaggtggacatccagttcatgcggaataacatgaccgccagcatgttcgacttgagcatgaaggacaaaagccggaacccgttcggaaaactgaaagataagatcaagggaaaaaacaaggatagcggttctgatacagcctctgcaataatcccctccacaacaccgagtgtggatagcgatgacgagtccgtggtcaaggataaaaagaaaaaaagcaaaattaagacactgctctctaaatcaaatctgcagaagacccctctttcccaaagcatgagcgtgctgcccacctccaagcctgaaaaagtgttgctcagaccaggcgattttcaaagccagtgggacgaagacgacaatgaagacgaatcgagctccgctagcgatgtgatgagtcacaaacggacagcttcaacagatctgaaacagctcaatcaggtcaatttcaccctcccgaaaaaagaaggcttatctttcctcggagggttgcgatccaaaaacgacgtactgtcccggtcaaacgtctgtatcaatggcaatcatgtgtacttagagcaaccggaggcaaagggcgaaatcaaggattcatccccatcctcaagtccatctcctaagggttttcgaaaaaagcacctctttagtagcacagagaatctggcggccggatcttggaaggagcccgctgagggtggggggctctcctccgataggcagctgagtgaatcatcaaccaaagacagcttgaagtcgatgacactgcctagttataggcctgcccccctcgtaagtggagacttaagagagaacatggcccccgccaactccgaggccactaaggaagcaaaggaaagcaaaaagcctgaatccagaaggtcttctctgctgagcctgatgacgggaaaaaaggatgtagccaagggctcagaaggagaaaatccccttacggttcccgggcgcgaaaaagaagggatgctgatgggcgtgaagcccggggaagacgccagtggccctgctgaagatttagtacggcgctcagaaaaagacaccgctgccgtggtcagcaggcagggtagctcattgaacttgttcgaagatgtccaaatcactgagcccgaggcagaacctgaatcaaagtccgagccacggccaccaatctctagcccaagggctccccagacaagggccgtcaaacctcgcctgcatccagttaagcctatgaacgcaatggccacaaaggtcgccaactgttcgctgggtactgctaccataatttccgaaaatcttaataatgaagtgatgatgaaaaagtactccccgtctgaccctgcatttgcttatgcacagttgacacatgatgagctaatccaactcgtactcaagcaaaaggagactatcagtaagaaggagttccaagttcgtgagctggaggactacatcgataatcttttggtaagagttatggaagagacacctaatattctgcgaattccaacccaggtggggaaaaaagccggaaaaatgtag

SEQ ID NO: 218061 - DNA, 429 bp, Artificial Sequence
  derived and/or modified sequence
atgtccctgatggtgagcgccggacgtggccttggagctgtttggagtccgactcacgtgcaagttaccgtcctgcaggctaggggtcttagagccaaagggcctggcggaactagtgatgcatacgcagtgattcaagtgggcaaggaaaaatacgcgacatccgtgtccgaacgttctctgggcgcacctgtgtggagggaagaggctaccttcgagctgcccagcctgctctctagcggtcccgccgcggcggctactctccagctaaccgtgttgcatcgagctctgctggggctggacaagtttctcggacgggcagaagtggatctgcgggacttgcaccgagaccttggcaagagcttctttaaaaccctaaagaaaagagcctgggcgatattcctgagactttgcctgaaaaaaaactag

SEQ ID NO: 218062 - DNA, 1320 bp, Artificial Sequence
  derived and/or modified sequence
atgcggaataacatgacagcctccatgttcgatctctcgatgaaggataaaagccggaatccttttgggaaactcaaggataaaattaaggggaaaaacaaggactccggcagtgacaccgccagcgcaataatcccatctacgactcctagcgtggattcagatgacgaatcagtggtcaaagataaaaagaaaaagtcgaagatcaagacgctactgtccaaatccaacctccagaaaacacctctcagccagagtatgtcggttctgcccacttctaaacccgagaaagtactgctgcgtcctggtgactttcagagccaatgggacgaggatgataatgaggatgagtcatcttccgcctcagacgtgatgtctcataagaggaccgcaagcacggatttaaaacagttgaaccaagttaacttcacactcccaaagaaggaagggctcagtttccttggtggtctgagaagcaaaaatgacgtgctgtcccgatctaatgtgtgtattaatggcaatcatgtgtatttggagcagcccgaggccaagggcgagattaaagactcatccccaagctcctctccatctccaaaaggcttcaggaagaaacacctcttcagcagcacagagaatctggctgccggcagttggaaagagccagcagagggcggaggcctgtcctcagatcgacagctgtcagaaagttcgaccaaggacagcctgaagtcaatgacacttccatcatacagaccggcaccattagtgtccggtgacttgcgagagaatatggcccctgcgaattccgaagctacaaaagaagccaaggaaagtaagaaacccgagagcagaagaagtagtctgctgtccctgatgaccggaaagaaggacgtggccaaaggcagcgagggggaaaatccattgacggtgcctggaagagagaaggaaggaatgctgatgggggtgaagcccggtgaggatgctagcggacccgccgaggatttggtacggaggtctgagaaagatacagcagccgttgtgtctcggcagggctcgtccttgaatttattcgaggatgtccaaattactgagcccgaagcagagcctgagagtaagagtgaaccccgaccacccatttctagccccagagctccccagaccagggccgtgaaaccccggttgcaccctgtgaagcccatgaatgctatggccacaaaagttgcaaactgttctctgggcactgccacaatcatcagtgaaaacctgaacaacgaagtcatgatgaaggtatgccccctccgcagttggtgtgttcgttag

SEQ ID NO: 218063 - DNA, 1950 bp, Artificial Sequence
  derived and/or modified sequence
atgagcctgatggtgtctgctggccggggcctgggcgctgtgtggagccccacccacgtgcaggtgacagtgctgcaggcccggggcctgcgggccaagggccctgggggcaccagtgatgcctatgctgtgatccaggtgggcaaggagaagtatgccacctctgtgtctgagaggagcctgggcgcccctgtgtggagggaggaggccacctttgagctgcccagcctgctgagcagcggccctgctgctgctgccaccctgcagctgactgtgctgcaccgggccctgctgggcctggacaagttcctgggccgggcagaggtggacctgcgggacctgcaccgggaccagggccgcaggaagacccagtggtacaagctgaagagcaagccaggcaagaaggacaaggagcggggggagattgaggtggacatccagttcatgaggaacaacatgacagcctccatgtttgacctgtccatgaaggacaagagcaggaacccctttgggaagctgaaggacaagatcaagggcaagaacaaggacagcggcagtgacacagccagcgccatcatccccagcaccaccccatctgtggacagtgatgatgagagcgtggtgaaggacaagaagaagaagagcaagatcaagaccctgctgagcaagagcaacctgcagaagacccccctgagccagagcatgtctgtgctgcccaccagcaagccagagaaggtgctgctgcggcctggggacttccagagccagtgggatgaagatgacaatgaagatgagagcagcagcgccagtgatgtgatgagccacaagaggacagccagcacagacctgaagcagctgaaccaggtgaacttcaccctgcccaagaaggagggcctgtccttcctgggcggcctgcggagcaagaatgatgtgctgagccgcagcaatgtgtgcatcaatggaaatcatgtgtacctggagcagcctgaggccaagggggagatcaaggacagcagccccagcagcagccccagccccaagggcttcaggaagaagcacctgttcagcagcacagagaacctggccgccggctcctggaaggagcctgctgagggcggcggcctgagcagtgaccggcagctgtctgagagcagcaccaaggacagcctgaagtccatgaccctgcccagctacagacctgcccccctggtgtctggggacctgcgggagaacatggccccagccaacagcgaggccaccaaggaggccaaggagagcaagaagccagagagccgccgcagcagcctgctgagcctgatgaccgggaagaaggatgtggccaagggctctgaaggagagaaccccctgactgtgcccggccgggagaaggagggcatgctgatgggcgtgaagccaggagaagatgccagcggccctgctgaggacctggtgagaagaagtgagaaggacacagctgctgtggtgtcccggcagggcagcagcctgaacctgtttgaagatgtgcagatcacagagcctgaggccgagcctgagagcaagtctgagcccaggcctcccatcagcagcccccgggccccccagaccagggctgtgaagccccggctgcaccctgtgaagcccatgaatgccatggccaccaaggtggccaactgcagcctgggcacagccaccatcatcagcgagaacctgaacaatgaggtgatgatgaagaagtacagccccagcgaccctgcctttgcctatgcccagctgacccatgatgagctgatccagctggtgctgaagcagaaggagaccatcagcaagaaggagttccaggtgcgggagctggaggactacatcgacaacctgctggtgcgggtgatggaggagacccccaacatcctgcgcatccccacccaggtgggcaagaaggccggcaagatgtag

SEQ ID NO: 218064 - DNA, 429 bp, Artificial Sequence
  derived and/or modified sequence
atgagcctgatggtgtctgctggccggggcctgggcgctgtgtggagccccacccacgtgcaggtgacagtgctgcaggcccggggcctgcgggccaagggccctgggggcaccagtgatgcctatgctgtgatccaggtgggcaaggagaagtatgccacctctgtgtctgagaggagcctgggcgcccctgtgtggagggaggaggccacctttgagctgcccagcctgctgagcagcggccctgctgctgctgccaccctgcagctgactgtgctgcaccgggccctgctgggcctggacaagttcctgggccgggcagaggtggacctgcgggacctgcaccgggacctgggcaagagcttcttcaagaccctgaagaagagggcctgggccatcttcctgcggctgtgcctgaagaagaactag

SEQ ID NO: 218065 - DNA, 1320 bp, Artificial Sequence
  derived and/or modified sequence
atgaggaacaacatgacagcctccatgtttgacctgtccatgaaggacaagagcaggaacccctttgggaagctgaaggacaagatcaagggcaagaacaaggacagcggcagtgacacagccagcgccatcatccccagcaccaccccatctgtggacagtgatgatgagagcgtggtgaaggacaagaagaagaagagcaagatcaagaccctgctgagcaagagcaacctgcagaagacccccctgagccagagcatgtctgtgctgcccaccagcaagccagagaaggtgctgctgcggcctggggacttccagagccagtgggatgaagatgacaatgaagatgagagcagcagcgccagtgatgtgatgagccacaagaggacagccagcacagacctgaagcagctgaaccaggtgaacttcaccctgcccaagaaggagggcctgtccttcctgggcggcctgcggagcaagaatgatgtgctgagccgcagcaatgtgtgcatcaatggaaatcatgtgtacctggagcagcctgaggccaagggggagatcaaggacagcagccccagcagcagccccagccccaagggcttcaggaagaagcacctgttcagcagcacagagaacctggccgccggctcctggaaggagcctgctgagggcggcggcctgagcagtgaccggcagctgtctgagagcagcaccaaggacagcctgaagtccatgaccctgcccagctacagacctgcccccctggtgtctggggacctgcgggagaacatggccccagccaacagcgaggccaccaaggaggccaaggagagcaagaagccagagagccgccgcagcagcctgctgagcctgatgaccgggaagaaggatgtggccaagggctctgaaggagagaaccccctgactgtgcccggccgggagaaggagggcatgctgatgggcgtgaagccaggagaagatgccagcggccctgctgaggacctggtgagaagaagtgagaaggacacagctgctgtggtgtcccggcagggcagcagcctgaacctgtttgaagatgtgcagatcacagagcctgaggccgagcctgagagcaagtctgagcccaggcctcccatcagcagcccccgggccccccagaccagggctgtgaagccccggctgcaccctgtgaagcccatgaatgccatggccaccaaggtggccaactgcagcctgggcacagccaccatcatcagcgagaacctgaacaatgaggtgatgatgaaggtgtgccccctgcgctcctggtgtgtgaggtag

SEQ ID NO: 218066 - DNA, 1950 bp, Artificial Sequence
  derived and/or modified sequence
atgagcctgatggtgagcgccggccggggcctgggcgccgtgtggagtccgacccatgtacaagtgaccgtcttgcaagctagagggctgagggcaaaaggacccggaggaaccagtgacgcgtatgccgtcattcaggtcgggaaggaaaagtacgcgactagtgtttccgagcggagcctcggtgcccctgtgtggagggaggaagcaacatttgagcttccgtcattgctgagctcagggcctgccgccgctgccactctccaactgactgtcctacatagggctttgctgggcctggacaaatttttaggcagggccgaagtcgaccttagagatctgcatagagatcagggaagacgtaagacccagtggtacaaactaaagtccaaaccgggcaaaaaagacaaggagcggggcgagatcgaggttgacattcagtttatgagaaacaatatgactgcgagcatgttcgacctgagcatgaaagataaaagccgcaatccttttggcaagctcaaggataagatcaaagggaagaacaaggactccgggagcgataccgcgagcgcgatcatcccaagtaccaccccttcagtggactccgacgatgagtccgtcgtaaaagataagaaaaagaaatctaagattaaaacactgctgtccaagtccaatttgcaaaagacaccactttctcagagtatgtccgtgttgcccacttcgaagccagagaaagtccttctcaggccgggagatttccagtctcagtgggacgaggacgacaatgaagatgaatcctcaagcgcttcagatgtcatgtcacacaagcgtacggcctctactgacctgaaacagctgaaccaggtgaacttcacactgcccaagaaggaagggcttagttttctgggggggctgaggtctaagaacgatgtcctttctagatcgaatgtttgcataaatgggaatcacgtgtacctggaacagcctgaagcaaaaggcgaaatcaaggactcctcaccgtctagctcaccgtcgcctaaaggcttcagaaaaaaacacctgttcagttctactgaaaacctggccgccggaagctggaaggaacctgcagaggggggggggcttagttccgataggcagctctctgaaagctccaccaaggacagcctaaagtcaatgacattgccaagctacagacccgcgcctctcgtatcaggcgatctccgagaaaacatggcaccggctaattcggaagctacgaaggaagccaaggagtctaagaaacccgagagtcgtcgtagctccttgctttccctcatgacgggtaagaaagacgtggccaaaggctctgaaggcgagaatccactgactgtccccggtcgtgaaaaagaaggaatgctaatgggagttaagccgggggaggacgccagtggacctgcagaggatctggtaagacgttccgaaaaggacacagctgccgtggtatcacggcaaggatcaagtctaaatctctttgaggacgtgcagattaccgagccagaggccgaaccagagtcaaaaagcgaaccgcgtccccctatatctagcccaagggccccacagacccgtgccgtgaagccccgccttcatccagtcaaacccatgaacgctatggcaaccaaggttgcgaattgcagcctgggcacggctacaatcatctcagaaaacttgaataatgaagttatgatgaagaaatatagcccatcggatcctgcatttgcatatgcccagcttactcatgatgagctcatacagctcgtactcaagcagaaagagaccatcagtaaaaaagaattccaggtgcgggaactcgaggactacattgataacctcctcgtgcgagtgatggaagagacacctaatatactgagaatacccacccaggtggggaagaaggccgggaaaatgtag

SEQ ID NO: 218067 - DNA, 429 bp, Artificial Sequence
  derived and/or modified sequence
atgagcctgatggtgagcgccggccggggcctgggcgccgtgtggagccctacacatgtgcaggtcacagtgctgcaggctcgcggcctgagagccaagggccctgggggcacgagtgatgcttacgcggtgattcaggttgggaaggaaaagtatgcaacctctgtgtctgagcgctcgctgggtgctcccgtgtggagggaggaagccacattcgagcttccaagcctgctgagcagcggacccgcggctgcagcgactctgcagcttaccgtgctgcacagggccttgctcggtctggataaattcctagggcgggcagaggtagacttgcgggacttgcacagagacctgggaaaaagtttcttcaagacattaaagaagagagcctgggctatttttctaagactctgcttgaagaaaaattag

SEQ ID NO: 218068 - DNA, 1320 bp, Artificial Sequence
  derived and/or modified sequence
atgcggaacaacatgaccgccagcatgttcgacctgagcatgaaggataaaagcagaaatcccttcggtaagctgaaagataagatcaaaggaaagaacaaggatagcggtagcgacactgcctcggccataattccatctaccactccctccgttgatagcgacgacgaaagcgtggtgaaagacaagaagaaaaagtccaagatcaagaccctcctgagcaaatcaaatctccagaagacccccttgtcccaatctatgagcgtgcttccgacttctaaaccagagaaagtcctattacgacccggggacttccagtctcagtgggatgaggatgataacgaagatgagagctcttccgcttctgatgtgatgtcccataaaaggacagcaagcaccgatctgaagcagctgaatcaggttaacttcacattgcctaagaaagaaggcctaagttttctagggggcctcaggagcaagaacgatgtcctgtctagatccaacgtctgcataaatgggaaccatgtgtatctggaacagccagaagctaagggcgagataaaggacagctctccctcctccagcccctcccccaagggttttagaaaaaagcacctgttctcatcgacagaaaacctggccgcaggtagttggaaggaaccggctgaaggcggcggactgtcatccgaccggcagctttcggaatcatcaaccaaggacagcctaaagtcaatgactctcccttcttatcggccagccccgcttgtgagtggcgacctccgcgagaacatggcacccgccaatagtgaggccacgaaagaggccaaagagtccaaaaagcccgaatcccggcggagttcccttctgtctctgatgacaggcaaaaaagacgttgccaaggggtcagagggagaaaacccgctcaccgtccccgggagggagaaggagggaatgctaatgggcgtgaagcctggcgaggacgcgtccggcccagctgaagatttggtccgacggtccgagaaggatacagccgccgttgtatctcgccagggctcctcgttgaatctcttcgaggacgtccagataacagaacctgaggcagagcccgagagcaagagcgagcctcggcctccaatcagttctcctcgagcgccccagactcgtgctgttaaaccacgcttgcatccggtgaagcctatgaatgcaatggccacgaaggtcgctaattgctcattaggaacagcaactattatctcagaaaacttaaacaatgaggttatgatgaaggtctgtcccctgcggtcctggtgtgttcggtag

SEQ ID NO: 218069 - DNA, 1950 bp, Artificial Sequence
  derived and/or modified sequence
atgtctctgatggttagtgccggtcggggtctgggcgctgtgtggagtccaacccacgttcaggtcaccgtgctccaggcgcgtggattgcgagcaaaaggtcctggaggcacgagcgacgcatacgcggtgatacaggtgggcaaagagaagtacgccacaagtgtgagtgagaggtccctcggggctcccgtttggagggaggaggccacgttcgaactcccaagcctgctgtcatctggcccagccgcagcagccactctccagctcaccgtcctccatcgcgcattgctcggcctcgacaaatttctgggtagagccgaagtagacctcagggatctgcatcgggaccagggtagacgaaagacacagtggtacaagctcaagtcgaaaccaggcaagaaagacaaagaacgtggcgagatagaggtggatattcaattcatgagaaataatatgactgcatcaatgtttgacctcagtatgaaggacaagtcgaggaatccatttgggaaacttaaggataagatcaagggaaaaaataaagactcgggctccgataccgcatccgccatcattcctagtacaaccccgagcgtcgactccgacgacgagagtgtggtgaaagataagaaaaagaagagcaagataaagacactcctctccaagtccaatctccagaagacccctctcagccagagcatgtcggtgctcccaacatcaaagccggaaaaagtgctgcttcgtccaggcgacttccaatcccagtgggatgaggacgacaacgaggacgagtcgtcatctgcaagcgacgtgatgtcacacaaaagaaccgcttcaacagacctcaaacagctcaaccaggtaaacttcaccctgcccaaaaaagaaggtctgtcctttctgggcggactccgctccaagaacgatgttctcagcagatcgaatgtctgtatcaatgggaatcacgtgtatctggaacagccagaagccaaaggtgaaattaaagactcctctccgtcctcctctccttcaccgaaaggatttcgtaaaaagcatctcttcagctcaaccgagaaccttgccgcagggagctggaaggaacccgcagagggcggtggattgagttcagacaggcaactgagcgagtcctccaccaaggactccctcaagtctatgacactgccatcttacagacctgccccactggtaagtggggaccttcgagagaatatggcgcctgcaaattccgaggccactaaggaggcaaaggaatccaaaaagcctgagtcaagacggtcctctttattatcacttatgaccgggaagaaggacgttgccaagggctccgaaggggagaaccccctaaccgtgcccggtcgggagaaggaaggtatgctgatgggtgtcaagcctggggaagatgccagtgggccagccgaggacttggtgaggaggagtgagaaagacacagcagccgtagtgagccggcagggcagcagcctcaacttattcgaggatgtgcagatcaccgagcctgaggctgagcctgaaagtaagagcgagcctcgccctccaatatcttctccacgggctcctcaaacaagagccgtcaaaccacgattacatcctgtgaaaccgatgaatgcaatggctacgaaggtggcaaactgctctctgggcacggcaacaataatctccgaaaacctcaacaacgaagtgatgatgaaaaagtacagtccatctgaccctgccttcgcttatgctcagctgacacacgacgagctgatccagctcgtattaaaacagaaggaaacgattagcaagaaagagttccaggtgcgcgagctggaagattacattgataacctgctagtgagagtcatggaggagacaccaaatatcctgcgcatacccacccaggtgggaaaaaaggccggtaaaatgtag

SEQ ID NO: 218070 - DNA, 429 bp, Artificial Sequence
  derived and/or modified sequence
atgagccttatggtgtcagccggacggggactgggagcagtctggtctcctactcatgtccaagtcactgttctccaggctcgtgggcttagggctaaagggccaggcggtacctcagatgcctacgctgtgattcaggttggcaaagagaaatacgcaacgtcggtttctgagcgtagccttggcgctccagtgtggcgtgaagaggcgacgtttgagcttccttccctcctgtcttccggaccagcagcggctgccacattacagctaaccgtactgcatcgcgctttgctaggactagacaaattcctcgggcgtgcagaggttgacctacgggacctccatcgtgatctgggtaagtcctttttcaaaactttaaagaagagagcctgggctatttttctacgcctgtgtctaaaaaagaattag

SEQ ID NO: 218071 - DNA, 1320 bp, Artificial Sequence
  derived and/or modified sequence
atgagaaacaatatgactgcctcgatgtttgatctgagcatgaaagacaagagccggaatccctttggaaaactgaaggacaagataaaaggcaagaataaagatagcggctcagatactgcctccgccatcatcccttccactactccttcagtggactctgatgacgaatctgttgtgaaggataagaaaaagaagagcaagattaagaccctgcttagtaagtccaatctgcagaagacaccactcagtcagtccatgtctgtgctgcccacctcaaagccggaaaaggttctgctgcggccaggagatttccagtcacagtgggacgaggatgataatgaggatgaaagttcctccgccagcgatgtaatgtcccacaagcgcacagcatccaccgatctcaaacagttgaatcaagtgaacttcacacttccaaaaaaggagggccttagcttcttaggcggacttaggtctaaaaatgatgtgctgagccgctcgaatgtctgcatcaacgggaaccacgtttacctagagcagcctgaggccaagggtgagatcaaggatagcagcccatcatccagccccagccccaagggtttccgcaagaagcatctcttctcgtccactgaaaatcttgccgctggcagttggaaagaaccagctgaaggaggcggattgtcaagcgatcgacagcttagcgagtcgagtaccaaagacagtctgaaatctatgacgcttcccagttaccgtcccgcaccactcgtttccggtgatctgcgagaaaacatggcccctgctaactcagaggctactaaggaggcgaaagaaagcaagaaaccagagtctcgacgatcatcacttctgtccctcatgacgggcaaaaaggatgtggccaagggctctgagggagaaaatccactgaccgtgcctggccgtgagaaggaaggcatgctcatgggagtcaagccgggtgaggatgcctcagggcctgctgaggatctggtccggagaagcgagaaggacaccgcagcagtcgtcagtaggcaagggagctctctaaatctttttgaagacgtgcaaattaccgaaccggaagcggaaccagagtctaagtctgagccgcgtcctccaattagttcacctagagccccacaaactcgtgccgtgaaaccgagattgcacccagtaaaacctatgaatgccatggcaacgaaagtcgccaactgcagcttgggcacagcgacaataatctccgaaaaccttaataatgaggtgatgatgaaggtatgccctctgagatcttggtgtgtaagatag

SEQ ID NO: 218072 - DNA, 6253 bp, Artificial Sequence
  derived and/or modified sequence
ctcgcttctggagtgttatcgtcaccatgtccctaatggtctcggctggccggggcctgggggccgtgtggtccccaacccacgtgcaggtgacggtgctgcaggcgcggggcctgcgggccaagggccccgggggcacgagcgacgcgtacgcggtgatccaggtgggcaaggagaagtacgccacctccgtgtcggagcgcagcctgggcgcgcccgtgtggcgcgaggaggccaccttcgagctgccatcgctgctgtcctccggacccgcggccgccgccaccctgcagctcaccgtgctgcaccgcgcgctgctcggcctcgacaagttcctgggccgcgccgaggtggacctgcgggatctgcaccgcgaccagggccgcaggaagacgcagtggtataagttgaaatccaaaccaggaaagaaggacaaggagcgaggagaaattgaggttgacatccagtttatgagaaacaacatgactgccagcatgtttgacctttctatgaaagacaagtctcggaatccatttggaaagctgaaggacaagatcaaggggaagaataaggacagtgggtcagacaccgcctccgccatcatccctagcacgacaccttcggtcgacagtgatgatgagtctgtggttaaagacaagaaaaagaaatcaaagatcaagaccttactttccaagtcaaatttgcagaagacgcctctttcccagtccatgtctgtcctgccgacttcaaagccagaaaaagtgctgcttcgtcccggagactttcagtcccagtgggatgaagatgacaatgaggatgagtcctcctcggcctcggatgtcatgtctcacaagagaacagcgagtacggatcttaagcaactgaaccaggtcaactttacccttcccaagaaggaaggactttcctttcttggtggccttcggtctaagaatgatgtcctttcccgctctaatgtctgcatcaatgggaaccatgtttacctggagcagccagaagccaagggtgagatcaaggatagcagcccgtcctcctccccatcccccaagggcttcagaaagaagcatttgttctcttctacagagaacctggcggctgggtcttggaaggagcctgctgaaggaggtgggctgtcttctgacaggcagctctccgaatcttccaccaaggactccttgaagtctatgaccctgccgtcctaccgacctgccccactggtcagtggggacctcagggaaaacatggcccccgcaaactcagaggccacaaaagaagctaaggagagcaagaagccagagagcaggaggtcctctttgctgtctctgatgacggggaagaaggatgtggctaagggcagtgaaggtgaaaaccctctcacggtcccagggagggagaaggaaggcatgctgatgggggttaagccgggggaggacgcatcggggcctgctgaagaccttgtgagaagatctgagaaagatactgcagctgttgtctccagacagggcagctccctgaacctctttgaagatgtgcagatcacagaaccagaagctgagccagagtccaagtctgaaccgagacctccaatttcctctccgagggctccccagaccagagctgtcaagccccgacttcatcctgtgaagccaatgaatgcaatggccaccaaggttgctaactgcagcttgggaactgccaccatcatcagtgagaacttgaacaatgaggtcatgatgaagaaatacagcccctcggaccctgcatttgcatatgcgcagctgacccacgatgagctgattcagctggtcctcaaacagaaggaaacgataagcaagaaggagttccaggtccgcgagctggaagactacattgacaacctgcttgtcagggtcatggaagaaacccccaatatcctccgcatcccgactcaggttggcaaaaaagcaggaaagatgtaaatcagcagaaaaaaaacaccgagacgtttctgtgacttcactttcacctgctccaggggtcaaggacttgccttgcctgataaccagccagcaggctccgaatcaccatctccctcacatgttatccggcaagagtgaattctaccaatggaagccaggttaatgattacaattaatcttttactgtacattcccaaggctttagttttaaatgccactgtgcctttaacaaggttgtaaatattttatgcccaccagagatgtggtcataagatctgatcctgagccagagattcagatggcacaggaagtattcatgtattttaacactggggttttctttctttcatactgagattttttttcagtatgtatcctccagctcttaaagcttacctgagaaagctttaaatgagaaaaggaccatgcgattggtgctgtgttacatacacatactttcttggcttctgagtagctcaggtgtggcttttggctgcagatgttaaattttgataccatgtaaacctacccagcttctcagacttgggtcttgttttttgatgggaacagaggtgtttagagaaagcctctgagtatgcctttcagattttgaacaagcggccttttctaaacatcgacttctactactctctagccttaaaataccttctgcttagatccagggcccttctactggagataggaaaagtagaattcaggaattaaaagaattactctttattcaatttgaggaacttggtgaaagcccctcctcttatgacagccaggttcctgctggctagaccagcctattcagcgctttgctaggggattgggtggtccacgcactcgctaatacagttctccaggtgtggaatgatgtcaatacgattgcttggccttttccccctgtgcctttgctcggtgctctggtttcctcagcaacactccttgtaaggggcagagacagggtccaccaactccccaagatgaagaagccccttcaggccagtcgtggtggctcatgcctgtaatcccagcactttgcaaggccgaggagggtggatcacttgaggtcaggagttcgagaccagcctgaccaacatggcgaaaccccatctctactaaaaatacaaaaattagcttggcatggtggtgcgtgcctgtaatcccagctactcgggaggctggggcaggagaattgcttgaacttgggagatggaggctgcagcgagccaagatcgtgccactgcactccagcctgggcaagagtttttttaagactcttaaaaaaagagcctgggcaatttttttaagactctgtcttaaaaaaaactaaaaagaaaaaaagaagccccttcactctacaggggacaggagaccatggattggaccccaaagggattgaactgcatctgcatgtctgtcctttgaacactttctctccctgcccaaaaggaaacccaaattatttgtgggatactggggaaattgtagtgaagggcttaatgtagttaataaaagttaaaagtcagtagaaaacaggtgcctcagccttcaaatggttgctttttttccattttccctcatgaatagactcaccagcattttacccccttgttataaaactgtgcagagcaagaagatgatacttatttttgaatttgtatttttaaaactagatttatagactttttttttttttaactagggcacttgcttccttcttagctaaaagcaccagctgagatttttcaggtaattttgttgttactcacttaagactggaattagaatgtttctggtatttctcatttttttccctggctatgatagaatctcatctaatcttgacatctctcctaggggaagaatatcacaggctaatagcgtggttgggggtgaagatgatagcagttattaaatcaggaatctcttttatgtgtgtccttgttacattgaggttaagagacaaaatcattggcagtgcaatctctttccaggatttcgtttgctgtggcattggttatatcagagcactttaatctgaaggatgatactgtaacttgatttatctaattagcttttaattatctacagctattttattttatttaattctctcctacagtactgggaccactgtaaacttctcagatgacttgtatttttgtagtgctatgaaatttatttacatacttataaagaaaactgtatgttcacttgaactctgaaaatgtacatgtatggctggacgcggtggctcacgcctgtaatcccagcactttgggaggctgaggcgggtgaatcacttgattgaggtcaggagttcgagaccagcctggccaacatggcaaaaccccgtctctactaaaaaatacagaaattagctgggtgtggtggcagacagctgtaatctcagctgctcgggaggctgaggcacaagaatcgcttgagccagggaggtggaggttgcagtgagctgagatcacatcattgcactccagcctgggcaacgggcgagactctgtctcaaaaaaaagaaagaaagaaaaggtacatgtatatatttgtcctgcattatgttttttacttgatataaatgtatttttactgtgatagtccaagtgccctggggggcaggtgtgctctatgtggttcttcttccattggagagctggcgtagagatctgcagtgttcacaaggatgttggtttggagatgtctgctgctaggacctggggtgtgtgactcagtccatatgagagggacatctgggtggaggagtaaattcctgtgctctgaaatgccacttggtagctctggacaatgaaggacaattgactcaagggtgcctggcttctgctgctgctgggaaaaaattcagtttatagcattcctgcacctcccaaagtagataacctggaggtcattcagttaacaactgtccctgaggactcagttttgggggaggggttatctgggagaagctttagcctgttctgagccattaggagacattagtgaattggagcactggagaatcctacaaatggcctatgtctcagaagagctgggacctccttccagctgctgcagatgctgacaggccctgggaggctgctgtgctctggagaagctggagcagctcatttcttggcctagcctggctgcctcagaaagagcagtcaggacttgagggaagcatcaaattctatacccataaactgcagttggaagtcagctttttgaaatgtccagcctttgcccaattgtttcagatcatctcatgcctcaggctttggcaggtatcctgccctccatcttattccagtgtgttcacctcatcaaggcagcagagtggatgaaggagtaagtctgccctttgccatactgaacagctgtggaccccgattggtgagggctctgcatatgcctgtatgaaggagatacaggtgtgtgtgcacatgccggtatgaagaagacacaggcatgtgcttctcagttttgctaacagtgggagctcaacggggcagagggaggaaggtccatgatgctcagccacatactgtagagagaggcaatttaatgttaaatgacgcaccatcctccctcccacccttctcccagtcaactttttttctttttctagaactactaattatctctcaaggctgaaaaattaattgccttaggtggagaacttaattcctagtatccaccaaacttaactccgtatctccatatggtgtctccatatctactgtgtgagctacttaactgacgccctcttcctccaactgaaggatcgcccaacgtttttggattatagaattattatttcctgctttctttctttgggacttttgaatttctttggtttcgtttttaagaagtaacccaacatttcctacaacactaaataaaatggtacttacctttcaaagatttgtgtctgtagtttggtatgggtgcaataaaaatttattttgtcttcctggaaaacctctcttggtgggggtggggggatgaccagtgtttctcatcccatgagggtctctcactgggatttctgttgctgccatcttgcctggttcccaggagtcccaaggccctttttctcaaagaggacggacatgtctggtcccttcggatgcacccttcatcttggcctgagggaccatggcactggccagagaaactgagttggaacgtgctgcccccttttcctttgcagccggtacccttggctgagcatttggacagggtctttcctc

SEQ ID NO: 218073 - DNA, 429 bp, Artificial Sequence
  derived and/or modified sequence
atgtccctaatggtctcggctggccggggcctgggggccgtgtggtccccaacccacgtgcaggtgacggtgctgcaggcgcggggcctgcgggccaagggccccgggggcacgagcgacgcgtacgcggtgatccaggtgggcaaggagaagtacgccacctccgtgtcggagcgcagcctgggcgcgcccgtgtggcgcgaggaggccaccttcgagctgccatcgctgctgtcctccggacccgcggccgccgccaccctgcagctcaccgtgctgcaccgcgcgctgctcggcctcgacaagttcctgggccgcgccgaggtggacctgcgggatctgcaccgcgacctgggcaagagtttttttaagactcttaaaaaaagagcctgggcaatttttttaagactctgtcttaaaaaaaactaa

SEQ ID NO: 218074 - DNA, 1959 bp, Artificial Sequence
  derived and/or modified sequence
acactggatcctatctttgtctagcgcgtgtcttctcaaaaataaaagtgcaaaataaaaaacaaaacaaaagaaataaaagtgcaaattctgctctcagccgggtgcagtggctcacgcctgtaatcccaacattttgggaggctgaggcgggcggatcatctgaggtcaggagttcgagtccagcctggctaccatggtgaaaccccatctctactaaaaatacaaaaattagctggacatggtcacgcgctcctgtaatctcagctactcaggaggctgaggcaggagaatcacttgaacccaggaggcagaggctgcagtgagccgagatggtggcattgcactccagcctgggtgacagagcaagactctgtgtcaaaaaaaaaaaaaaaaaaaaaaaaaaaaattctgctctcatctaccacttcccgaagagaaagcatgagaatgcatgcattgaagaggctgctggtagcagagaggagaggccagttcatggggattgtgaacattgttgcagttgcttccattcaaaggtaactcctcagcctttctcctttcaggtggtataagttgaaatccaaaccaggaaagaaggacaaggagcgaggagaaattgaggttgacatccagtttatgagaaacaacatgactgccagcatgtttgacctttctatgaaagacaagtctcggaatccatttggaaagctgaaggacaagatcaaggggaagaataaggacagtgggtcagacaccgcctccgccatcatccctagcacgacaccttcggtcgacagtgatgatgagtctgtggttaaagacaagaaaaagaaatcaaagatcaagaccttactttccaagtcaaatttgcagaagacgcctctttcccagtccatgtctgtcctgccgacttcaaagccagaaaaagtgctgcttcgtcccggagactttcagtcccagtgggatgaagatgacaatgaggatgagtcctcctcggcctcggatgtcatgtctcacaagagaacagcgagtacggatcttaagcaactgaaccaggtcaactttacccttcccaagaaggaaggactttcctttcttggtggccttcggtctaagaatgatgtcctttcccgctctaatgtctgcatcaatgggaaccatgtttacctggagcagccagaagccaagggtgagatcaaggatagcagcccgtcctcctccccatcccccaagggcttcagaaagaagcatttgttctcttctacagagaacctggcggctgggtcttggaaggagcctgctgaaggaggtgggctgtcttctgacaggcagctctccgaatcttccaccaaggactccttgaagtctatgaccctgccgtcctaccgacctgccccactggtcagtggggacctcagggaaaacatggcccccgcaaactcagaggccacaaaagaagctaaggagagcaagaagccagagagcaggaggtcctctttgctgtctctgatgacggggaagaaggatgtggctaagggcagtgaaggtgaaaaccctctcacggtcccagggagggagaaggaaggcatgctgatgggggttaagccgggggaggacgcatcggggcctgctgaagaccttgtgagaagatctgagaaagatactgcagctgttgtctccagacagggcagctccctgaacctctttgaagatgtgcagatcacagaaccagaagctgagccagagtccaagtctgaaccgagacctccaatttcctctccgagggctccccagaccagagctgtcaagccccgacttcatcctgtgaagccaatgaatgcaatggccaccaaggttgctaactgcagcttgggaactgccaccatcatcagtgagaacttgaacaatgaggtcatgatgaaggtatgtcctctgagaagctggtgtgttcgttag

SEQ ID NO: 218075 - DNA, 1950 bp, Artificial Sequence
  derived and/or modified sequence
atgagcctgatggtgagcgccggcagaggcctgggcgccgtgtggagccccacccacgtgcaggtgaccgtgctgcaggccagaggcctgagagccaagggccccggcggcaccagcgacgcctacgccgtgatccaggtgggcaaggagaagtacgccaccagcgtgagcgagagaagcctgggcgcccccgtgtggagagaggaggccaccttcgagctgcccagcctgctgagcagcggccccgccgccgccgccaccctgcagctgaccgtgctgcacagagccctgctgggcctggacaagttcctgggcagagccgaggtggacctgagagacctgcacagagaccagggcagaagaaagacccagtggtacaagctgaagagcaagcccggcaagaaggacaaggagagaggcgagatcgaggtggacatccagttcatgagaaacaacatgaccgccagcatgttcgacctgagcatgaaggacaagagcagaaaccccttcggcaagctgaaggacaagatcaagggcaagaacaaggacagcggcagcgacaccgccagcgccatcatccccagcaccacccccagcgtggacagcgacgacgagagcgtggtgaaggacaagaagaagaagagcaagatcaagaccctgctgagcaagagcaacctgcagaagacccccctgagccagagcatgagcgtgctgcccaccagcaagcccgagaaggtgctgctgagacccggcgacttccagagccagtgggacgaggacgacaacgaggacgagagcagcagcgccagcgacgtgatgagccacaagagaaccgccagcaccgacctgaagcagctgaaccaggtgaacttcaccctgcccaagaaggagggcctgagcttcctgggcggcctgagaagcaagaacgacgtgctgagcagaagcaacgtgtgcatcaacggcaaccacgtgtacctggagcagcccgaggccaagggcgagatcaaggacagcagccccagcagcagccccagccccaagggcttcagaaagaagcacctgttcagcagcaccgagaacctggccgccggcagctggaaggagcccgccgagggcggcggcctgagcagcgacagacagctgagcgagagcagcaccaaggacagcctgaagagcatgaccctgcccagctacagacccgcccccctggtgagcggcgacctgagagagaacatggcccccgccaacagcgaggccaccaaggaggccaaggagagcaagaagcccgagagcagaagaagcagcctgctgagcctgatgaccggcaagaaggacgtggccaagggcagcgagggcgagaaccccctgaccgtgcccggcagagagaaggagggcatgctgatgggcgtgaagcccggcgaggacgccagcggccccgccgaggacctggtgagaagaagcgagaaggacaccgccgccgtggtgagcagacagggcagcagcctgaacctgttcgaggacgtgcagatcaccgagcccgaggccgagcccgagagcaagagcgagcccagaccccccatcagcagccccagagccccccagaccagagccgtgaagcccagactgcaccccgtgaagcccatgaacgccatggccaccaaggtggccaactgcagcctgggcaccgccaccatcatcagcgagaacctgaacaacgaggtgatgatgaagaagtacagccccagcgaccccgccttcgcctacgcccagctgacccacgacgagctgatccagctggtgctgaagcagaaggagaccatcagcaagaaggagttccaggtgagagagctggaggactacatcgacaacctgctggtgagagtgatggaggagacccccaacatcctgagaatccccacccaggtgggcaagaaggccggcaagatgtag

SEQ ID NO: 218076 - DNA, 429 bp, Artificial Sequence
  derived and/or modified sequence
atgagcctgatggtgagcgccggcagaggcctgggcgccgtgtggagccccacccacgtgcaggtgaccgtgctgcaggccagaggcctgagagccaagggccccggcggcaccagcgacgcctacgccgtgatccaggtgggcaaggagaagtacgccaccagcgtgagcgagagaagcctgggcgcccccgtgtggagagaggaggccaccttcgagctgcccagcctgctgagcagcggccccgccgccgccgccaccctgcagctgaccgtgctgcacagagccctgctgggcctggacaagttcctgggcagagccgaggtggacctgagagacctgcacagagacctgggcaagagcttcttcaagaccctgaagaagagagcctgggccatcttcctgagactgtgcctgaagaagaactag

SEQ ID NO: 218077 - DNA, 1320 bp, Artificial Sequence
  derived and/or modified sequence
atgagaaacaacatgaccgccagcatgttcgacctgagcatgaaggacaagagcagaaaccccttcggcaagctgaaggacaagatcaagggcaagaacaaggacagcggcagcgacaccgccagcgccatcatccccagcaccacccccagcgtggacagcgacgacgagagcgtggtgaaggacaagaagaagaagagcaagatcaagaccctgctgagcaagagcaacctgcagaagacccccctgagccagagcatgagcgtgctgcccaccagcaagcccgagaaggtgctgctgagacccggcgacttccagagccagtgggacgaggacgacaacgaggacgagagcagcagcgccagcgacgtgatgagccacaagagaaccgccagcaccgacctgaagcagctgaaccaggtgaacttcaccctgcccaagaaggagggcctgagcttcctgggcggcctgagaagcaagaacgacgtgctgagcagaagcaacgtgtgcatcaacggcaaccacgtgtacctggagcagcccgaggccaagggcgagatcaaggacagcagccccagcagcagccccagccccaagggcttcagaaagaagcacctgttcagcagcaccgagaacctggccgccggcagctggaaggagcccgccgagggcggcggcctgagcagcgacagacagctgagcgagagcagcaccaaggacagcctgaagagcatgaccctgcccagctacagacccgcccccctggtgagcggcgacctgagagagaacatggcccccgccaacagcgaggccaccaaggaggccaaggagagcaagaagcccgagagcagaagaagcagcctgctgagcctgatgaccggcaagaaggacgtggccaagggcagcgagggcgagaaccccctgaccgtgcccggcagagagaaggagggcatgctgatgggcgtgaagcccggcgaggacgccagcggccccgccgaggacctggtgagaagaagcgagaaggacaccgccgccgtggtgagcagacagggcagcagcctgaacctgttcgaggacgtgcagatcaccgagcccgaggccgagcccgagagcaagagcgagcccagaccccccatcagcagccccagagccccccagaccagagccgtgaagcccagactgcaccccgtgaagcccatgaacgccatggccaccaaggtggccaactgcagcctgggcaccgccaccatcatcagcgagaacctgaacaacgaggtgatgatgaaggtgtgccccctgagaagctggtgcgtgagatag

SEQ ID NO: 218078 - protein, 319 aa, Artificial Sequence
  derived and/or modified sequence
MGIWQRLLLFGGVSLRAGGGATAPLGGSRAMVCGRQLSGAGSETLKQRRTQIMSRGLPKQKPIEGVKQVIVVASGKGGVGKSTTAVNLALALAANDSSKAIGLLDVDVYGPSVPKMMNLKGNPELSQSNLMRPLLNYGIACMSMGFLVEESEPVVWRGLMVMSAIEKLLRQVDWGQLDYLVVDMPPGTGDVQLSVSQNIPITGAVIVSTPQDIALMDAHKGAEMFRRVHVPVLGLVQNMSVFQCPKCKHKTHIFGADGARKLAQTLGLEVLGDIPLHLNIREASDTGQPIVFSQPESDEAKAYLRIAVEVVRRLPSPSE

SEQ ID NO: 218079 - protein, 223 aa, Artificial Sequence
  derived and/or modified sequence
MSKAIGLLDVDVYGPSVPKMMNLKGNPELSQSNLMRPLLNYGIACMSMGFLVEESEPVVWRGLMVMSAIEKLLRQVDWGQLDYLVVDMPPGTGDVQLSVSQNIPITGAVIVSTPQDIALMDAHKGAEMFRRVHVPVLGLVQNMSVFQCPKCKHKTHIFGADGARKLAQTLGLEVLGDIPLHLNIREASDTGQPIVFSQPESDEAKAYLRIAVEVVRRLPSPSE

SEQ ID NO: 218080 - DNA, 960 bp, Artificial Sequence
  derived and/or modified sequence
atgggcatttggcaaaggctcctcctcttcgggggcgttagcctccgcgcgggggggggggcgaccgctccgttaggcggttccagggccatggtgtgcggcagacaactgtccggggcaggatccgagaccctcaaacagcgcagaacgcagatcatgagcaggggcctgccaaaacagaaacccatcgagggagtaaaacaggtgatagttgtagccagcggaaaaggaggagtcgggaagtctaccacagcagtcaatttagccctggccctcgctgctaatgattccagcaaagcaatcggcctgcttgatgtggatgtgtatgggcctagtgtgcctaaaatgatgaatctgaaaggaaacccggaactctcccagtcaaacctgatgcggcctctcttgaattatggcatcgcttgtatgtctatgggattccttgtagaggagagtgagccagtggtatggcgcggcctgatggtcatgagcgctatcgaaaagctgctacgccaggttgactggggacagctggattatctggtcgttgatatgccaccaggcactggtgacgtgcaactgtccgtgtcacaaaacattccaattacaggagctgttatcgtgtccacgcctcaggatatagccctgatggacgcccacaagggcgctgagatgttccgtcgcgtacacgtcccagttcttggactcgttcagaacatgtccgtttttcagtgtcctaagtgtaagcacaaaacgcatatctttggtgccgacggagcccgcaagcttgcccagacattgggtctagaagtgctaggcgacatccctctgcatctgaacatccgtgaagcatccgatacaggccagccaatagtcttttcccaaccagagtcagatgaggctaaggcctaccttaggattgcggtggaagttgtgagaagacttccttctcctagcgagtag

SEQ ID NO: 218081 - DNA, 960 bp, Artificial Sequence
  derived and/or modified sequence
atgggcatctggcagaggctgctgctgtttggaggagtgtccctgcgggccggcggcggggccacagcccccctgggcggcagccgggccatggtgtgtggccggcagctgagcggggccggcagcgagaccctgaagcagaggaggacccagatcatgagccggggcctgcccaagcagaagcccattgaaggagtgaagcaggtgattgtggtggccagcggcaagggcggcgtgggcaagagcaccacagctgtgaacctggccctggccctggccgccaatgacagcagcaaggccatcggcctgctggatgtggatgtgtatggccccagcgtgcccaagatgatgaacctgaagggcaaccctgagctgagccagagcaacctgatgaggcccctgctgaactatggaattgcctgcatgtccatgggcttcctggtggaggagagcgagcctgtggtgtggaggggcctgatggtgatgtctgccatcgagaagctgctgcggcaggtggactggggccagctggactacctggtggtggacatgcctcctggcactggagatgtgcagctgtctgtgtcccagaacatccccatcaccggggccgtcatcgtgtccaccccccaggacatcgccctgatggatgcccacaagggagctgagatgttccggcgggtgcacgtgcctgtgctgggcctggtgcagaacatgtctgtgttccagtgccccaagtgcaagcacaagacccacatctttggagcagatggagccaggaagctggcccagaccctgggcctggaggtgctgggggacatccccctgcacctgaacatccgggaggccagtgacaccggccagcccatcgtgttcagccagcctgagagtgatgaggccaaggcctacctgagaattgctgtggaggtggtgcggcggctgcccagccccagcgagtag

SEQ ID NO: 218082 - DNA, 960 bp, Artificial Sequence
  derived and/or modified sequence
atgggcatctggcagcggctgctgctgttcggcggcgtgagcctgagagcaggcgggggggcaacggccccactgggcggaagccgggccatggtttgcgggaggcagctctctggtgcaggatccgaaaccctgaagcagaggcgcacccagatcatgtctcgaggcctgcccaagcagaagcctattgagggcgtcaaacaggtaatcgtcgttgcctccggtaagggaggagtggggaaatccactacagcggtcaatttggccctggccctggcagccaatgactcttcaaaggcgatcggcttattggacgtcgacgtttatgggcccagtgtgccaaaaatgatgaacctaaagggcaatcccgaactgtcccagagcaatctgatgcgccccctgttaaactacggaatcgcatgcatgagtatgggctttcttgtggaggagtcggaaccagtggtgtggaggggcctaatggttatgagtgcgattgaaaagctgctgaggcaggttgactggggtcagctcgactatttggtagtcgatatgccacccggaacaggcgatgtccagttgtcagtgtcacagaatattcccataacaggggcagtgatcgtgtctacacctcaggacattgcccttatggatgcccacaaaggggcggagatgttccggcgcgtgcacgtacctgtcctcggactcgtgcagaatatgagcgtcttccagtgtcctaagtgtaagcacaaaacccacatttttggcgccgacggtgcccggaaattagcccagacccttggtttggaggtgctcggggacattcctctccacttaaatatccgggaggcttccgacacgggccagccaatcgtgttttcccagcctgagagcgacgaggccaaggcgtacctacgcattgccgtggaagtcgtcaggcgccttccgtcaccgagcgaatag

SEQ ID NO: 218083 - DNA, 3049 bp, Artificial Sequence
  derived and/or modified sequence
acccgcgacagtttcccagcagggctcacagcagcgttccgcgtcatggggatttggcagcgtctgctgctttttggtggggtgtcgctccgggctggtggcggggccactgccccgcttgggggaagccgagcgatggtttgtgggcgccagttgtctggcgccgggagtgagaccctaaaacaaagaagaacacaaatcatgtcccgaggacttccaaagcagaaaccgatagaaggtgttaaacaagttatagttgtggcttctggaaagggtggagtcggaaaatctactacagcagtgaatcttgcacttgcactagcagcgaacgattcgtccaaggccattggtttgctagatgtggatgtgtatggaccttcagttccaaagatgatgaatctgaaaggaaatccggaattatcacagagcaacctaatgaggcctctcttgaattatggtattgcttgtatgtctatgggctttctggttgaagaaagtgaaccagtagtttggagaggccttatggtaatgtcggccattgagaaattgttgaggcaggtagattggggtcaactggactacttagttgtagacatgccaccaggaactggagatgtgcagttatcagtctcacagaatattcctataacaggtgctgtgattgtctccacgccccaggacatcgcattgatggatgcacacaagggtgctgagatgtttcgcagagtccacgtgcccgtccttggccttgtccaaaacatgagtgttttccagtgtccaaaatgtaaacacaaaactcatatttttggtgctgatggtgcaaggaaactagcacagacccttggtcttgaagttctaggagacattcccttacaccttaatataagggaagcttcagatacaggccagccaattgtgttttcacagcctgaaagtgatgaggccaaagcttacttgaggattgctgtggaagtggtaagaagattgccatcaccttcagaatgattccccaagtgtcctggaaatttgcctggtactgacattaagaggacctttggaaatcagcaatgtggtgatggaacctacagaaataatagaaatcataactgttttatttctaaggaaagaatgtcttcatatttgacttgctaagctaaggttcacaaaactttgatgtatcaatgttaactgctatatttaggaattttttgaaagctggtgtgtaccacctgcaaagaactgcattttattttattgaattacccctttagaaatcacgagtttatgatgttacaagtccattttgggagagaactgtacactttttgcaggaccacagaattagtaatttaaatgatatactaaatttgtgtatgggcataagtattacgccttcccaccaggcaatttggactgtctttgaatcctgtctttggtactgtcttggacatgttcttaatatgaacctctgcttcttcatctggatcacactataccccagacttaatgaatttcagtctccaggagtggagcctgaacatatgtatttttagtaagaccatgatgatgttgatgatgattctggtaatcatggcagtaagaataatagctaacatttaacaagttaattataattgttcttccatttgtgtgagtgggtactattatctccattttacagataagtaatttgagatataatttgaaggcactcaaccttgagtgtcttgctgagggttactgtatctagcaggtgatggagcttggatttgaacttgagtaattcgatattagattcatctttttgtacaccaatgtgcttttgttaattaaaaaaagtcggtggtggctaggcgtggtggctcacgcctgtaatcccagcactttgggaggttgaggtgggtggatcatgaggtcaggagttcaagaccagcctgaccaacatggtgaaaccccgtctctactaaaaatacaaaaattagctgggtgtggtggcatatgcctgtaatcccagctactcgggaggctgaggcaggagaatcatttcaacccgggaggctgaggttgcagtgagtggagattgtaccactgcactccagcctggtcaatggagtgcgactccatctcaaaaaaaaaaaaaaaaaaaaaaaaagtcgggggagatgcaatatttagcatttcctcaaactttttttggccatgaaatccaccacccccctcctttttcagagcatttcatgaagttcacatttcaaataatacattttgaaaaacatttatcttgtctaattgaagctcaaagagatagagtcaatgacttttcaaagtcaggtagcagatagttttaaagctgcaagtactgataagtgtgagccattagttaattcgcatttataaagaagtggtctgtcacttttggcaaatgtcttgacatctgttgctctacagttgtcaactagaaaattaggcatagagtttcacattattataagcatgttttcacacaaaaacatgtacattgatgtttattgcaattttatgtgtaataaccaaaaacaacccagattttcttcattgggtaaatgattaaacaaaccatagtacattcataccgtgagtgctactcagcaataaaaaagaacaaactatgggtacaggcagcaacttataattccagagaattatgctgaatgaaaaaggccaatttaaaaaggttttgtaccaaaagattccatttatataacgttcttgaagtgacataattatagaaatggagaacagattagtggtggctgtgttaaggagggggtgaggatgggagagaattgggcgtggctgtgagaaacatgagggatccttgtgatgatggaaatgttctatatcacagctatcgatgtcagtatcccagttgtgatattgtgctatagttttgcaagatgttaccactgggggaaattgggtgaagggcacatggaatctctgtattatttcaactgcatgtaaatctacaattatctcaaaataaaaataaaagttaaaaaaacacaaa

SEQ ID NO: 218084 - DNA, 960 bp, Artificial Sequence
  derived and/or modified sequence
atgggcatttggcaacggctcttactcttcggaggcgtctcgctgagggctggtgggggtgccaccgcaccattaggaggatcaagggccatggtgtgtggaaggcagttaagcggtgctggctcagagacgctgaaacaaaggcggacccagatcatgagtagaggcctgccaaaacagaagccgatagagggtgtgaaacaggtgatcgtagtcgcgtccgggaaggggggtgtcggcaagtccaccaccgcagtgaacctggccttagctctggccgcaaacgactcttccaaggctatcgggctgcttgacgtcgacgtttatggacccagcgtaccgaaaatgatgaatcttaagggcaatccggaactctcgcaatctaatttaatgaggccgctccttaactacggaattgcttgtatgtcaatgggatttctggtggaggaatcagaaccagtggtctggcgaggactgatggttatgtctgcaatcgagaagctgctgcggcaggtggattggggacagctcgactacttggtggtggacatgccacctggaacaggagatgtgcagttgtcggtctctcaaaatattcctattacaggcgctgtgatcgtttctactccacaggatatagccctcatggacgcccacaaaggagccgagatgttccggagggtgcacgtgcctgtactgggtttggtgcagaatatgtcagtcttccaatgccctaagtgcaaacacaagacacacatcttcggcgcagacggggctagaaagctcgcccagacactggggttggaagtgttaggcgacatccccctgcaccttaacatccgcgaggcttccgacaccgggcaaccaattgtattttctcagcccgagagtgacgaagcaaaagcctatctgagaattgccgtagaggtggttcgaagacttccatccccatctgagtag

SEQ ID NO: 218085 - DNA, 960 bp, Artificial Sequence
  derived and/or modified sequence
atgggcatctggcagagactgctgctgttcggcggcgtgagcctgagagccggcggcggcgccaccgcccccctgggcggcagcagagccatggtgtgcggcagacagctgagcggcgccggcagcgagaccctgaagcagagaagaacccagatcatgagcagaggcctgcccaagcagaagcccatcgagggcgtgaagcaggtgatcgtggtggccagcggcaagggcggcgtgggcaagagcaccaccgccgtgaacctggccctggccctggccgccaacgacagcagcaaggccatcggcctgctggacgtggacgtgtacggccccagcgtgcccaagatgatgaacctgaagggcaaccccgagctgagccagagcaacctgatgagacccctgctgaactacggcatcgcctgcatgagcatgggcttcctggtggaggagagcgagcccgtggtgtggagaggcctgatggtgatgagcgccatcgagaagctgctgagacaggtggactggggccagctggactacctggtggtggacatgccccccggcaccggcgacgtgcagctgagcgtgagccagaacatccccatcaccggcgccgtgatcgtgagcaccccccaggacatcgccctgatggacgcccacaagggcgccgagatgttcagaagagtgcacgtgcccgtgctgggcctggtgcagaacatgagcgtgttccagtgccccaagtgcaagcacaagacccacatcttcggcgccgacggcgccagaaagctggcccagaccctgggcctggaggtgctgggcgacatccccctgcacctgaacatcagagaggccagcgacaccggccagcccatcgtgttcagccagcccgagagcgacgaggccaaggcctacctgagaatcgccgtggaggtggtgagaagactgcccagccccagcgagtag

SEQ ID NO: 218086 - protein, 1461 aa, Artificial Sequence
  derived and/or modified sequence
MALSVDSSWHRWQWRVRDGFPHCPSETTPLLSPEKGRQSYNLTQQRVVFPNNSIFHQDWEEVSRRYPGNRTCTTKYTLFTFLPRNLFEQFHRWANLYFLFLVILNWMPSMEVFHREITMLPLAIVLFVIMIKDGMEDFKRHRFDKAINCSNIRIYERKEQTYVQKCWKDVRVGDFIQMKCNEIVPADILLLFSSDPNGICHLETASLDGETNLKQRCVVKGFSQQEVQFEPELFHNTIVCEKPNNHLNKFKGYMEHPDQTRTGFGCESLLLRGCTIRNTEMAVGIVIYAGHETKAMLNNSGPRYKRSKIERRMNIDIFFCIGILILMCLIGAVGHSIWNGTFEEHPPFDVPDANGSFLPSALGGFYMFLTMIILLQVLIPISLYVSIELVKLGQVFFLSNDLDLYDEETDLSIQCRALNIAEDLGQIQYIFSDKTGTLTENKMVFRRCTIMGSEYSHQENAKRLETPKELDSDGEEWTQYQCLSFSARWAQDPATMRSQKGAQPLRRSQSARVPIQGHYRQRSMGHRESSQPPVAFSSSIEKDVTPDKNLLTKVRDAALWLETLSDSRPAKASLSTTSSIADFFLALTICNSVMVSTTTEPRQRVTIKPSSKALGTSLEKIQQLFQKLKLLSLSQSFSSTAPSDTDLGESLGANVATTDSDERDDASVCSGGDSTDDGGYRSSMWDQGDILESGSGTSLEEALEAPATDLARPEFCYEAESPDEAALVHAAHAYSFTLVSRTPEQVTVRLPQGTCLTFSLLCTLGFDSVRKRMSVVVRHPLTGEIVVYTKGADSVIMDLLEDPACVPDINMEKKLRKIRARTQKHLDLYARDGLRTLCIAKKVVSEEDFRRWASFRREAEASLDNRDELLMETAQHLENQLTLLGATGIEDRLQEGVPDTIATLREAGIQLWVLTGDKQETAVNIAHSCRLLNQTDTVYTINTENQETCESILNCALEELKQFRELQKPDRKLFGFRLPSKTPSITSEAVVPEAGLVIDGKTLNAIFQGKLEKKFLELTQYCRSVLCCRSTPLQKSMIVKLVRDKLRVMTLSIGDGANDVSMIQAADIGIGISGQEGMQAVMSSDFAITRFKHLKKLLLVHGHWCYSRLARMVVYYLYKNVCYVNLLFWYQFFCGFSSSTMIDYWQMIFFNLFFTSLPPLVFGVLDKDISAETLLALPELYKSGQNSECYNLSTFWISMVDAFYQSLICFFIPYLAYKGSDIDVFTFGTPINTISLTTILLHQAMEMKTWTIFHGVVLLGSFLMYFLVSLLYNATCVICNSPTNPYWVMEGQLSNPTFYLVCFLTPVVALLPRYFFLSLQGTCGKSLISKAQKIDKLPPDKRNLEIQSWRSRQRPAPVPEVARPTHHPVSSITGQDFSASTPKSSNPPKRKHVEESVLHEQRCGTECMRDDSCSGDSSAQLSSGEHLLGPNRIMAYSRGQTDMCRCSKRSSHRRSQSSLTI

SEQ ID NO: 218087 - DNA, 4386 bp, Artificial Sequence
  derived and/or modified sequence
atggccctgagcgtggacagcagctggcacagatggcagtggagagtgagagacggcttcccccactgccccagcgagaccacccccctgctgagccccgagaagggcagacagagctacaacctgacccagcagagagtggtgttccccaacaacagcatcttccaccaggactgggaggaggtgagcagaagataccccggcaacagaacctgcaccaccaagtacaccctgttcaccttcctgcccagaaacctgttcgagcagttccacagatgggccaacctgtacttcctgttcctggtgatcctgaactggatgcccagcatggaggtgttccacagagagatcaccatgctgcccctggccatcgtgctgttcgtgatcatgatcaaggacggcatggaggacttcaagagacacagattcgacaaggccatcaactgcagcaacatcagaatctacgagagaaaggagcagacctacgtgcagaagtgctggaaggacgtgagagtgggcgacttcatccagatgaagtgcaacgagatcgtgcccgccgacatcctgctgctgttcagcagcgaccccaacggcatctgccacctggagaccgccagcctggacggcgagaccaacctgaagcagagatgcgtggtgaagggcttcagccagcaggaggtgcagttcgagcccgagctgttccacaacaccatcgtgtgcgagaagcccaacaaccacctgaacaagttcaagggctacatggagcaccccgaccagaccagaaccggcttcggctgcgagagcctgctgctgagaggctgcaccatcagaaacaccgagatggccgtgggcatcgtgatctacgccggccacgagaccaaggccatgctgaacaacagcggccccagatacaagagaagcaagatcgagagaagaatgaacatcgacatcttcttctgcatcggcatcctgatcctgatgtgcctgatcggcgccgtgggccacagcatctggaacggcaccttcgaggagcacccccccttcgacgtgcccgacgccaacggcagcttcctgcccagcgccctgggcggcttctacatgttcctgaccatgatcatcctgctgcaggtgctgatccccatcagcctgtacgtgagcatcgagctggtgaagctgggccaggtgttcttcctgagcaacgacctggacctgtacgacgaggagaccgacctgagcatccagtgcagagccctgaacatcgccgaggacctgggccagatccagtacatcttcagcgacaagaccggcaccctgaccgagaacaagatggtgttcagaagatgcaccatcatgggcagcgagtacagccaccaggagaacgccaagagactggagacccccaaggagctggacagcgacggcgaggagtggacccagtaccagtgcctgagcttcagcgccagatgggcccaggaccccgccaccatgagaagccagaagggcgcccagcccctgagaagaagccagagcgccagagtgcccatccagggccactacagacagagaagcatgggccacagagagagcagccagccccccgtggccttcagcagcagcatcgagaaggacgtgacccccgacaagaacctgctgaccaaggtgagagacgccgccctgtggctggagaccctgagcgacagcagacccgccaaggccagcctgagcaccaccagcagcatcgccgacttcttcctggccctgaccatctgcaacagcgtgatggtgagcaccaccaccgagcccagacagagagtgaccatcaagcccagcagcaaggccctgggcaccagcctggagaagatccagcagctgttccagaagctgaagctgctgagcctgagccagagcttcagcagcaccgcccccagcgacaccgacctgggcgagagcctgggcgccaacgtggccaccaccgacagcgacgagagagacgacgccagcgtgtgcagcggcggcgacagcaccgacgacggcggctacagaagcagcatgtgggaccagggcgacatcctggagagcggcagcggcaccagcctggaggaggccctggaggcccccgccaccgacctggccagacccgagttctgctacgaggccgagagccccgacgaggccgccctggtgcacgccgcccacgcctacagcttcaccctggtgagcagaacccccgagcaggtgaccgtgagactgccccagggcacctgcctgaccttcagcctgctgtgcaccctgggcttcgacagcgtgagaaagagaatgagcgtggtggtgagacaccccctgaccggcgagatcgtggtgtacaccaagggcgccgacagcgtgatcatggacctgctggaggaccccgcctgcgtgcccgacatcaacatggagaagaagctgagaaagatcagagccagaacccagaagcacctggacctgtacgccagagacggcctgagaaccctgtgcatcgccaagaaggtggtgagcgaggaggacttcagaagatgggccagcttcagaagagaggccgaggccagcctggacaacagagacgagctgctgatggagaccgcccagcacctggagaaccagctgaccctgctgggcgccaccggcatcgaggacagactgcaggagggcgtgcccgacaccatcgccaccctgagagaggccggcatccagctgtgggtgctgaccggcgacaagcaggagaccgccgtgaacatcgcccacagctgcagactgctgaaccagaccgacaccgtgtacaccatcaacaccgagaaccaggagacctgcgagagcatcctgaactgcgccctggaggagctgaagcagttcagagagctgcagaagcccgacagaaagctgttcggcttcagactgcccagcaagacccccagcatcaccagcgaggccgtggtgcccgaggccggcctggtgatcgacggcaagaccctgaacgccatcttccagggcaagctggagaagaagttcctggagctgacccagtactgcagaagcgtgctgtgctgcagaagcacccccctgcagaagagcatgatcgtgaagctggtgagagacaagctgagagtgatgaccctgagcatcggcgacggcgccaacgacgtgagcatgatccaggccgccgacatcggcatcggcatcagcggccaggagggcatgcaggccgtgatgagcagcgacttcgccatcaccagattcaagcacctgaagaagctgctgctggtgcacggccactggtgctacagcagactggccagaatggtggtgtactacctgtacaagaacgtgtgctacgtgaacctgctgttctggtaccagttcttctgcggcttcagcagcagcaccatgatcgactactggcagatgatcttcttcaacctgttcttcaccagcctgccccccctggtgttcggcgtgctggacaaggacatcagcgccgagaccctgctggccctgcccgagctgtacaagagcggccagaacagcgagtgctacaacctgagcaccttctggatcagcatggtggacgccttctaccagagcctgatctgcttcttcatcccctacctggcctacaagggcagcgacatcgacgtgttcaccttcggcacccccatcaacaccatcagcctgaccaccatcctgctgcaccaggccatggagatgaagacctggaccatcttccacggcgtggtgctgctgggcagcttcctgatgtacttcctggtgagcctgctgtacaacgccacctgcgtgatctgcaacagccccaccaacccctactgggtgatggagggccagctgagcaaccccaccttctacctggtgtgcttcctgacccccgtggtggccctgctgcccagatacttcttcctgagcctgcagggcacctgcggcaagagcctgatcagcaaggcccagaagatcgacaagctgccccccgacaagagaaacctggagatccagagctggagaagcagacagagacccgcccccgtgcccgaggtggccagacccacccaccaccccgtgagcagcatcaccggccaggacttcagcgccagcacccccaagagcagcaacccccccaagagaaagcacgtggaggagagcgtgctgcacgagcagagatgcggcaccgagtgcatgagagacgacagctgcagcggcgacagcagcgcccagctgagcagcggcgagcacctgctgggccccaacagaatcatggcctacagcagaggccagaccgacatgtgcagatgcagcaagagaagcagccacagaagaagccagagcagcctgaccatctag

SEQ ID NO: 218088 - DNA, 4386 bp, Artificial Sequence
  derived and/or modified sequence
atggccctctccgtggacagtagttggcatcggtggcagtggagggtgagagacggcttccctcactgcccatcagagacaaccccacttttatctccagagaaggggcggcagtcatataatctgacccagcagcgggttgtgtttcccaataattcaatcttccatcaagactgggaagaagtgtctaggcggtaccctgggaatcggacatgcaccaccaagtacactctctttacattcttaccacggaatttgttcgagcagttccaccgttgggccaacctctatttcctgttcctcgtgatacttaattggatgccaagcatggaagtattccatagggaaatcacaatgttaccactggccatagtgttgtttgttatcatgatcaaggatgggatggaggacttcaaacgacacagattcgataaggccatcaactgctccaacattcgaatctatgagcggaaggagcagacctatgtgcagaagtgctggaaagatgtcagggtgggtgattttattcagatgaagtgtaacgagatcgttcccgctgacattttgttgttgttttcctccgaccccaatggaatctgtcatctcgagaccgcctcactggatggagagactaaccttaagcagcgctgcgtggtcaagggcttctcccaacaggaggtacagttcgagcctgagctgttccacaatacaatcgtttgcgaaaaaccaaacaaccatctgaacaaatttaagggctatatggaacacccggatcagacccggactggatttggctgcgagtccctgctgctgcgcgggtgcaccattaggaacacagagatggcggtcggtattgtaatatacgccggtcatgaaaccaaagccatgctgaacaacagcggcccccggtataaaaggtctaagattgagagacgaatgaatatagacatctttttttgcatcgggatattaatcctgatgtgtcttattggcgctgtgggccactccatttggaatggcacctttgaggaacatccaccttttgacgtccctgatgcaaatggctcattcttgccctccgccctgggcggattctacatgttcctgaccatgattatactcctgcaggtcttgattcccatcagtctgtacgtgtctattgaactggttaaattaggacaggtgttcttcttatccaatgacctggacctgtatgacgaggaaacagatctgagcattcagtgccgggccctgaatatagcggaggatttgggacagatccaatacatcttctctgacaaaaccggaactttgaccgagaataaaatggtgttccgccgctgcacaatcatgggcagcgagtactcccatcaagagaatgcgaaacgactagagacaccgaaggagctcgacagtgacggagaagaatggacccagtatcagtgcctgtcattcagcgctcgttgggcacaggaccctgccacaatgaggagccagaagggggcccagcctttgaggcgtagccagtctgcaagggttccgatacagggccattaccggcagcgctcaatgggccaccgtgaatcctcccaacccccagtggccttttcttcgagtatagaaaaggacgtgactccggacaagaacctgcttacaaaggtgcgggacgccgcactctggctggagacgctgtccgattctcgacccgccaaggccagtctttccacaacctccagtatagcagatttctttctcgccctgacaatctgcaattctgttatggtgtcaacaacaaccgagccccggcagagagttactattaaaccttcctccaaggcacttgggacttccctggaaaagatccagcagctgtttcaaaaattaaagctactgagtctgtcgcaatcgttctcgtccactgcccccagtgatacagatctgggcgagagcctgggcgccaacgtggcgaccactgatagtgatgagagggatgacgcctcagtgtgcagcggcggcgatagcaccgatgacggcggctatcggtcatccatgtgggaccagggagacattctggaatcaggctccgggacttccctggaagaggccttagaggccccagccacggacttagccagaccagagttctgttatgaggccgaatctccagatgaggccgctctcgtgcacgccgcacatgcttatagcttcacattggtttctcgaacccccgagcaggtgactgttagactgcctcagggaacctgtctcaccttttcacttttgtgcacactcggctttgattctgttcggaagaggatgagtgtcgttgtgcgccacccactgactggagaaatcgtagtgtacacaaagggagccgatagtgtgatcatggatctcctcgaggatccagcctgcgtgccagatataaatatggaaaaaaagctgaggaagatacgggcccgtactcagaagcatttggatttgtacgcccgtgacggcttgagaactctctgtatcgccaaaaaagttgtgagcgaagaagacttccgacggtgggcttccttccgacgggaggcggaagcgtccctcgataaccgggatgagctcctgatggagactgcccaacatctagagaatcaattaaccctccttggtgcaacaggaatcgaggataggctgcaggagggcgtcccagatactattgccaccctgagagaggcgggtattcagctttgggtcctgaccggagataagcaggaaaccgccgtgaatatcgctcatagctgtcgactcctgaaccagaccgacacagtctacacgattaacaccgagaaccaggaaacctgcgagagcatcctgaactgtgcccttgaagagctgaagcaattccgtgagcttcaaaagccagaccgaaagcttttcgggtttagactgccaagcaagacacctagcatcaccagcgaagcagttgtcccagaagcggggctcgtcatcgacggaaagaccctcaatgcaatcttccaggggaaactcgaaaagaaattcctcgagctgacccagtattgcagatctgtcctgtgctgccgaagtacaccactgcaaaagtcaatgattgtgaaactcgttcgggacaaactacgcgtcatgacgttgagcattggcgatggcgccaatgatgtctcaatgatccaggccgcagacatagggataggcatttccggccaggaaggaatgcaagcagttatgagtagtgacttcgcaattactagattcaaacatctcaaaaaacttctgctcgtgcatgggcattggtgctactcaagattggcccgtatggtcgtctactacctctataagaacgtctgttacgtcaacctgctcttctggtaccaatttttttgtggattttcatccagtaccatgattgactattggcagatgattttctttaacttattttttacgtctttaccgccgctggtctttggagtactggacaaggacatatctgcagaaaccctactcgctttgcccgagctctataaatcaggccaaaactcggaatgttacaatctttcaacattctggataagtatggtggacgccttttatcagagtcttatatgcttttttatcccgtacctcgcatataagggatctgacattgacgttttcacattcggtacacctattaataccattagcctcacaacaattttgctgcaccaggccatggagatgaagacttggacaatctttcacggggtggtgttattagggagcttcttgatgtactttttggtgtcacttctgtacaatgctacctgcgtgatctgcaattctcccaccaacccttactgggtgatggaggggcagctctctaaccctaccttttacctggtctgctttctaacgcctgtggtcgcgctactgcccagatactttttcctaagcctacaaggaacctgtggaaaatccctaatcagtaaagcacagaaaatcgacaaacttccaccggataaacgaaatctggagatccagtcctggaggtcccgacagcggcctgcccccgtacccgaagtcgcaagacccacacaccaccctgtctcttcaatcacgggccaggacttttcagcttcgactcccaagagcagcaatccgcctaaaaggaagcatgtggaagagagcgtgcttcacgagcagaggtgtggaactgagtgtatgcgagacgactcctgtagcggggactccagcgcccagctgagtagcggagagcatctgctcgggcctaacaggattatggcttacagtcgtggccagaccgacatgtgccgttgtagtaagcgaagcagtcacagaagatctcaaagtagcttaacaatttag

SEQ ID NO: 218089 - DNA, 4386 bp, Artificial Sequence
  derived and/or modified sequence
atggccctgtctgtggacagctcctggcaccgctggcagtggagggtgagagatggcttcccccactgccccagcgagaccacccccctgctgagccctgagaagggccggcagagctacaacctgacccagcagagggtggtgttccccaacaacagcatcttccaccaggactgggaggaggtgagccgccgctacccaggcaacagaacctgcaccaccaagtacaccctcttcaccttcctgcccaggaacctgtttgagcagttccaccgctgggccaacctgtacttcctgttcctggtgatcctgaactggatgcccagcatggaggtgttccaccgggagatcaccatgctgcccctggccatcgtgctgtttgtgatcatgatcaaggatggcatggaggacttcaagaggcacagatttgacaaggccatcaactgcagcaacatccgcatctatgaaaggaaggagcagacctacgtgcagaagtgctggaaggatgtgcgggtgggggacttcatccagatgaagtgcaatgaaattgtgcctgctgacatcctgctgctcttcagcagtgaccccaacggcatctgccacctggagacagccagcctggatggagagaccaacctgaagcagagatgtgtggtgaagggcttcagccagcaggaggtgcagtttgagcctgagctgttccacaacaccatcgtgtgtgagaagcccaacaaccacctgaacaagttcaagggctacatggagcacccagaccagaccaggacaggcttcggctgtgagagcctgctgctgcggggctgcaccatccggaacacagagatggctgtgggcatcgtcatctatgccggccacgagaccaaggccatgctgaacaacagcggcccccgctacaagaggagcaagattgaaagaaggatgaacatcgacatcttcttctgcatcggcatcctgatcctgatgtgcctgattggagctgtgggccacagcatctggaatggcacctttgaggagcaccccccatttgatgtgcctgatgccaacggcagcttcctgcccagcgccctgggcggcttctacatgttcctgaccatgatcatcctgctgcaggtgctgatccccatcagcctgtatgtgtccattgagctggtgaagctgggccaggtgttcttcctgagcaatgacctggacctgtatgatgaggagacagacctgagcatccagtgccgggccctgaacattgctgaggacctgggccagatccagtacatcttcagtgacaagacaggcaccctgacagagaacaagatggtgttccgccgctgcaccatcatgggcagcgagtacagccaccaggagaatgccaagaggctggagacccccaaggagctggacagtgatggagaggagtggacccagtaccagtgcctgtccttcagcgcccgctgggcccaggaccctgccaccatgaggagccagaagggggcccagcccctgcggcgcagccagagcgcccgggtgcccatccagggccactaccggcagaggtccatgggccaccgggagagcagccagccccctgtggccttcagcagcagcattgagaaggatgtgaccccagacaagaacctgctgaccaaggtgagagatgctgccctgtggctggagaccctgagtgacagcaggcctgccaaggccagcctgagcaccaccagcagcattgctgacttcttcctggccctgaccatctgcaacagcgtgatggtgtccaccaccacagagccccggcagagggtgaccatcaagcccagcagcaaggccctgggcaccagcctggagaagatccagcagctgttccagaagctgaagctgctgagcctgagccagagcttcagcagcacagcccccagcgacacagacctgggggagagcctgggcgccaacgtggccaccacagacagtgatgaaagagatgatgcctctgtgtgcagcggcggggacagcacagatgatggcggctaccgcagctccatgtgggaccagggcgacatcctggagagcggcagcggcaccagcctggaggaggccctggaggccccagccacagacctggcccggcctgagttctgctatgaagctgagagcccagatgaagctgccctggtgcacgccgcccacgcctacagcttcaccctggtgtccaggaccccagagcaggtgacagtgcggctgccccagggcacctgcctgaccttcagcctgctgtgcaccctgggctttgacagcgtgaggaagaggatgtctgtggtggtgcgccaccccctgaccggggagatcgtggtgtacaccaagggagctgacagcgtcatcatggacctgctggaggaccctgcctgtgtgcctgacatcaacatggagaagaagctgaggaagatccgggcccggacccagaagcacctggacctgtatgccagagatggcctgcggaccctgtgcatcgccaagaaggtggtgtctgaggaggacttccgccgctgggccagcttccggcgggaggccgaggccagcctggacaacagagatgagctgctgatggagacagcccagcacctggagaaccagctgaccctgctgggcgccactggaattgaggaccggctgcaggagggcgtgcctgacaccatcgccaccctgcgggaggccggcatccagctgtgggtgctgactggagacaagcaggagacagctgtgaacatcgcccacagctgccgcctgctgaaccagacagacacagtgtacaccatcaacacagagaaccaggagacctgtgagagcatcctgaactgtgccctggaggagctgaagcagttccgggagctgcagaagccagacaggaagctgtttggcttccggctgcccagcaagacccccagcatcaccagcgaggccgtggtgcctgaggccggcctggtgattgatggcaagaccctgaatgccatcttccagggcaagctggagaagaagttcctggagctgacccagtactgccgctctgtgctgtgctgccgcagcacccccctgcagaagtccatgattgtgaagctggtgcgggacaagctgcgggtgatgaccctgagcattggagatggagccaatgatgtgtccatgatccaggccgctgacatcggcatcggcatcagcggccaggagggcatgcaggccgtgatgagcagtgactttgccatcacccgcttcaagcacctgaagaagctgctgctggtgcacggccactggtgctacagccggctggccaggatggtggtgtactacctgtacaagaatgtgtgctacgtgaacctgctcttctggtaccagttcttctgtggcttcagcagcagcaccatgattgactactggcagatgatcttcttcaacctcttcttcaccagcctgccccccctggtgtttggagtgctggacaaggacatctctgctgagaccctgctggccctgcctgagctgtacaagagcggccagaacagcgagtgctacaacctgagcaccttctggatctccatggtggatgccttctaccagagcctcatctgcttcttcatcccctacctggcctacaagggcagtgacattgatgtgttcaccttcggcacccccatcaacaccatcagcctgaccaccatcctgctgcaccaggccatggagatgaagacctggaccatcttccacggcgtggtgctgctgggcagcttcctgatgtacttcctggtgtccctgctgtacaatgccacctgtgtgatctgcaacagccccaccaacccctactgggtgatggagggccagctgagcaaccccaccttctacctggtgtgcttcctgacccctgtggtggccctgctgccccgctacttcttcctgagcctgcagggcacctgtgggaagagcctcatcagcaaggcccagaagattgacaagctgcccccagacaagaggaacctggagatccagagctggaggagccggcagaggcctgcccctgtgcctgaggtggcccggcccacccaccaccctgtgagcagcatcaccggccaggacttcagcgccagcacccccaagagcagcaacccccccaagaggaagcacgtggaggagagcgtgctgcacgagcagagatgtggcacagagtgcatgagagatgacagctgcagcggggacagcagcgcccagctgagcagtggagagcacctgctgggccccaaccgcatcatggcctacagccggggccagacagacatgtgccgctgcagcaagaggagcagccacagaagaagccagagcagcctgaccatctag

SEQ ID NO: 218090 - DNA, 4386 bp, Artificial Sequence
  derived and/or modified sequence
atggccctgagcgtggacagcagctggcaccggtggcagtggcgggtccgcgacggtttccctcattgtcctagcgaaactacccccttgctgtctccagaaaaagggcgtcaatcttataacttaactcagcagagggtggtttttcctaacaacagtatctttcaccaagattgggaagaggtcagccggaggtatcctgggaatagaacatgtactactaaatataccttgtttacgtttcttccaaggaatctgtttgaacagtttcaccgttgggccaatctgtattttctgtttctcgtgatcttaaattggatgccatccatggaggtttttcatcgcgaaataacgatgctgccgctggcaatcgtgctcttcgtgatcatgattaaagacgggatggaagactttaagcgacacagatttgataaggccattaactgctcgaacatccggatctatgagcgtaaggagcaaacttatgtgcaaaagtgctggaaggacgtaagagtgggtgacttcatccagatgaagtgcaatgagatcgtgcctgcagacatcctgttattgttctcctcagaccctaacggtatttgccacctggaaactgctagcttggatggagaaaccaatctgaagcagcggtgcgtggtcaagggcttctcacaacaggaagtgcaattcgaaccagaactgttccacaataccatcgtgtgtgaaaaacctaacaatcatctgaataagtttaaaggttatatggaacaccccgatcagacacggacagggtttggctgcgagtctcttcttctaaggggttgtacaatccgcaacactgagatggctgttgggatagtgatttacgccggacatgagaccaaggcaatgttaaacaattcaggacccagatataagcggagtaaaattgaacggaggatgaacattgacatttttttttgcattgggattctgattcttatgtgcctgattggcgctgtggggcatagtatctggaacggcacctttgaggagcatccgccattcgatgtgcccgacgccaatggttcttttttgccttcggccttgggcggattctacatgtttctgactatgatcatactgctccaggtgctcatccccatcagcctctacgtgagcatcgaactggtgaaactcgggcaggttttttttctcagcaacgatttggatctttacgacgaggaaacagatttgtcaattcagtgtcgggctttgaacatcgcggaagacctgggacagattcagtacatctttagtgataaaactggcaccctgaccgagaacaagatggttttcagaaggtgtaccattatgggcagtgaatattcacaccaagagaatgccaagcgccttgaaactccaaaagagctcgattccgacggtgaagagtggacacagtatcaatgtctcagtttttcagctcgttgggcccaagaccccgctacaatgagatctcagaagggtgcacaacccttgcggagatcccagtccgctcgggtccccattcagggccattatcgtcagaggtcaatgggccaccgagagagctcacagcctccagttgccttttccagctctatcgaaaaggatgtcaccccagataaaaacctgcttacgaaggtgcgtgatgccgctctctggttggaaactctgtcagatagcaggcctgccaaggcctctctgtccaccacaagctccatcgcagattttttcctggcgctcaccatttgcaacagtgtcatggtttccaccaccacagagccgcggcagcgggtgacgatcaaaccttccagtaaggccttgggcacaagccttgagaaaattcagcagctgttccagaagctcaaacttttgtccctgagccaaagcttttcttctactgccccctccgacactgacttaggcgagtctctgggagcaaacgtggcaacaaccgacagcgacgagagggatgatgcctccgtgtgttccgggggtgattcaacagatgatggggggtatcgatcttctatgtgggatcaaggggatatcctcgagtctggatcgggaacttcactggaggaggcgctcgaggcccctgccactgatcttgccagacccgagttttgctatgaagctgaatcacccgatgaagcagccctcgtacatgctgcacatgcatacagcttcaccttggtatcccgtaccccagagcaagtcacggtgcgcctaccacaagggacttgtttgaccttttccttactgtgtacattgggtttcgattctgttagaaagagaatgtctgtcgtggtccgacacccactgacaggtgaaatcgtggtttacacaaaaggcgcggacagtgtcataatggacctcctcgaggacccggcctgcgtaccagacatcaacatggagaaaaagctgaggaagatacgtgctcggacacagaagcacttagacctgtacgctcgggatggattaaggacattatgcatcgctaagaaagtggtgtctgaggaggattttcgtaggtgggccagtttccgacgtgaagctgaggcgtcattggataaccgcgatgagcttctgatggaaacagcccagcatctggaaaatcaactcacactgctcggggctactgggattgaggacagacttcaagaaggcgttcccgacacaatcgcaacactgcgcgaagccggcatccagctatgggtcctgactggcgataagcaggagaccgccgtgaatattgcgcactcttgccgcctgctgaaccagaccgacactgtgtatacaatcaacacggaaaaccaagagacttgcgagtcgatccttaattgcgccctggaagagctcaaacagttcagagagctacagaagccagacaggaagttgttcggcttcagactaccttccaagactccgagtattacctccgaggccgtcgtgccagaggccggcctggtcatagacgggaagacactaaacgctatctttcagggtaaactagaaaaaaagtttttagaacttacacagtattgtcgaagcgtactgtgctgtcggtcgacacctctccagaagtcaatgattgtgaagctcgtgagggataagctgagagtcatgactctgtccatcggagatggagccaacgacgttagtatgatccaagccgcagatataggtatcggcattagcggccaggagggtatgcaggcggttatgtcatccgattttgctattaccagatttaagcaccttaaaaagctactgttagtgcacgggcactggtgctacagcagactcgcaagaatggtcgtgtactacctgtacaagaacgtctgctacgtgaacctgttgttttggtaccagttcttttgcggcttctcttcctccactatgattgactattggcaaatgattttctttaatttgttttttacaagcctacctcctctcgtctttggcgtactagataaagatatttccgctgaaactctcttagcattgcccgaactgtacaagtctggacagaattcagaatgctacaatctcagtacattttggatttcaatggtggatgccttctaccagtcacttatctgcttctttatcccttacctcgcctacaaaggatccgacatcgatgtttttacctttggaactccaattaataccatcagtcttaccacaatactactgcatcaggccatggagatgaagacttggaccatcttccacggcgtggttctccttggaagctttctcatgtatttcttggtgagcttgctgtataatgccacatgtgttatttgcaactcgccaactaacccttactgggtgatggagggacagttatctaatcctacgttttatttggtgtgctttctgactcccgtcgtcgcacttcttccgaggtacttcttcctcagtctgcaggggacttgcggaaagagtctgatctcaaaagcacagaagatcgacaagctgccaccagataaacggaacttagaaatccaatcatggcggtcccggcagcggcctgccccagtccccgaggtggcccgtcctactcatcaccctgtttcttccatcacaggacaagatttctcagcgagtacacctaagtcctccaatccccccaaacgtaagcacgtggaagagtcagtactccacgaacagagatgcggcaccgaatgtatgagggatgattcctgcagtggcgatagcagtgctcagctttcttctggtgagcatttgcttggcccaaatcgcatcatggcgtactcccggggccagaccgatatgtgtcgctgtagcaagcggtcttcgcatcggcgctcacaatcttctctgactatctag

SEQ ID NO: 218091 - DNA, 4386 bp, Artificial Sequence
  derived and/or modified sequence
atggcgctgtctgtcgacagctcctggcatagatggcagtggcgggtgcgcgacggattccctcactgtccaagtgaaactaccccccttctgagtcctgagaagggcaggcagtcttacaacctgacccagcagagggtggtcttcccaaataattccatctttcatcaagactgggaagaagtgtctcggagataccctgggaatcgaacgtgcaccactaaatacactttgtttacctttcttccgcgaaatttgttcgagcaatttcacagatgggccaacctgtacttcctgtttttggtgatccttaattggatgcctagcatggaggtgtttcaccgagagatcacaatgcttccgttggccatagttctcttcgttattatgattaaagacggaatggaagatttcaaaaggcatcggtttgataaagcaattaattgttctaacattaggatctatgagagaaaggagcaaacttacgtccagaagtgctggaaggatgtgagagttggcgatttcattcagatgaaatgtaatgagatagtgccagccgatatactgctgttgttcagtagtgatccaaatggaatctgccatctagagaccgccagtctggacggcgagacaaacctcaaacagagatgcgtagttaagggcttcagccagcaagaggtccagtttgagccagaactattccataacaccattgtgtgtgaaaagcctaacaaccatctgaataagtttaaaggttacatggaacatccagaccaaacccgtacaggtttcgggtgtgaatctttactcctgaggggatgtactattaggaacacggaaatggcagttgggatcgttatctatgccggacacgaaacaaaagccatgctgaacaacagcggtccgcgatataaacggtcaaagatagagaggcgaatgaacatcgatatatttttctgcataggaattctcatcctcatgtgcttaatcggtgctgtggggcactcaatttggaatggcacttttgaagagcatccaccattcgatgtccccgacgcgaacggtagttttctcccctcagccctcggcggattctacatgttcctgactatgataatcctcttacaggtcctgatccccatttcactttatgtttcgatcgagcttgtcaagctgggccaggtgttcttcctgtctaacgacctggacctatatgatgaggagacagatctctctatccaatgtcgcgctttgaacattgcggaggatctcggtcagatccagtatatctttagtgataaaactgggacgttaacagagaacaagatggtgtttcggaggtgtaccataatgggaagtgagtattcccaccaggaaaacgcgaagcggttggagacacccaaggagttggactctgacggggaagaatggactcagtatcagtgtctttcttttagcgctaggtgggcgcaggatcccgcaactatgcgatcccagaagggcgctcagccattgcggagatcccagagcgctcgggttccaatccaggggcactaccgccaacgcagtatgggccatagggagtcatctcagccacccgtggcattttcttcgtctatcgagaaagatgtgacccccgataagaatctgttgactaaggtacgcgatgctgcgctctggctggaaaccttgtccgacagccgacctgcaaaagcatccctgtcaacgacctcctcgatagctgacttcttcctggcactgacaatctgtaattctgtgatggtttcaactactacggaacccaggcagcgcgttactatcaaacccagtagcaaagcccttggaacctctttggagaagatacaacagctgttccagaagttgaaactgttgtccctgagccagtcattcagctccacagcccctagcgacacggatctaggggaatctctgggggctaatgttgccaccactgattcagacgaacgcgacgatgcaagcgtgtgcagtggcggagactccaccgatgacggtggataccgaagttccatgtgggaccagggggacattctggagtccgggtccggaaccagcctggaagaggccctagaagcccctgccacggacctggcaaggcccgaattttgctatgaagctgagtctccggacgaggctgcactcgtgcatgctgcacacgcctactccttcacccttgtaagccgcacccccgaacaggtgaccgtccggctccctcagggaacttgcctaaccttttctttactgtgtaccttagggtttgacagtgtgcggaagcgaatgtctgttgttgtgcgacatcctctcactggcgagatagtggtatataccaagggcgctgactccgtgattatggacttgctagaggaccctgcatgtgtccccgatatcaacatggaaaaaaagctgaggaaaattcgggctagaactcagaagcacctggatctgtacgccagggacgggctgcggaccctttgcatcgcaaagaaagttgtctcagaggaggactttcgccgatgggcaagtttccgcagggaagccgaagcatcactggacaaccgagatgaactgctcatggaaacagctcaacatttggagaatcaactgactctcctgggagccactggaatagaagaccgcttgcaggaaggagtgcccgacactattgccactttacgggaggcgggaatacagctttgggtcctaacaggggacaagcaggaaaccgccgtgaatatcgcgcatagctgcaggctgttgaaccagaccgacaccgtgtatactataaacacagagaaccaagagacttgcgagtccattctaaactgcgccctcgaagagctgaagcagttccgggaactacagaagccagatagaaagctgtttggcttccgcttgcccagcaagactccaagcataacgagcgaggccgtcgtgcctgaggctggtttggtgattgacggcaaaaccctaaatgctattttccaaggaaaattagagaagaaattccttgagttgacccaatactgtcgatccgttctgtgctgtcgctcaaccccactgcagaaatctatgattgttaaactagtcagagataagctccgagtgatgacactcagcattggtgatggtgccaatgatgtcagcatgattcaggccgcagacatcggcattggaatctccggccaggaggggatgcaagccgtcatgtcgtctgatttcgccatcacccggttcaagcacctaaagaaactgcttctggtgcacgggcactggtgctactctcgcctcgcgcgtatggtggtctattacctctataagaacgtttgttatgtgaacctcctattttggtaccaatttttttgcggtttctcctcttccaccatgatcgactactggcaaatgatattttttaacctgttctttaccagcctgcctcccttggtctttggggtcctcgacaaagacatcagcgcagaaacactgctcgccttgccggagttgtacaaatccggccaaaatagcgagtgctataacctgtccaccttctggataagcatggtagacgcattctatcagtcactgatatgcttctttataccgtatcttgcctacaaggggagcgatatagacgtctttacattcggcactccgatcaacaccatctccctcaccaccatcctgctgcaccaggccatggagatgaaaacatggacaatttttcatggagtggtgctcctgggcagcttcctaatgtactttctggtcagcctcttgtataacgctacttgtgttatctgcaacagtcctacgaacccatattgggtcatggagggccagctgtctaacccaactttctatctggtatgttttcttacacccgttgttgcactgctcccaagatacttcttcctgtctctgcagggcacttgcggcaaatccctgatatccaaggcccagaaaatagacaagctccctcctgataagcgaaacctggaaatacagtcttggagatctcgccagagaccagctcctgtccctgaagtagcccgaccaacacaccacccagtctcctcaattaccggtcaggatttcagcgcttcgaccccgaagagttcaaacccacctaagaggaagcatgttgaagaaagcgttctccatgaacaacgctgtggcactgagtgcatgcgggacgacagttgctctggtgacagctctgcccagttgagctccggagaacatctattggggcctaacagaataatggcgtattctagaggacagactgacatgtgtagatgcagtaagcgaagtagccatcgcagaagccagagctctttaacaatctag

SEQ ID NO: 218092 - DNA, 7566 bp, Artificial Sequence
  derived and/or modified sequence
tctttcactcttgggcctagcgaggcagcttatttttcctttttctttcattggtcacagttatttcttttcagtgtgtcatcttctctaagtttctgagggagtgttagcttgaggccttgccttgacataatcagatataatcagaaaaatgaaaaattccataggaaagagaactattttagccaaggtgtgcgagagaaataccgccactttcaagcactgttttcttctactggagtctgctcaatagggacgtcagctttgctggggcttcctttgacaagagaatcagaaccgactggtgacatttgtttcaatgaaagcaacagtgtgaagagtaagtagtttttcctattattcatctcactcagtggagataatgaactcctctccactgccaagatgagaaactaccatttcttacacatggacacaaagatgagaacaataaacactgagacttcaaaaaggagggaaggagaaagaggaacaagacttgaaatctacctatcagaacttgcaatttattctgatcaacaatttgcccagctaaagtactacatctgccccctcttcctgtggctgtaggggcacagcaaaggtcactggtctaacctccttaaagggactccgctaacagaaaccaccaaatggagtggagaaaaagaaaagggatcccctatccccaactccagccatctagattaagaaaagccagctgactggacagtagcacagcccagtcacctcatggacaaatttcctaggaaagaacctctcccatctattctacttatcactctcctttgaggttccggccacagatcttcgcctgctgctggaaatggccctctcagtggactcatcgtggcatcggtggcagtggagagtcagagatggcttcccccattgtccatcggaaaccacaccgctgctctctccagagaaagggagacagagctacaacttgacacagcagcgggtcgtgttccccaacaacagcatattccatcaagattgggaagaggtctccaggagataccctggcaacagaacctgcacaaccaaatacaccctcttcaccttcctgccccggaatctctttgagcaatttcatagatgggctaacctctatttcctgttcctggtgattttgaactggatgccctccatggaagtcttccacagagaaatcaccatgttaccattggccattgtcctgttcgtcatcatgatcaaggatggcatggaggacttcaagagacaccgctttgataaagcaataaactgctccaacattcgaatttatgaaagaaaagagcagacctatgtgcagaagtgctggaaggatgtgcgcgtgggagacttcatccaaatgaaatgcaatgagattgtcccagcagacatactcctccttttttcctctgaccccaatgggatatgccatctggaaactgccagcttggatggagagacaaacctcaagcaaagatgtgtcgtgaagggcttctcacagcaggaggtacagttcgaaccagagcttttccacaataccatcgtgtgtgagaaacccaacaaccacctcaacaaatttaagggttatatggagcatcctgaccagaccaggactggctttggctgtgagagtcttctgcttcgaggctgcaccatcagaaacaccgagatggctgttggcattgtcatctatgcaggccatgagacgaaagccatgctgaacaacagtggcccccggtacaaacgcagcaagattgagcggcgcatgaatatagacatcttcttctgcattgggatcctcatcctcatgtgccttattggagctgtaggtcacagcatctggaatgggacctttgaagaacaccctcccttcgatgtgccagatgccaatggcagcttccttcccagtgcccttgggggcttctacatgttcctcacaatgatcatcctgctccaggtgctgatccccatctctttgtatgtctccattgagctggtgaagctcgggcaagtgttcttcttgagcaatgaccttgacctgtatgatgaagagaccgatttatccattcaatgtcgagccctcaacatcgcagaggacttgggccagatccagtacatcttctccgataagacggggaccctgacagagaacaagatggtgttccgacgttgcaccatcatgggcagcgagtattctcaccaagaaaatgctaagcgactggagaccccaaaggagctggactcagatggtgaagagtggacccaataccaatgcctgtccttctcggctagatgggcccaggatccagcaactatgagaagccaaaaaggtgctcagcctctgaggaggagccagagtgcccgggtgcccatccagggccactaccggcaaaggtctatggggcaccgtgaaagctcacagcctcctgtggccttcagcagctccatagaaaaagatgtaactccagataaaaacctactgaccaaggttcgagatgctgccctgtggttggagaccttgtcagacagcagacctgccaaggcttccctctccaccacctcctccattgctgatttcttccttgccttaaccatctgcaactctgtcatggtgtccacaaccaccgagcccaggcagagggtcaccatcaaaccctcaagcaaggctctggggacgtccctggagaagattcagcagctcttccagaagttgaagctattgagcctcagccagtcattctcatccactgcaccctctgacacagacctcggggagagcttaggggccaacgtggccaccacagactcggatgagagagatgatgcatctgtgtgcagtggaggtgactccactgatgacggtggctacaggagcagcatgtgggaccagggcgacatcctggagtctgggtcaggcacttccttggaggaggcattggaggccccagccacagacctggccaggcctgagttctgttacgaggctgagagccctgatgaggccgccctggtgcacgctgcccatgcctacagcttcacactagtgtcccggacacctgagcaggtgactgtgcgcctgccccagggcacctgcctcaccttcagcctcctctgcaccctgggctttgactctgtcaggaagagaatgtctgtggttgtgaggcacccactgactggcgagattgttgtctacaccaagggtgctgactcggtcatcatggacctgctggaagacccagcctgcgtacctgacattaatatggaaaagaagctgagaaaaatccgagcccggacccaaaagcatctagacttgtatgcaagagatggcctgcgcacactatgcattgccaagaaggttgtaagcgaagaggacttccggagatgggccagtttccggcgtgaggctgaggcatccctcgacaaccgagatgagcttctcatggaaactgcacagcatctggagaatcaactcaccttacttggagccactgggatcgaagaccggctgcaggaaggagttccagatacgattgccactctgcgggaggctgggatccagctctgggtcctgactggagataagcaggagacagcggtcaacattgcccattcctgcagactgttaaatcagaccgacactgtttataccatcaatacagagaatcaggagacctgtgaatccatcctcaattgtgcattggaagagctaaagcaatttcgtgaactacagaagccagaccgcaagctctttggattccgcttaccttccaagacaccatccatcacctcagaagctgtggttccagaagctggattggtcatcgatgggaagacattgaatgccatcttccagggaaagctagagaagaagtttctggaattgacccagtattgtcggtccgtcctgtgctgccgctccacgccactccagaagagtatgatagtcaagctggtgcgagacaagttgcgcgtcatgaccctttccataggtgatggagcaaatgatgtaagcatgattcaagctgctgatattggaattggaatatctggacaggaaggcatgcaggctgtcatgtccagcgactttgccatcacccgctttaagcatctcaagaagttgctgctcgtgcatggccactggtgttactcgcgcctggccaggatggtggtgtactacctctacaagaacgtgtgctacgtcaacctgctcttctggtatcagttcttctgtggtttctccagctccaccatgattgattactggcagatgatattcttcaatctcttctttacctccttgcctcctcttgtctttggagtccttgacaaagacatctctgcagaaacactcctggcattgcctgagctatacaagagtggccagaactctgagtgctataacctgtcgactttctggatttctatggtggatgcattctaccagagcctcatctgtttctttatcccttacctggcctataagggctctgatatagatgtctttacctttgggacaccaatcaacaccatctccctcaccacaatccttttgcaccaggcaatggaaatgaagacatggaccattttccacggagtcgtgctcctcggcagcttcctgatgtactttctggtatccctcctgtacaatgccacctgcgtcatctgcaacagccccaccaatccctattgggtgatggaaggccagctctcaaaccccactttctacctcgtctgctttctcacaccagttgttgctcttctcccaagatactttttcctgtctctgcaaggaacttgtgggaagtctctaatctcaaaagctcagaaaattgacaaactccccccagacaaaagaaacctggaaatccagagttggagaagcagacagaggcctgcccctgtccccgaagtggctcgaccaactcaccacccagtgtcatctatcacaggacaggacttcagtgccagcaccccaaagagctctaaccctcccaagaggaagcatgtggaagagtcagtactccacgaacagagatgtggcacggagtgcatgagggatgactcatgctcaggggactcctcagctcaactctcatccggggagcacctgctgggacctaacaggataatggcctactcaagaggacagactgatatgtgccggtgctcaaagaggagcagccatcgccgatcccagagttcactgaccatatgaggagctgcagaaatctgtacaaactcaacagaggccacctagtcactggtccacataacccttgaccccttcttcttcatagaggaaacaatgtgccagtcttattcttttcttcaacaaccttgacttccatggaggaagtgctggccccaaggggtctgacacaaagacgggaaacccagtcggcctctagttttctgctgctctcaggcagcacatcttgcaaacagtttggagaaggaggctgtttttgttgaatcgagttctcaaatcggtttagaccaaagccattcttctgaccctctagataagcgtagcctacaacccagtgccgtaagtttccaagattcaagaagtgtatcaacccaggcaatatctcaggatatggaagtttctgggtttatttacccctcagtgcccagagttaaagtttcagaagagacttgtgcacataagggcttcatctcaagtgtattgcagtaatggctgaatcggggttaacatcccttccaggcacagcgagttggttctgctttttgcctgtaagccaaagaaaagccacatctaaaaagctactactaaaagccagaaagaaaagtggatttgaactcagtgtcacagactcttctgagtgttttagggtcacagctagtgtaagaggcatgaagaatagacatgcaaaagggaacgggtgcaccagagacccctgttttggctgacagaccatatgtcccaccagctggggaatctgacaagaggacataggtggcactctttttttaaagctatttattgtatctatttttaaataaaattgcccatcctcattcagctcttagaacaaaagcaaaaaaccctgtaaatcaggagatataagcacatctgcacccagaataggcccatatgatagggcaaccctgagcttaaacaatgacatcttcaagggtagaactaatctgaaaccccattcagcctattccagaatggggataggctgaaacccccttccagcctctggaagacactggcctgcatcagttagagtcagagcaagtgtcacttcacagggaaaagaaggattatatagacttcctatccctagagtttataaatgtcaactatataaaaaaagctcaaaacagtgttaaaggaatgaacagtagaattttaataggctgtccaaagaagccaggtctgctgtgggcaagtatagcctaaccctagtcttgtaaaataagccagaaagggttactgagccaccttaagctagtacctatatagtaggcaaaaagtacagaaatagatgcaataagtgtggtgagtctttgagcctacgagtcatgccaccagccataagttgacctatcacttgagaacctcctcagcaaagatgccagaaaacattcaatcaagttggcaaatgacacagggagctggccctctgaccatcttcctggcaaacctggactggaagggccatttgcagcactgtcctggagctaatacactgtttcactgcctctgccatataatgatgccagcactagccagctggtgggtatttggaggaatcctgcatgaggattgcccaataaggggcaggtacacatacctggcaaagtgatgatgatgtgaattgtttccagtgaggggattgagtcaaaacttggatctcaggtacctcaatttttcccccaatttctggctactactaaaagccagaaagaacagaacagtggcctcaggagatctgagtttgaatccttgctctctaggatgcaggtggcttgaagcagaatgccacacctgcaagttgattagaactgcctttcttcccaggcttgacataggtattaagtcaaaattacatgaaacccagtggtaaaaaagcctctgaaagctgtaacaccctcagtaataacaaaagggatttttatttcacagctaaagggaaaataggtggagaagttaaaaaataatgtctgatcctgttcctaagttccaaactatagccaacactctgatgctgctctttttcttgtaggaccaaccgtcccagtttgcctgggactttctcatttttacagagtcccaaatcctaggaaactggagcaactggtacaactggtcacctactcttgcccctctgtaaatcaagccaactgtgaccatccaatgtgccatcttacagggaaaagttataaccactattcccctataacataatgctaatgattgtacttagtacatttttatacttttatgatattttactgattggaaatgtcatcctttattaaaaataaacatggttttccatagttgcctgccaa

SEQ ID NO: 218093 - protein, 702 aa, Artificial Sequence
  derived and/or modified sequence
MSRRSLRLATTACTLGDGEAVGADSGTSSAVSLKNRAARTTKQRRSTNKSAFSINHVSRQVTSSGVSHGGTVSLQDAVTRRPPVLDESWIREQTTVDHFWGLDDDGDLKGGNKAAIQGNGDVGAAAATAHNGFSCSNCSMLSERKDVLTAHPAAPGPVSRVYSRDRNQKWKAASGVFWWLGIGWYQFVTLISWLNVFLLTRCLRNICKFLVLLIPLFLLLAGLSLRGQGNFFSFLPVLNWASMHRTQRVDDPQDVFKPTTSRLKQPLQGDSEAFPWHWMSGVEQQVASLSGQCHHHGENLRELTTLLQKLQARVDQMEGGAAGPSASVRDAVGQPPRETDFMAFHQEHEVRMSHLEDILGKLREKSEAIQKELEQTKQKTISAVGEQLLPTVEHLQLELDQLKSELSSWRHVKTGCETVDAVQERVDVQVREMVKLLFSEDQQGGSLEQLLQRFSSQFVSKGDLQTMLRDLQLQILRNVTHHVSVTKQLPTSEAVVSAVSEAGASGITEAQARAIVNSALKLYSQDKTGMVDFALESGGGSILSTRCSETYETKTALMSLFGIPLWYFSQSPRVVIQPDIYPGNCWAFKGSQGYLVVRLSMMIHPAAFTLEHIPKTLSPTGNISSAPKDFAVYGLENEYQEEGQLLGQFTYDQDGESLQMFQALKRPDDTAFQIVELRIFSNWGHPEYTCLYRFRVHGEPVK

SEQ ID NO: 218094 - protein, 583 aa, Artificial Sequence
  derived and/or modified sequence
MKLSYESENYKLKTHESKDCESESYKSKSHESKAHASYYGRMNVREVLREDGHLSVNGEALWKAASGVFWWLGIGWYQFVTLISWLNVFLLTRCLRNICKFLVLLIPLFLLLAGLSLRGQGNFFSFLPVLNWASMHRTQRVDDPQDVFKPTTSRLKQPLQGDSEAFPWHWMSGVEQQVASLSGQCHHHGENLRELTTLLQKLQARVDQMEGGAAGPSASTDFMAFHQEHEVRMSHLEDILGKLREKSEAIQKELEQTKQKTISAVGEQLLPTVEHLQLELDQLKSELSSWRHVKTGCETVDAVQERVDVQVREMVKLLFSEDQQGGSLEQLLQRFSSQFVSKGDLQTMLRDLQLQILRNVTHHVSVTKQLPTSEAVVSAVSEAGASGITEAQARAIVNSALKLYSQDKTGMVDFALESGGGSILSTRCSETYETKTALMSLFGIPLWYFSQSPRVVIQPDIYPGNCWAFKGSQGYLVVRLSMMIHPAAFTLEHIPKTLSPTGNISSAPKDFAVYGLENEYQEEGQLLGQFTYDQDGESLQMFQALKRPDDTAFQIVELRIFSNWGHPEYTCLYRFRVHGEPVK

SEQ ID NO: 218095 - DNA, 2109 bp, Artificial Sequence
  derived and/or modified sequence
atgagcagaagaagcctgagactggccaccaccgcctgcaccctgggcgacggcgaggccgtgggcgccgacagcggcaccagcagcgccgtgagcctgaagaacagagccgccagaaccaccaagcagagaagaagcaccaacaagagcgccttcagcatcaaccacgtgagcagacaggtgaccagcagcggcgtgagccacggcggcaccgtgagcctgcaggacgccgtgaccagaagaccccccgtgctggacgagagctggatcagagagcagaccaccgtggaccacttctggggcctggacgacgacggcgacctgaagggcggcaacaaggccgccatccagggcaacggcgacgtgggcgccgccgccgccaccgcccacaacggcttcagctgcagcaactgcagcatgctgagcgagagaaaggacgtgctgaccgcccaccccgccgcccccggccccgtgagcagagtgtacagcagagacagaaaccagaagtggaaggccgccagcggcgtgttctggtggctgggcatcggctggtaccagttcgtgaccctgatcagctggctgaacgtgttcctgctgaccagatgcctgagaaacatctgcaagttcctggtgctgctgatccccctgttcctgctgctggccggcctgagcctgagaggccagggcaacttcttcagcttcctgcccgtgctgaactgggccagcatgcacagaacccagagagtggacgacccccaggacgtgttcaagcccaccaccagcagactgaagcagcccctgcagggcgacagcgaggccttcccctggcactggatgagcggcgtggagcagcaggtggccagcctgagcggccagtgccaccaccacggcgagaacctgagagagctgaccaccctgctgcagaagctgcaggccagagtggaccagatggagggcggcgccgccggccccagcgccagcgtgagagacgccgtgggccagccccccagagagaccgacttcatggccttccaccaggagcacgaggtgagaatgagccacctggaggacatcctgggcaagctgagagagaagagcgaggccatccagaaggagctggagcagaccaagcagaagaccatcagcgccgtgggcgagcagctgctgcccaccgtggagcacctgcagctggagctggaccagctgaagagcgagctgagcagctggagacacgtgaagaccggctgcgagaccgtggacgccgtgcaggagagagtggacgtgcaggtgagagagatggtgaagctgctgttcagcgaggaccagcagggcggcagcctggagcagctgctgcagagattcagcagccagttcgtgagcaagggcgacctgcagaccatgctgagagacctgcagctgcagatcctgagaaacgtgacccaccacgtgagcgtgaccaagcagctgcccaccagcgaggccgtggtgagcgccgtgagcgaggccggcgccagcggcatcaccgaggcccaggccagagccatcgtgaacagcgccctgaagctgtacagccaggacaagaccggcatggtggacttcgccctggagagcggcggcggcagcatcctgagcaccagatgcagcgagacctacgagaccaagaccgccctgatgagcctgttcggcatccccctgtggtacttcagccagagccccagagtggtgatccagcccgacatctaccccggcaactgctgggccttcaagggcagccagggctacctggtggtgagactgagcatgatgatccaccccgccgccttcaccctggagcacatccccaagaccctgagccccaccggcaacatcagcagcgcccccaaggacttcgccgtgtacggcctggagaacgagtaccaggaggagggccagctgctgggccagttcacctacgaccaggacggcgagagcctgcagatgttccaggccctgaagagacccgacgacaccgccttccagatcgtggagctgagaatcttcagcaactggggccaccccgagtacacctgcctgtacagattcagagtgcacggcgagcccgtgaagtag

SEQ ID NO: 218096 - DNA, 1752 bp, Artificial Sequence
  derived and/or modified sequence
atgaagctgagctacgagagcgagaactacaagctgaagacccacgagagcaaggactgcgagagcgagagctacaagagcaagagccacgagagcaaggcccacgccagctactacggcagaatgaacgtgagagaggtgctgagagaggacggccacctgagcgtgaacggcgaggccctgtggaaggccgccagcggcgtgttctggtggctgggcatcggctggtaccagttcgtgaccctgatcagctggctgaacgtgttcctgctgaccagatgcctgagaaacatctgcaagttcctggtgctgctgatccccctgttcctgctgctggccggcctgagcctgagaggccagggcaacttcttcagcttcctgcccgtgctgaactgggccagcatgcacagaacccagagagtggacgacccccaggacgtgttcaagcccaccaccagcagactgaagcagcccctgcagggcgacagcgaggccttcccctggcactggatgagcggcgtggagcagcaggtggccagcctgagcggccagtgccaccaccacggcgagaacctgagagagctgaccaccctgctgcagaagctgcaggccagagtggaccagatggagggcggcgccgccggccccagcgccagcaccgacttcatggccttccaccaggagcacgaggtgagaatgagccacctggaggacatcctgggcaagctgagagagaagagcgaggccatccagaaggagctggagcagaccaagcagaagaccatcagcgccgtgggcgagcagctgctgcccaccgtggagcacctgcagctggagctggaccagctgaagagcgagctgagcagctggagacacgtgaagaccggctgcgagaccgtggacgccgtgcaggagagagtggacgtgcaggtgagagagatggtgaagctgctgttcagcgaggaccagcagggcggcagcctggagcagctgctgcagagattcagcagccagttcgtgagcaagggcgacctgcagaccatgctgagagacctgcagctgcagatcctgagaaacgtgacccaccacgtgagcgtgaccaagcagctgcccaccagcgaggccgtggtgagcgccgtgagcgaggccggcgccagcggcatcaccgaggcccaggccagagccatcgtgaacagcgccctgaagctgtacagccaggacaagaccggcatggtggacttcgccctggagagcggcggcggcagcatcctgagcaccagatgcagcgagacctacgagaccaagaccgccctgatgagcctgttcggcatccccctgtggtacttcagccagagccccagagtggtgatccagcccgacatctaccccggcaactgctgggccttcaagggcagccagggctacctggtggtgagactgagcatgatgatccaccccgccgccttcaccctggagcacatccccaagaccctgagccccaccggcaacatcagcagcgcccccaaggacttcgccgtgtacggcctggagaacgagtaccaggaggagggccagctgctgggccagttcacctacgaccaggacggcgagagcctgcagatgttccaggccctgaagagacccgacgacaccgccttccagatcgtggagctgagaatcttcagcaactggggccaccccgagtacacctgcctgtacagattcagagtgcacggcgagcccgtgaagtag

SEQ ID NO: 218097 - DNA, 2109 bp, Artificial Sequence
  derived and/or modified sequence
atgtctcggcgcagcctgcgcctggctacaacggcctgtacactgggagacggcgaagcagtgggagctgattccgggaccagcagtgccgtgagcctgaaaaacagagcagccaggacaaccaagcagaggagatccaccaacaagtcagccttctctatcaatcatgtgagccgccaagtcacgagcagtggcgttagccacggcgggacagtttctctccaagacgcagtaacacgccgcccacctgtgctcgatgaaagctggatcagagaacaaaccacagtcgaccatttttggggcctggatgacgatggagatctcaagggcggcaataaagctgctattcaggggaacggtgatgttggcgccgccgcagctaccgcccacaacggtttctcatgctcaaactgcagcatgctctccgaacgtaaggacgttctgacagctcaccccgctgcccctgggcctgttagcagggtgtacagtcgggataggaaccagaagtggaaagccgcgtccggggtgttttggtggctgggtatagggtggtatcagttcgtgacacttatttcgtggctcaatgtgttcctgctgactcggtgtcttagaaatatctgcaagtttctcgtcttgctgatcccgttgtttcttctgctggcgggcttaagtctgcgcgggcagggaaatttcttctctttcctgcccgtcctgaactgggcaagtatgcaccgcacccagcgggtggatgacccacaggatgtgttcaaacccactacttcccgtttaaagcagcctcttcaaggggatagtgaggccttcccctggcactggatgtccggagtcgagcagcaggtggcttctctgagcggccagtgccaccaccatggcgaaaaccttcgggagcttacaactttgttacagaaactgcaggcgcgcgtcgatcaaatggaggggggagcggcgggtccctctgcgtcagtccgagacgccgtgggccaaccccctagagaaactgatttcatggcatttcatcaggagcatgaagtaagaatgtcacacttggaagatatcctgggcaagcttagggaaaagagcgaggccatccagaaggagctcgaacagacaaagcagaaaactatttcggctgttggcgaacagctgcttcccaccgtggagcatttgcagctggaactcgatcaattaaagagtgagctaagtagctggagacatgtgaaaacagggtgcgaaactgttgacgctgtgcaggagagagttgatgtgcaggtccgagaaatggtcaagctgctcttttcagaggaccaacagggcggctcattggagcagctgctgcagcggttcagctcccagttcgtgagtaagggagatcttcagactatgctgcgggatttgcagctccaaatccttcgaaatgtcacacaccacgtttcagtcactaagcaactacctacgtcagaagccgtggtctcagctgtgagcgaggctggtgccagcgggattacagaagctcaggcccgcgctatcgttaattccgccctgaaactgtactcccaggataaaaccggcatggtggactttgctctcgagtcaggcgggggctcaatcctctccactcggtgcagcgaaacgtacgagacaaagactgcgttgatgagcctttttggaattcccctgtggtattttagccagtctcctcgggtagtcatccagcccgatatttatcctggcaactgttgggccttcaaaggatcccagggttacctggtcgtaagactgagcatgatgatacacccagccgcatttacgctggagcatataccaaagacactgtcacccaccggcaatatctctagcgcccccaaggattttgctgtgtatggcttggaaaatgagtatcaagaggaaggccaactgttggggcagttcacctacgatcaagacggggagtcactgcagatgtttcaggcactaaagcggccggacgacacagcctttcagatcgtcgagctccgtattttctctaattggggacaccctgagtacacctgcctgtatagatttcgggtgcatggcgaacctgtcaaatag

SEQ ID NO: 218098 - DNA, 1752 bp, Artificial Sequence
  derived and/or modified sequence
atgaagctgagttacgagtctgagaattataaacttaagacccatgagtctaaagattgcgagtcagaatcttataaaagcaagagtcatgagtctaaggcccacgcatcctattacggacggatgaatgtgcgggaggtgcttagagaggacggccacctaagtgtgaatggcgaggctctgtggaaggccgcttccggcgtattttggtggcttggtatagggtggtaccagttcgtaacactgatctcttggctgaacgtcttcctgcttacacggtgtcttaggaacatctgtaagtttctcgtgttactgatacccttattcctgttgctggcgggactgtccttgagagggcaggggaactttttctcctttctcccagtactgaattgggcttccatgcaccggacacaaagagtcgatgacccacaagacgtctttaaaccgacaacaagtcggctgaagcagccactgcagggtgattcagaggccttcccttggcattggatgagcggcgtggaacaacaggtggcttcactgagcggacagtgccatcaccacggcgaaaacctccgcgagctgactaccctgctgcagaaactgcaggcaagagtggaccagatggaaggaggcgccgccggcccttccgcctctacagacttcatggcctttcaccaggagcacgaggtgcggatgagccatctggaggacattctggggaagttacgagaaaagagtgaggccattcaaaaagaactcgagcaaactaaacagaagactataagtgctgtgggagagcagttgctccccacagttgagcaccttcagcttgaactggaccaattgaaatcagagttgagctcatggcgccatgtgaagaccggatgtgagaccgtggatgccgtgcaggaaagggtggacgtccaggttcgggaaatggtgaaattgctttttagcgaggaccagcagggggggtcactcgaacagcttctgcagaggttctccagccaattcgtttccaaaggcgatctgcaaactatgctgagggatctgcagctgcaaattctgcggaacgtgactcatcacgttagcgtcacaaagcaacttcctacgtcagaggccgtcgttagcgccgtcagtgaggccggagctagtgggatcaccgaagctcaggctcgggccattgtaaatagcgccctgaaactttacagtcaggataagaccggcatggtagactttgctttagagagcggaggcggcagcatcctgagtaccagatgctcggagacttatgaaacaaagactgcacttatgtccctcttcggcatcccgctgtggtacttctcccagtcacccagggtggtaatccagcctgatatataccctgggaactgctgggccttcaagggcagccagggttatttagtagtgaggttgtccatgatgatacacccagcggccttcacacttgagcacatacccaaaaccctgagccctaccggaaatatatcgagtgcacccaaagatttcgccgtctatggcttggaaaatgaataccaagaagagggacagctcctgggccagttcacctacgatcaggatggtgagagtctacagatgtttcaggccttaaaaaggcctgatgacacagcatttcagattgtcgagctgcgaattttcagcaattgggggcaccccgaatacacttgtttataccgcttccgggtgcacggagagcctgtaaagtag

SEQ ID NO: 218099 - DNA, 2109 bp, Artificial Sequence
  derived and/or modified sequence
atgtcacggcgtagtctccgccttgctacaaccgcatgcaccctgggcgatggtgaagccgtcggcgcggactctggtacttcttcagccgtctcactcaaaaaccgtgctgcgaggaccacaaaacagcgccgctcaactaacaagtccgcttttagtatcaatcacgtaagccgtcaggtcacatcaagcggcgtgtctcacggcggaacagtgtccctgcaggatgctgtgacacgccgaccacccgtactggatgaaagctggattagggagcagacgacggtggatcacttctggggtctcgacgacgatggagatctgaaggggggtaataaagccgccatacaagggaatggagacgtgggtgccgcagccgccacagcccacaacggcttctcttgctcgaattgttctatgctgagcgaacgcaaggatgtgctcaccgctcatcctgccgcacctggcccagtttcccgtgtgtatagtagagaccgtaatcagaagtggaaggcggcttctggcgtattctggtggctggggattggctggtaccaattcgtcacattgattagctggttgaatgttttcctgttgacccgctgtctgcggaatatctgcaagtttcttgtgctgctgatccctcttttcctgctactcgccggccttagcttgaggggccagggaaacttctttagcttcctgcctgtgctgaattgggcctcaatgcatcgcacacagcgcgttgacgacccgcaggatgtattcaaacccaccacctcacggttgaaacagccactccaaggcgattctgaggccttcccctggcactggatgtcaggggtggaacagcaagtggcctcgctctcaggccagtgtcatcaccatggggagaatctgagagaattgactaccctcttgcaaaagctgcaggcaagagtagaccagatggaaggcggcgctgctgggccatctgcttccgtacgcgatgcagtaggacagccacctagggaaacagacttcatggctttccatcaggagcatgaggttcgcatgtctcatctggaagacatcctgggtaagctcagggaaaagagcgaggctatccagaaggagctggagcagaccaaacagaaaactataagtgccgttggagagcagctgttaccaactgtggagcacctgcagctggaactggatcagctcaagagcgagctgagtagttggagacatgtaaagacagggtgtgagactgtcgatgccgtgcaggaacgagtggacgtccaggttagggaaatggtaaagctcctgtttagtgaagatcagcagggaggctccttagaacagctgctgcagcggttctctagccagtttgtatccaagggcgatctgcagaccatgctgcgcgacctgcaactgcaaattctaagaaatgtgacccatcacgtgtctgtgactaaacaactgcctacttcggaggctgtcgtgagcgccgtgagtgaagctggcgcctccggcataacggaagcacaggcaagagccatcgtcaactccgcattaaagctctattcgcaagataaaaccggaatggtagatttcgcacttgagagcggaggggggtcgatattgtcgaccagatgcagtgagacatacgagaccaagactgcgctgatgtccctcttcggcatccccctctggtactttagtcaatcacccagagtcgtgattcaacccgacatctacccaggcaattgctgggcattcaaggggagtcaaggatatctagtagtacgcctatcaatgatgattcacccagctgcttttaccctggagcacatacctaagacactctcacctacggggaacatctcatctgcccctaaagatttcgctgtgtacggcctcgaaaatgaatatcaggaggagggacagttgctgggacagtttacatatgaccaggacggagagagcctgcagatgttccaggccttaaagcggcccgacgacacagcgttccaaattgtcgagctcaggatcttcagcaattggggccatccagaatatacttgtctttatcggttccgcgtccacggcgagcctgtgaaatag

SEQ ID NO: 218100 - DNA, 2109 bp, Artificial Sequence
  derived and/or modified sequence
atgagcagaagaagcctgcggctggccaccacagcctgcaccctgggagatggagaggccgtgggcgctgacagcggcaccagcagcgctgtgtccctgaagaacagagctgcccggaccaccaagcagaggaggagcaccaacaagagcgccttcagcatcaaccacgtgtcccggcaggtgaccagcagcggcgtgagccacggcggcaccgtgtccctgcaggatgctgtgacccggcggccccctgtgctggatgagagctggatccgggagcagaccaccgtggaccacttctggggcctggatgatgatggagacctgaagggcggcaacaaggccgccatccagggcaatggagatgtgggcgctgctgctgccacagcccacaacggcttcagctgcagcaactgcagcatgctgtctgagaggaaggatgtgctgacagcccaccctgctgcccctggccctgtgtcccgggtgtacagccgggacaggaaccagaagtggaaggccgccagcggggtcttctggtggctgggcatcggctggtaccagtttgtgaccctcatctcctggctgaatgtgttcctgctgacccgctgcctgaggaacatctgcaagttcctggtgctgctgatccccctcttcctgctgctggccggcctgagcctgcggggccagggcaacttcttctccttcctgcctgtgctgaactgggcctccatgcacaggacccagagggtggatgacccccaggatgtgttcaagcccaccaccagccggctgaagcagcccctgcagggcgacagcgaggccttcccctggcactggatgtctggagtggagcagcaggtggccagcctgagcggccagtgccaccaccacggggagaacctgcgggagctgaccaccctgctgcagaagctgcaggcccgggtggaccagatggagggcggggccgccggccccagcgcctctgtgagagatgctgtgggccagcccccccgggagacagacttcatggccttccaccaggagcacgaggtgaggatgagccacctggaggacatcctgggcaagctgcgggagaagtctgaggccatccagaaggagctggagcagaccaagcagaagaccatctctgctgtgggggagcagctgctgcccaccgtggagcacctgcagctggagctggaccagctgaagtctgagctgagctcctggaggcatgtgaagacaggctgtgagaccgtggatgctgtgcaggagcgggtggatgtgcaggtgcgggagatggtgaagctgctcttcagcgaggaccagcagggcggcagcctggagcagctgctgcagcgcttcagcagccagtttgtgtccaaaggagacctgcagaccatgctgcgggacctgcagctgcagatcctgagaaatgtgacccaccacgtgtctgtgaccaagcagctgcccaccagcgaggccgtggtgtctgctgtgtctgaggccggggccagcggcatcacagaggcccaggcccgggccatcgtgaacagcgccctgaagctgtacagccaggacaagacaggcatggtggactttgccctggagagcggcggcggcagcatcctgagcacccgctgcagcgagacctatgagaccaagacagccctgatgagcctgtttggcatccccctgtggtacttcagccagagcccccgggtggtgatccagcctgacatctacccaggcaactgctgggccttcaagggcagccagggctacctggtggtgcggctgtccatgatgatccaccctgctgccttcaccctggagcacatccccaagaccctgagccccaccggcaacatcagcagcgcccccaaggactttgctgtgtatggcctggagaatgagtaccaggaggagggccagctgctgggccagttcacctatgaccaggatggagagagcctgcagatgttccaggccctgaagaggccagatgacacagccttccagatcgtggagctgcgcatcttcagcaactggggccaccctgagtacacctgcctgtaccgcttccgggtgcatggagagcctgtgaagtag

SEQ ID NO: 218101 - DNA, 1752 bp, Artificial Sequence
  derived and/or modified sequence
atgaagctgtcctatgaaagtgagaactacaagctgaagacccatgagagcaaggactgtgagagcgagagctacaagagcaagagccatgagagcaaggcccacgccagctactacggccgcatgaatgtgcgggaggtgctgcgggaggatggccacctgtctgtgaatggagaggccctgtggaaggccgccagcggggtcttctggtggctgggcatcggctggtaccagtttgtgaccctcatctcctggctgaatgtgttcctgctgacccgctgcctgaggaacatctgcaagttcctggtgctgctgatccccctcttcctgctgctggccggcctgagcctgcggggccagggcaacttcttctccttcctgcctgtgctgaactgggcctccatgcacaggacccagagggtggatgacccccaggatgtgttcaagcccaccaccagccggctgaagcagcccctgcagggcgacagcgaggccttcccctggcactggatgtctggagtggagcagcaggtggccagcctgagcggccagtgccaccaccacggggagaacctgcgggagctgaccaccctgctgcagaagctgcaggcccgggtggaccagatggagggcggggccgccggccccagcgccagcacagacttcatggccttccaccaggagcacgaggtgaggatgagccacctggaggacatcctgggcaagctgcgggagaagtctgaggccatccagaaggagctggagcagaccaagcagaagaccatctctgctgtgggggagcagctgctgcccaccgtggagcacctgcagctggagctggaccagctgaagtctgagctgagctcctggaggcatgtgaagacaggctgtgaaacagtggatgctgtgcaggagcgggtggatgtgcaggtgcgggagatggtgaagctgctcttcagcgaggaccagcagggcggcagcctggagcagctgctgcagcgcttcagcagccagtttgtgtccaagggggacctgcagaccatgctgcgggacctgcagctgcagatcctgagaaatgtgacccaccacgtgtctgtgaccaagcagctgcccaccagcgaggccgtggtgtctgctgtgtctgaggccggggccagcggcatcacagaggcccaggcccgggccatcgtgaacagcgccctgaagctgtacagccaggacaagacaggcatggtggactttgccctggagagcggcggcggcagcatcctgagcacccgctgcagcgagacctatgagaccaagacagccctgatgagcctgtttggcatccccctgtggtacttcagccagagcccccgggtggtgatccagcctgacatctacccaggcaactgctgggccttcaagggcagccagggctacctggtggtgcggctgtccatgatgatccaccctgctgccttcaccctggagcacatccccaagaccctgagccccactggaaacatcagcagcgcccccaaggactttgctgtgtatggcctggagaatgagtaccaggaggagggccagctgctgggccagttcacctatgaccaggatggagagagcctgcagatgttccaggccctgaagaggccagatgacacagccttccagatcgtggagctgcgcatcttcagcaactggggccaccctgagtacacctgcctgtaccgcttccgggtgcacggggagcctgtgaagtag

SEQ ID NO: 218102 - DNA, 2109 bp, Artificial Sequence
  derived and/or modified sequence
atgagccggcggagcctgcggctggccaccaccgcctgcaccctgggcgatggtgaggcagttggtgcagacagcggtaccagtagcgctgtatcactgaagaacagggctgcccgcacaactaagcagagacggtccacaaataaaagcgcattctcaattaaccacgtgagtagacaggttactagttccggtgtttcgcacgggggcaccgtgagcttacaggatgccgtgacgcgccgccccccggtactggacgaatcatggatccgcgagcagactacggttgaccacttctggggcctggatgatgatggcgacctaaaagggggcaacaaagcagctatccaaggtaatggagatgttggcgccgccgccgccaccgcccacaacgggttctcgtgcagcaattgctcaatgctttcagagcgcaaggacgtgctgactgcccatcctgccgccccaggtccggtgtcgcgggtctacagccgcgatcgcaatcagaaatggaaagccgcctccggtgttttttggtggttaggaattggttggtatcagtttgtaactctgatctcatggctgaacgtgtttttactgacacgttgtcttcgtaatatctgcaagttcttagtgcttctcattcctctattcctgctcctcgcaggtctgagtctgagagggcagggtaatttcttcagtttcctgcccgtcctgaactgggctagcatgcacagaacacagcgcgtggatgatcctcaggacgtgttcaagccaaccacctcccggctgaaacagccattgcagggggactctgaggcttttccctggcactggatgtctggcgttgagcagcaggtagcctctctatcgggccagtgccatcatcacggagaaaatctgagggaacttaccacgctgcttcagaagcttcaggcacgcgtggaccagatggagggcggtgccgccgggccatcagctagcgtccgcgacgctgtgggtcagccccccagagaaacagacttcatggccttccaccaggagcacgaagtacggatgtcacatctggaggacattttggggaaactgcgagagaaatccgaggctatccagaaagagctcgagcaaaccaaacaaaagaccatcagcgccgtgggagagcagctactacccaccgtcgagcatcttcagctggagcttgatcagctaaaatcagagctgtcctcttggcgccacgtcaagacaggatgcgagaccgtggacgctgtgcaagagcgggttgacgtacaggttcgcgagatggtcaaacttctgttctctgaggaccaacagggcggctctctcgagcagctgttacagagatttagctcgcagttcgtgtctaaaggcgatttacagaccatgctcagagatctacagttacagatcctgagaaatgtgactcaccatgtgagcgtcacgaaacaactgcccacgtctgaagcagtagtctctgccgtctctgaagccggagccagtggaataactgaagcgcaggcacgagctatagtgaacagtgcactgaagttatattcccaagataagactggcatggtggattttgcattagagagcggtggagggtctatccttagcacacgctgttctgagacttacgaaacaaagaccgccttaatgagcctattcgggattccactgtggtacttctcacagagcccacgggttgtcatccagcctgatatctatccaggcaactgctgggcttttaagggttctcagggctatctggttgtgcggctcagcatgatgatacaccccgccgcctttacccttgaacacatacccaagactctgtcacccactggcaacatttcctccgctcccaaagattttgccgtctacgggctggagaatgagtaccaggaggagggccaactgctgggacagtttacctacgaccaggatggcgagtccctccaaatgttccaggctctaaagcgacccgatgataccgcattccagatcgtggagctgcgaattttctctaattggggacatccagagtacacttgtctatacaggtttcgcgtgcacggcgagcctgtgaagtag

SEQ ID NO: 218103 - DNA, 1752 bp, Artificial Sequence
  derived and/or modified sequence
atgaagctgagctacgagagcgagaactacaagctgaagacccacgagagcaaagattgcgagtctgagtcttacaagtccaaaagtcacgaaagtaaggctcacgcatcatactacggccggatgaacgttcgagaagtgcttcgcgaagacggccacctatcggttaacggcgaggccctgtggaaagctgccagcggcgtcttttggtggctggggatcgggtggtaccagttcgtgactcttatatcttggctgaacgtctttctgctcacacggtgcctcagaaacatctgtaagttcctggttttgttgattcccctcttcttactgctcgccggtctatccttgcgtggtcagggcaatttcttctcattcttgcccgtactcaattgggccagtatgcatcggacacaacgcgtggacgatccccaggacgtatttaagcccactacaagtaggttgaaacaaccgcttcagggcgattccgaagcctttccctggcattggatgagcggtgtggagcagcaggtagcgtcattatccgggcagtgtcaccaccatggtgagaatctcagggaactgaccacactactgcagaaactgcaagcccgggtggatcagatggagggaggagcggcgggacctagcgcctcaacagactttatggccttccatcaggagcacgaggtgaggatgtcacaccttgaagacatcctcggaaagttgcgggaaaaatctgaggctatacaaaaggagctggagcaaactaaacagaaaactatttccgcagtgggggaacaactgcttcctactgttgaacacctgcaactcgaacttgatcagcttaagtccgaactttcaagctggcgccacgtaaaaaccgggtgcgaaacagtggacgctgtgcaggagcgtgttgatgtgcaggtgcgggagatggttaaactgctgttctctgaagatcagcagggggggagtctggagcagctgttacagcggttttccagccagttcgtctccaagggcgatctgcagaccatgctgagggaccttcaattacagatcctgcggaatgtgacccaccacgttagtgtaaccaagcaattacccacaagcgaagccgttgtgagcgctgtgagtgaggcaggagctagcggaattacagaggcacaagcacgtgcgattgtgaatagcgccctgaagctgtatagccaggataaaactggaatggtggactttgcccttgaatcaggcggtggatctatattgtcgactagatgtagcgagacttatgaaacaaagaccgcactgatgtctctatttggaatcccactgtggtacttctcccagtcacccagggtcgtgattcagcctgacatttatcccggcaattgttgggcctttaaagggtctcagggatatctagtcgtgaggttatcgatgatgattcaccccgccgcttttactctggagcacatcccaaagacactgtccccgacagggaatatcagctccgcccccaaagatttcgctgtctatgggttggaaaacgaatatcaggaagaaggtcagctattagggcagttcacttatgaccaagacggagaatcactgcagatgtttcaggctctgaagaggcctgatgataccgcctttcagattgtggagttgagaatctttagcaactggggccatccggagtacacatgtctttaccgtttccgggtgcatggagagcccgtgaaatag

SEQ ID NO: 218104 - DNA, 2109 bp, Artificial Sequence
  derived and/or modified sequence
atgagccggcggagcctgcggctggccaccaccgcctgcaccctgggcgatggcgaagctgtaggggccgacagtgggacatccagcgcagtttctctaaagaatagggccgcgaggaccacaaaacagcggcgatcaactaataagagtgcctttagcataaaccatgtgtctcgccaggtaacttcctcaggcgtcagccacgggggaaccgtgtctctgcaagatgcagtcacccgcaggcctcctgttctggacgaaagctggataagagagcaaacaacagtagaccacttctggggcctcgacgacgacggcgatctgaagggaggtaacaaggctgcgatacaagggaacggcgatgtaggagcagccgccgccacagctcacaacggttttagctgcagcaattgtagcatgctctcagagaggaaggacgtgcttacagcacatccggccgcaccaggcccggtgtctcgggtttattctcgagatcgcaatcagaagtggaaggcagcatctggagtattctggtggctggggatcggttggtaccagtttgtgactctgatatcatggcttaacgtgttccttcttacacgatgccttaggaacatctgcaaattcctcgtgctgcttatcccattgttcctcctgcttgccggactctcccttcgcggccaaggcaacttcttttcattcctgccagtcttaaactgggcgagcatgcatagaacccagagagtggacgatcctcaagacgtgtttaaacctactacttctaggctgaagcagccattgcagggtgactcagaggcctttccctggcactggatgtcaggtgtggagcaacaagtggcgtctctcagcggacagtgccaccaccatggggagaatttaagggaactgaccactcttttgcagaagctgcaagcgagggtcgatcaaatggagggcggggctgccggaccatctgcatctgttagagacgccgttggccagcccccaagagagacggacttcatggccttccaccaggaacacgaggttcggatgtcacacctcgaggatatcctcggcaaacttagagagaaatccgaggccatacagaaagagctcgagcaaacaaaacagaaaacaataagcgccgtcggagagcagctgctccccacagtagagcacctgcaactcgaattagaccaactgaaatctgagctgagtagttggaggcatgtgaagaccggatgtgagactgtagacgccgtccaggagagagtagacgttcaggtgagggagatggtcaagttgcttttctccgaagatcaacagggcggttctttggagcagcttctgcagcgattcagttcccagtttgtcagcaaaggggatctgcaaaccatgcttcgagaccttcaactgcaaatattaaggaatgttacacatcatgtgtctgtcaccaagcaactccctacatccgaggcagtggtatcagccgtctccgaagccggtgcctcagggatcactgaggcccaagctagggctattgtgaattccgcactgaagctctacagtcaggacaaaaccgggatggtggactttgcactggagagcggcgggggctccattctcagcacccgatgcagcgaaacttacgagacaaaaaccgccttgatgtctttatttgggatccccctttggtacttcagtcagtctccaagggtggtgatccaacccgacatctatcccgggaactgttgggcttttaagggtagccaaggttatctggtggtccggttaagcatgatgattcaccctgccgccttcacccttgaacatatcccaaaaaccctgtcacctacggggaacatcagctctgccccaaaggatttcgctgtctacgggcttgagaacgaataccaagaggaggggcagctgctcggccagtttacctatgatcaggatggagagtccctgcaaatgttccaggcactgaagcggcccgacgacaccgcctttcaaatcgtcgaacttagaatcttctccaactggggccatcctgagtatacttgcctttaccgtttccgcgtccatggagaaccagtgaaatag

SEQ ID NO: 218105 - DNA, 2109 bp, Artificial Sequence
  derived and/or modified sequence
atgtcaagacgcagcctgcgactcgctaccacggcgtgcaccttgggagatggcgaagccgtgggggctgactctggcacatcatccgcagtgtctttgaaaaacagggccgcacgcacaactaagcagcgtcgcagcaccaacaagtcagccttcagcattaatcatgtctcccgacaggttacttcctcaggagtgtctcatggtggaacggtgtccctgcaggatgcggtaacccggaggcctccagtgctggatgagtcctggataagggagcagactaccgtcgaccatttctggggcctagacgatgatggagaccttaaaggcggtaacaaagccgctattcagggtaatggcgatgtcggcgctgccgcagccactgcccacaacggattctcatgttcaaactgcagcatgctgagcgagcgaaaggacgtcctcaccgcgcaccccgctgctccaggacccgtgtctcgagtgtactctagggataggaatcagaagtggaaggctgcctctggcgtcttttggtggcttgggattggttggtatcagttcgttactctgatcagttggttgaacgtgtttctgctgactcgctgtctgcggaacatctgcaagttccttgtgctcttaatacctctgtttctgcttttggcagggctgagtctgcggggacagggtaatttttttagcttcctgcctgttcttaactgggccagcatgcaccggacacagagagtggacgacccccaggatgtgtttaagccaaccacatcaaggctgaagcagcccctgcagggggacagcgaggcattcccatggcattggatgtcgggagtagagcagcaggtggcgtcactgagtggtcaatgtcatcaccacggagaaaatctgcgcgaactgacaaccctgttacagaagctgcaagcccgagtggaccagatggagggtggggctgctggcccttcagcctccgtgagagacgccgtgggacagcctcccagggagacggacttcatggcgtttcatcaggaacacgaagtgcggatgtcgcatttggaagacatcctggggaaactgcgcgagaaatcggaagcaattcaaaaggagttagaacaaactaaacagaaaaccatctccgctgtgggtgaacagttgttgccaactgtggagcatttgcagctggagctggaccagctcaagtcagagctcagcagttggcgtcatgtgaagaccgggtgtgagaccgtggacgccgtgcaagaaagagtagacgtgcaggtgagagagatggtgaagctgctcttttcggaggaccaacaggggggtagcctcgagcaactgctgcagcgctttagcagccaatttgtttctaagggcgatctgcagaccatgttgcgcgatctccagctccaaatcctcagaaatgtgactcaccacgtgagtgtgacgaagcagcttcctacgagtgaggctgtcgtgtctgccgtatccgaagccggagcatctgggattacagaggcacaggccagagccattgtcaactccgccctgaagctttatagtcaggataagacaggaatggtcgattttgcacttgagagtggagggggtagtatactgtccacaaggtgttctgaaacttatgaaactaaaacagccctcatgtcactgttcggaatcccactctggtactttagccagtcccccagggttgtcatccagccagacatttaccccggaaactgttgggcgtttaagggttcgcaaggctatctcgtagtgagactttctatgatgattcaccctgcagcattcacactcgaacatatacccaagactctgtcccctaccgggaacatttcttctgcgcctaaggacttcgcagtatatgggctggaaaacgaataccaggaagaagggcagcttctgggacaatttacctatgaccaagacggtgaatccctgcagatgttccaggcgctgaagcgtccagatgatacagcctttcagatcgtggagctccgcattttttcaaactgggggcatcccgagtacacttgcttgtatcgctttcgagtacatggagagcccgtgaagtag

SEQ ID NO: 218106 - DNA, 1752 bp, Artificial Sequence
  derived and/or modified sequence
atgaaattgagctacgaatcagagaattataaattgaaaactcatgagtccaaagactgcgaatctgaatcttacaagagcaagagtcacgaatctaaagcacatgccagctattatggacgcatgaatgttcgtgaagtgctacgcgaagatgggcatctctcagtgaatggtgaggccctttggaaagccgcatcaggcgtgttctggtggttgggcatcgggtggtatcagttcgtgactttaatttcttggctgaatgtcttcctgcttacccgctgtctaaggaacatctgtaagttcctggtccttttaatccccttgtttttgctgctggccggattgtctttaagaggacagggaaactttttctcatttctgccagtgctcaactgggcgtccatgcatcgtacacagagagtggacgatccccaagatgtgttcaaacccacaaccagtcgactgaaacaacccttacagggcgattctgaggcatttccctggcattggatgagcggagtagagcagcaggtggcatctctgagtggacagtgtcaccaccacggcgaaaatctacgggagctgaccacactgctccaaaaactgcaggcacgggtcgatcagatggaaggtggcgctgctggtccttccgcttccaccgatttcatggcttttcaccaggaacatgaggtccgaatgagtcacctcgaagacatcctcgggaaactgcgagaaaagtccgaggctatccagaaagaactggagcagacaaagcagaagaccataagcgcggtgggggagcagttgttaccaacagttgaacatctgcaactggaactagaccaactaaaatctgagttaagtagctggcggcacgtgaaaacaggttgtgaaacagtggacgctgtccaagaacgggtcgatgttcaggtcagagagatggtcaagttactgttttcagaagaccagcaaggcggttcactggagcagctgctacagcgtttctcctcgcagtttgtcagcaaaggtgatctgcagacaatgcttcgagacctccaattgcaaatcctgaggaacgtcacacaccacgtttctgtaacaaagcagcttccaacctccgaagccgtggtcagcgccgttagtgaagcaggggcatctggaatcactgaggcacaggccagggccattgtcaactccgcacttaagctgtacagtcaggacaaaacaggcatggtggacttcgccttggagagcggagggggaagtattctatccacaagatgttccgaaacttacgaaactaagacggcactcatgagccttttcgggatccccctgtggtatttcagccagtcgccgcgagtggtgatccagcccgacatttatccaggcaactgttgggcctttaaaggttctcaggggtatctggtagtgagactgtccatgatgattcaccccgcagccttcactctggagcacatacctaaaaccctgtcccccaccggcaatatctcctcagctcccaaggattttgccgtctatggcttggaaaacgaataccaggaagagggacagctgttgggacaattcacctacgaccaggatggagaaagtctgcagatgttccaggctcttaaacgtccagacgatactgcattccagattgtggagctgagaatctttagcaactgggggcatcccgagtacacatgtctataccgcttccgagttcatggagagcccgtgaagtag

SEQ ID NO: 218107 - DNA, 2109 bp, Artificial Sequence
  derived and/or modified sequence
atgagcaggaggtccttgagactcgctactaccgcttgcacccttggtgacggagaagctgtgggcgcagactcgggtacatctagtgccgtatccctcaaaaacagagctgcacgcaccactaagcaacggcgttccacgaataagagtgcattcagcataaaccacgtgagccgacaggttacctcttcaggagtttcccatggaggaacagtgagcctccaggacgctgtaacacgacgcccaccagtactggacgagagttggatccgggagcaaacaaccgtggatcatttttgggggctcgacgatgatggtgacctgaaaggaggcaacaaggcggctatacaaggtaacggcgacgtgggagcagctgctgccaccgctcacaacggtttctcctgttctaattgctccatgctgtccgaacgaaaagacgtactgacagcgcatccagctgcgcctgggcctgtatctagagtttacagcagggacagaaatcagaagtggaaagccgcatcgggagtgttttggtggctcggtatcggatggtatcagttcgtcacacttatctcatggctgaatgtattcctcctgacgagatgcctgaggaacatttgtaagtttttggtcctcctcatccctcttttcttgctgttggccggactgtcccttcgtgggcagggaaactttttcagctttctgccggtacttaattgggcgtctatgcatcgaactcagcgcgtcgacgacccgcaagacgtgttcaagcctactacctcgcgactgaaacagccactgcagggcgactccgaggcgttcccttggcattggatgtcgggcgtggagcagcaggtagcatctcttagcggacagtgccatcaccatggcgaaaatctacgggaactgaccaccctgctgcagaaactgcaggcccgtgttgaccagatggaaggcggagcagctggaccctcagcctcagttcgagatgccgtcggtcagcctcccagagaaacggacttcatggcgttccatcaggagcacgaagtaagaatgtctcacctggaggatatactgggcaagctgcgggagaagtctgaagcgattcaaaaagagctagagcagactaagcaaaaaacgatttccgctgtaggcgagcaactactgcccacagtcgagcacttgcagctggagctggatcagctgaagtcagaactgtcctcttggcggcatgtgaagactgggtgcgagaccgtggacgctgtgcaggaacgggtagacgttcaagtccgagagatggtgaaactgctgttttcagaagatcagcagggagggtcccttgaacaattgctgcagcgatttagtagccaatttgtgtccaagggagatctgcagacaatgctgagggatctgcaactgcagatcctcagaaacgtgacccaccacgtgtctgtcacaaagcagctgccgacgtctgaggctgtggtgtctgcagttagtgaagccggtgcttccggaatcacagaggcccaggccagagcgatcgtgaacagcgcacttaagttgtattctcaggataagacggggatggtcgacttcgctctggaatccggtggcggttcgatactttccaccaggtgttctgagacatatgaaacgaagacagccttgatgagtttattcggaatccccctgtggtacttcagtcaatcaccccgagtcgttattcagcctgacatctatccagggaattgctgggcgtttaaaggctcccagggctacctagtagtgagactcagcatgatgattcatccagcggctttcactctcgagcatattcctaaaaccctaagtcctaccggaaacatctccagcgctcccaaggactttgccgtgtatggattggagaatgagtatcaggaagaagggcaactattgggccagttcacatacgatcaggacggagagtccttgcagatgtttcaggccttgaaaaggcctgacgataccgctttccagatcgtagaactcaggattttctccaactggggacaccccgagtacacctgtctatatcggttcagagtccacggggagcccgttaaatag

SEQ ID NO: 218108 - DNA, 1822 bp, Artificial Sequence
  derived and/or modified sequence
caagtggttttaatgaagctcagttatgaatcagaaaattacaaattgaaaactcatgaatcaaaagattgtgaatccgaaagctataagtcaaaaagccatgaatcaaaagctcatgccagttactatgggagaatgaatgtgagagaggttctcagagaggatggccacctcagtgtaaatggggaagcgctgtggaaggcagcctctggagtgttctggtggctggggattggatggtaccagtttgttactttgatttcttggctgaatgtgtttcttcttaccaggtgccttcgaaacatctgcaagtttttagtcttgctcatcccactcttccttttactagcaggtctctccttacggggccagggcaatttcttttcgttcttgcccgtgttgaactgggcaagcatgcatagaacacagcgggtggatgacccccaggacgtgtttaaacccacgacttctcgcctgaagcagcctctgcagggtgacagtgaggcttttccgtggcattggatgagtggcgtggagcagcaggtggcctctctgtctggacagtgccaccaccatggtgagaatctccgagagctgaccactttgctacagaagctgcaggctcgggtggaccagatggaaggcggcgctgccgggccgtcagcttcgactgactttatggcctttcaccaagaacatgaagtgcgtatgtcacacttggaagatattctgggaaaactgagagaaaaatctgaggccatccagaaggaactagaacagaccaagcaaaaaacaatcagtgcggttggtgagcagctcctgcccacagtcgagcacctccagctggagctggatcagctaaagtcagagctgtccagctggcgacacgtgaagaccggctgtgagacagtggatgccgtacaagaaagagtggacgtgcaagtcagagaaatggtgaaactcctgttttccgaagatcagcaaggcggttctctggaacagctgctgcagaggttctcatcacagtttgtgagcaaaggcgacttgcagacgatgctgcgagacctgcagctgcagatcctgcggaacgtcacccaccacgtttccgtgaccaagcagctcccaacctcagaagccgtggtgtctgctgtgagcgaggcgggggcgtctggaataacagaggcgcaagcacgtgccatcgtgaacagcgccttgaagctgtattcccaagataagaccgggatggtggactttgctctggaatctggtggtggcagcatcttgagtactcgctgttctgaaacttacgaaaccaaaacggcgctgatgagtctgtttgggatcccgctgtggtacttctcgcagtccccgcgcgtggtcatccagcctgacatttaccccggtaactgctgggcatttaaaggctcccaggggtacctggtggtgaggctctccatgatgatccacccagccgccttcactctggagcacatccctaagacgctgtcgccaacaggcaacatcagcagcgcccccaaggacttcgccgtctatggattagaaaatgagtatcaggaagaagggcagcttctgggacagttcacgtatgatcaggatggggagtcgctccagatgttccaggccctgaaaagacccgacgacacagctttccaaatagtggaacttcggattttttctaactggggccatcctgagtatacctgtctgtatcggttcagagttcatggcgaacctgtcaagtgaagacactactcattatttttgtacatttttgtatatactgggacagcgtgaaacactg

SEQ ID NO: 218109 - DNA, 1275 bp, Artificial Sequence
  derived and/or modified sequence
atgagcaccagcctgggcagcaacctgagcgagctggacagactgctgctggagctgaacgccgtgcagcacaacccccccggcttccccgccgacgaggccaacagcagcccccccctgcccggcgccctgagccccctgtacggcgtgcccgagaccaacagccccctgggcggcaaggccggccccctgaccaaggagaagcccaagagaaacggcggcagaggcctggaggacgtgagacccagcgtggagagcctgctggacgagctggagagcagcgtgcccagccccgtgcccgccatcaccgtgaaccagggcgagatgagcagcccccagagagtgaccagcacccagcagcagaccagaatcagcgccagcagcgccaccagagagctggacgagctgatggccagcctgagcgacttcaagttcatggcccagggcaagaccggcagcagcagcccccccggcggcccccccaagcccggcagccagctggacagcatgctgggcagcctgcagagcgacctgaacaagctgggcgtggccaccgtggccaagggcgtgtgcggcgcctgcaagaagcccatcgccggccaggtggtgaccgccatgggcaagacctggcaccccgagcacttcgtgtgcacccactgccaggaggagatcggcagcagaaacttcttcgagagagacggccagccctactgcgagaaggactaccacaacctgttcagccccagatgctactactgcaacggccccatcctggacaaggtggtgaccgccctggacagaacctggcaccccgagcacttcttctgcgcccagtgcggcgccttcttcggccccgagggcttccacgagaaggacggcaaggcctactgcagaaaggactacttcgacatgttcgcccccaagtgcggcggctgcgccagagccatcctggagaactacatcagcgccctgaacaccctgtggcaccccgagtgcttcgtgtgcagagagtgcttcacccccttcgtgaacggcagcttcttcgagcacgacggccagccctactgcgaggtgcactaccacgagagaagaggcagcctgtgcagcggctgccagaagcccatcaccggcagatgcatcaccgccatggccaagaagttccaccccgagcacttcgtgtgcgccttctgcctgaagcagctgaacaagggcaccttcaaggagcagaacgacaagccctactgccagaactgcttcctgaagctgttctgctag

SEQ ID NO: 218110 - DNA, 951 bp, Artificial Sequence
  derived and/or modified sequence
atgagcagcccccagagagtgaccagcacccagcagcagaccagaatcagcgccagcagcgccaccagagagctggacgagctgatggccagcctgagcgacttcaagttcatggcccagggcaagaccggcagcagcagcccccccggcggcccccccaagcccggcagccagctggacagcatgctgggcagcctgcagagcgacctgaacaagctgggcgtggccaccgtggccaagggcgtgtgcggcgcctgcaagaagcccatcgccggccaggtggtgaccgccatgggcaagacctggcaccccgagcacttcgtgtgcacccactgccaggaggagatcggcagcagaaacttcttcgagagagacggccagccctactgcgagaaggactaccacaacctgttcagccccagatgctactactgcaacggccccatcctggacaaggtggtgaccgccctggacagaacctggcaccccgagcacttcttctgcgcccagtgcggcgccttcttcggccccgagggcttccacgagaaggacggcaaggcctactgcagaaaggactacttcgacatgttcgcccccaagtgcggcggctgcgccagagccatcctggagaactacatcagcgccctgaacaccctgtggcaccccgagtgcttcgtgtgcagagagtgcttcacccccttcgtgaacggcagcttcttcgagcacgacggccagccctactgcgaggtgcactaccacgagagaagaggcagcctgtgcagcggctgccagaagcccatcaccggcagatgcatcaccgccatggccaagaagttccaccccgagcacttcgtgtgcgccttctgcctgaagcagctgaacaagggcaccttcaaggagcagaacgacaagccctactgccagaactgcttcctgaagctgttctgctag

SEQ ID NO: 218111 - DNA, 1275 bp, Artificial Sequence
  derived and/or modified sequence
atgagtacgagtctagggtctaacctttctgagcttgacaggctgttactggagctcaacgccgtgcagcataaccctccgggcttccctgcagatgaggccaatagtagtccccccctgcccggagcattatctcccctatacggggtgcctgaaaccaattctcctcttggagggaaggcgggtccactgacaaaagagaaacctaagaggaatggcgggcgtggcctggaagatgtgcggccgtctgtggaaagcctgctggacgagctcgagtcatctgtgcccagcccagttcctgcaatcaccgttaaccagggcgagatgtcatcacctcagcgtgtaacttcgacccagcagcagacccgcatctctgcaagttcggccacacgcgagctggacgagctgatggcttcattgagcgacttcaaatttatggcccaaggaaaaaccggctcaagcagccctcccggtggcccaccaaagccaggaagccagctggactccatgctgggttcgctgcagtcagacctgaacaagttgggggtggccacagtggccaaaggcgtttgtggagcttgtaagaagcccattgctggtcaggttgtgactgcaatgggaaagacttggcatcccgagcactttgtgtgtacacattgccaggaagaaatcgggtccaggaatttctttgagcgcgatggccagccgtattgcgagaaggactatcataatctgttctccccacggtgctattattgcaacggccccatacttgacaaggtagtgacagccctagacagaacctggcaccctgaacattttttctgcgctcagtgcggcgcgtttttcggtcctgagggtttccacgagaaggacgggaaagcctattgccgcaaggattacttcgatatgttcgcccccaaatgtggcggctgcgccagagctattcttgaaaattacatatctgcgttaaatacactttggcacccagagtgcttcgtatgccgagaatgttttacgccctttgtgaacgggagcttcttcgaacacgatggccagccctactgtgaggttcactatcacgagagacgcgggtcgttgtgcagtggatgccagaagcccattacaggcagatgcatcaccgcgatggcaaagaagttccaccccgaacacttcgtgtgcgctttttgcctgaagcagctgaacaagggaacttttaaggagcagaacgataaaccctattgccagaattgttttctaaaactcttttgctag

SEQ ID NO: 218112 - DNA, 951 bp, Artificial Sequence
  derived and/or modified sequence
atgagctcgcctcagcgcgtgacctccacccagcaacagacgaggatctctgccagcagcgccacccgggaattggacgagcttatggcatcgctgtctgactttaaattcatggcgcagggaaaaactggatcgagttctccacccggcggcccgcccaagccgggttcgcagctggattctatgctaggaagcctgcaaagtgacttgaataagctcggcgtggccacagtggccaagggcgtgtgtggagcatgcaaaaagcccattgcaggccaggtcgtgaccgccatggggaagacgtggcatccagaacacttcgtttgcacccattgccaagaggagatcggtagtcgtaacttctttgaaagggatggacaaccttattgtgagaaagattaccacaatttattttcacctcggtgctattattgtaatggtccgattcttgataaagttgtcacagccctcgataggacttggcatccagagcactttttttgtgcccagtgtggggccttcttcgggcctgaaggatttcacgaaaaagatggaaaagcatattgccggaaggactacttcgacatgttcgcgccaaaatgtggaggttgcgctagggcaattttggagaattatattagcgcccttaacactctgtggcacccagaatgtttcgtatgcagagagtgctttacccccttcgtgaatggatccttttttgagcacgacggccaaccttattgcgaggtgcattaccatgagagacgaggatctctctgctccggatgccagaagcccatcactggtcggtgcattactgccatggcaaagaagtttcatcctgaacattttgtgtgtgccttctgtctgaaacagttgaacaagggcacctttaaagaacaaaatgacaagccctattgtcagaactgcttcttaaagctgttttgttag

SEQ ID NO: 218113 - DNA, 1275 bp, Artificial Sequence
  derived and/or modified sequence
atgagcaccagcctgggcagcaacctgtctgagctggaccggctgctgctggagctgaatgctgtgcagcacaaccccccaggcttcccagcagatgaggccaacagcagcccccccctgcccggggccctgagccccctgtatggagtgcctgagaccaacagccccctgggcggcaaggccggccccctgaccaaggagaagcccaagagaaatggaggccggggcctggaggatgtgcggcccagcgtggagagcctgctggatgagctggagagctctgtgcccagccctgtgcctgccatcaccgtgaaccagggcgagatgagcagcccccagagggtgaccagcacccagcagcagacccgcatcagcgccagcagcgccacccgggagctggatgagctgatggccagcctgagtgacttcaagttcatggcccagggcaagacaggcagcagcagccccccaggcggcccccccaagccaggcagccagctggacagcatgctgggcagcctgcagagcgacctgaacaagctgggcgtggccaccgtggccaagggcgtgtgtggggcctgcaagaagcccatcgccggccaggtggtgacagccatgggcaagacctggcaccctgagcactttgtgtgcacccactgccaggaggagatcggcagcaggaacttctttgaaagagatggccagccctactgtgagaaggactaccacaacctcttcagcccccgctgctactactgcaatggccccatcctggacaaggtggtgacagccctggacaggacctggcaccctgagcacttcttctgtgcccagtgtggggccttctttggacctgagggcttccacgagaaggatggcaaggcctactgcaggaaggactactttgacatgtttgcccccaagtgtggcggctgtgcccgggccatcctggagaactacatcagcgccctgaacaccctgtggcacccagaatgttttgtgtgccgggagtgcttcaccccatttgtgaatggcagcttctttgaacatgatggccagccctactgtgaggtgcactaccatgaaagaagaggcagcctgtgcagcggctgccagaagcccatcaccggccgctgcatcacagccatggccaagaagttccaccctgagcactttgtgtgtgccttctgcctgaagcagctgaacaagggcaccttcaaggagcagaatgacaagccctactgccagaactgcttcctgaagctgttctgctag

SEQ ID NO: 218114 - DNA, 951 bp, Artificial Sequence
  derived and/or modified sequence
atgagcagcccccagagggtgaccagcacccagcagcagacccgcatcagcgccagcagcgccacccgggagctggatgagctgatggccagcctgagtgacttcaagttcatggcccagggcaagacaggcagcagcagccccccaggcggcccccccaagccaggcagccagctggacagcatgctgggcagcctgcagagcgacctgaacaagctgggcgtggccaccgtggccaagggcgtgtgtggggcctgcaagaagcccatcgccggccaggtggtgacagccatgggcaagacctggcaccctgagcactttgtgtgcacccactgccaggaggagatcggcagcaggaacttctttgaaagagatggccagccctactgtgagaaggactaccacaacctcttcagcccccgctgctactactgcaatggccccatcctggacaaggtggtgacagccctggacaggacctggcaccctgagcacttcttctgtgcccagtgtggggccttctttggacctgagggcttccacgagaaggatggcaaggcctactgcaggaaggactactttgacatgtttgcccccaagtgtggcggctgtgcccgggccatcctggagaactacatcagcgccctgaacaccctgtggcacccagaatgttttgtgtgccgggagtgcttcaccccatttgtgaatggcagcttctttgaacatgatggccagccctactgtgaggtgcactaccatgaaagaagaggcagcctgtgcagcggctgccagaagcccatcaccggccgctgcatcacagccatggccaagaagttccaccctgagcactttgtgtgtgccttctgcctgaagcagctgaacaagggcaccttcaaggagcagaatgacaagccctactgccagaactgcttcctgaagctgttctgctag

SEQ ID NO: 218115 - DNA, 1275 bp, Artificial Sequence
  derived and/or modified sequence
atgagcaccagcctgggcagcaacctgagcgagctggaccggctgctgctggaattaaacgccgtgcagcataacccacctggcttcccggctgacgaagctaacagctctccccctctgcctggcgccctgtcacccctgtacggggttcccgaaacaaatagcccactcggaggaaaggccgggccgttgacgaaggaaaaacccaaaagaaatggaggtaggggacttgaggacgtgcgtccatcagttgaatccttattggacgagctcgaatcgagcgtaccaagccctgtaccagcaatcaccgttaatcagggcgaaatgtcttccccccagcgcgtaacctctacccagcagcagacacgcatctccgcttctagtgctacccgtgagctggacgaactgatggcgtctctgtccgatttcaaatttatggcccaaggtaaaacaggttcctcgagtccccctggcgggcctcccaaaccaggatcacagctggacagtatgctgggaagtctacagtccgacctcaataagctcggtgttgcaaccgtggcaaaaggcgtgtgtggggcatgtaagaaacccatcgccggccaggtagtcacagcaatgggtaagacatggcatcctgagcactttgtctgcacccactgccaggaggagattggtagcaggaatttctttgaacgggacggacaaccctactgcgagaaggactaccataatctgtttagcccccgatgttactactgcaatgggccaatacttgataaagtcgtgacagcactagacaggacatggcacccggaacatttcttttgtgcacaatgcggcgccttttttgggccagagggttttcacgagaaagatgggaaggcctactgtaggaaggattatttcgacatgttcgcgcccaagtgcggtggttgcgcccgcgccatcctggaaaattatatcagtgccctcaatacactgtggcatccagaatgctttgtatgcagagagtgtttcacaccgtttgtcaatgggtcattcttcgagcatgacggccagccatattgcgaggtgcattaccatgaacggagagggtccctgtgttccggctgccagaaacccattaccggaaggtgcattaccgccatggcaaaaaagttccaccctgaacattttgtctgcgccttctgtctgaagcaattaaataaggggacgtttaaagagcagaacgacaaaccctactgccaaaattgtttccttaagctattctgttag

SEQ ID NO: 218116 - DNA, 951 bp, Artificial Sequence
  derived and/or modified sequence
atgagcagcccccagcgggtgaccagcacccagcagcagacccggattagcgcatctagtgcgactcgggaactagacgaactaatggcttccctatctgactttaaattcatggctcaggggaaaacaggctcttccagtcccccgggcggccctcctaaaccaggatctcagctcgatagcatgctcgggagtttacaatcggaccttaacaagctgggggttgctacggttgctaaaggggtttgtggcgcttgcaaaaagcctatagccggccaggtggtgactgctatgggcaagacttggcatcccgagcattttgtgtgtacccactgccaagaagaaataggctccaggaacttctttgagagagatggtcagccctactgtgagaaggactaccacaatctgtttagcccaaggtgttactactgcaatggaccaatcctggacaaagtcgtgaccgccctcgacaggacatggcatcctgaacatttcttctgcgctcaatgtggggccttctttggcccagaaggtttccatgaaaaagacggcaaggcctactgccggaaagactattttgatatgtttgcacctaagtgtggaggttgcgcgagggccatactggaaaactatatatccgcgctgaatacattatggcaccctgagtgctttgtctgcagggagtgcttcacaccattcgtgaacgggtcctttttcgaacatgacggtcagccgtattgcgaggtccactatcatgagaggaggggaagcctctgctccggctgtcaaaaacctattaccgggaggtgcattacagccatggcaaaaaagtttcacccagagcatttcgtgtgtgccttttgcctaaagcagttgaacaaaggtacgtttaaagagcagaacgataaaccctactgtcagaactgcttcctgaagctattttgctag

SEQ ID NO: 218117 - DNA, 1275 bp, Artificial Sequence
  derived and/or modified sequence
atgtctacaagcctcgggagcaatctatctgaacttgacagattactccttgaactgaatgcggtccaacataatccaccgggtttccccgctgatgaagctaacagttccccccctctgcctggtgccctgagtccgttgtacggtgtccctgaaactaattcacctctgggcggtaaagccggaccgctgactaaagagaagccgaagagaaacgggggacgcggattagaggacgtgcgtccgtccgtcgaatctctgctggacgaactcgagagctcagttccttcccccgtgccagccatcacagtgaaccagggagagatgtccagcccccagcgcgtgacttcgactcagcagcagacccgaattagtgcttcttccgccacaagggaactggacgaactaatggcatctctgtccgattttaagttcatggcgcagggcaaaactggaagctcgagccctcccggagggcctcccaagcccggaagccagctcgacagcatgctaggttcactgcaatccgacctgaacaagctcggggtggcgaccgtcgctaagggggtgtgcggagcttgtaagaaacccatagccggacaggtggttaccgcaatggggaaaacctggcaccccgagcactttgtttgcactcactgccaagaggaaatcggatcgcgcaatttcttcgaacgcgacggtcagccatactgcgagaaagattaccataacctgttctccccccgatgctactactgcaatggacctatcttagacaaagttgtgactgcactggatcgtacatggcaccccgaacacttcttctgcgcccagtgcggtgcattttttgggcctgagggattccacgagaaggacggcaaagcgtactgccggaaggactactttgacatgtttgcgcctaagtgcggcggttgcgccagagccattctggagaattatatatccgcccttaatactctgtggcatcccgaatgctttgtctgtagagaatgctttacaccttttgtcaacggctctttttttgagcatgatggccagccttactgcgaagtgcactatcacgaaagaaggggatccctttgctcaggctgtcagaagcccatcaccggccgttgtattacagccatggccaagaagtttcaccccgagcattttgtgtgtgccttttgcctgaagcagctaaataaaggtactttcaaagagcaaaacgataaaccctactgtcagaattgtttcctcaagctgttttgctag

SEQ ID NO: 218118 - DNA, 951 bp, Artificial Sequence
  derived and/or modified sequence
atgagctcaccacagagagtcacttcaactcagcaacagactagaatatcagcgagcagtgccacccgcgagctggacgagctgatggcctctttatctgattttaaattcatggctcagggcaagaccggctcaagcagcccccctggcggaccgccaaagcctggtagtcagctcgacagcatgctgggatccctgcagtccgacctgaataaactgggcgtagctaccgtagccaagggcgtgtgtggagcctgcaaaaagcctattgcaggtcaggttgtgaccgcgatgggcaaaacttggcatccagaacacttcgtatgcacgcattgtcaggaggagataggaagcagaaactttttcgagcgggatggtcaaccctattgcgagaaagattatcacaacctgttcagccccagatgctattattgtaacggacctatattagataaggtggtgaccgcgctggatcgtacgtggcacccagaacactttttttgtgcacagtgtggggcttttttcggacccgagggctttcacgagaaggatgggaaggcatattgtaggaaggactacttcgacatgtttgcacctaagtgcggcggatgcgcgcgagccattctggaaaactacatcagcgcgttgaatacgttatggcatccagagtgtttcgtttgtcgcgagtgtttcaccccgttcgtaaatggctccttcttcgagcacgacggccagccttattgtgaggtgcactatcatgagagacgtggttcactctgctcaggctgccagaaacccatcacaggtcgctgcataaccgccatggccaagaagtttcaccctgaacattttgtctgtgccttttgcctcaagcaattgaacaagggtacttttaaagagcagaacgataaaccgtactgtcagaactgcttcctcaagctcttttgctag

SEQ ID NO: 218119 - DNA, 1520 bp, Artificial Sequence
  derived and/or modified sequence
atagacgagcggccccgggacgggcagctagcgcgaccctgagccggcgcccgtggtccggccatggacgacctcgacgccctgctggcggacttggagtctaccacctcccacatctccaaacggcctgtgttcttgtcggaggagaccccctactcatacccaactggaaaccacacataccaggagattgccgggcctggaggacgtgcggcccagtgtggagagtctcttggatgaactggagagctccgtgcccagccccgtccctgccatcactgtgaaccagggcgagatgagcagcccgcagcgcgtcacctccacccaacagcagacacgcatctcggcctcctctgccaccagggagctggacgagctgatggcttcgctgtcggatttcaagttcatggcccaggggaagacagggagcagctcaccccctggggggcccccgaagcccgggagccagctggacagcatgctggggagcctgcagtctgacctgaacaagctgggggtcgccacagtcgccaaaggagtctgcggggcctgcaagaagcccatcgccgggcaggttgtgaccgccatggggaagacgtggcaccccgagcacttcgtctgcacccactgccaggaggagatcggatcccggaacttcttcgagcgggatggacagccctactgtgaaaaggactaccacaacctcttctccccgcgctgctactactgcaacggccccatcctggataaagtggtgacagcccttgaccggacgtggcaccctgaacacttcttctgtgcacagtgtggagccttctttggtcccgaagggttccacgagaaggacggcaaggcctactgtcgcaaggactacttcgacatgttcgcacccaagtgtggcggctgcgcccgggccatcctggagaactatatctcagccctcaacacgctgtggcatcctgagtgctttgtgtgccgggaatgcttcacgccattcgtgaacggcagcttcttcgagcacgacgggcagccctactgtgaggtgcactaccacgagcggcgcggctcgctgtgttctggctgccagaagcccatcaccggccgctgcatcaccgccatggccaagaagttccaccccgagcacttcgtctgtgccttctgcctcaagcagctcaacaagggcaccttcaaggagcagaacgacaagccttactgtcagaactgcttcctcaagctcttctgctaggtgccctgcccctgtctctgccccccttccccagccagcatccccaactgcgactgtgacctagagacttcacccgggggtgaaggggtaaacccgactgaaactggaacccttgtcctccgctggtgcgggatggacagagggccgtgaggggtccccctgcttgtcttcacccctgccagagcctctgggccccctcctccctcctgtagctctccctaggctgcccactctccatcctccccaggggtagaggctgggggctccaccccag

SEQ ID NO: 218120 - protein, 708 aa, Artificial Sequence
  derived and/or modified sequence
MADREGGCAAGRGRELEPELEPGPGPGSALEPGEEFEIVDRSQLPGPGDLRSATRPRAAEGWSAPILTLARRATGNLSASCGSALRAAAGLGGGDSGDGTARAASKCQMMEERANLMHMMKLSIKVLLQSALSLGRSLDADHAPLQQFFVVMEHCLKHGLKVKKSFIGQNKSFFGPLELVEKLCPEASDIATSVRNLPELKTAVGRGRAWLYLALMQKKLADYLKVLIDNKHLLSEFYEPEALMMEEEGMVIVGLLVGLNVLDANLCLKGEDLDSQVGVIDFSLYLKDVQDLDGGKEHERITDVLDQKNYVEELNRHLSCTVGDLQTKIDGLEKTNSKLQEELSAATDRICSLQEEQQQLREQNELIRERSEKSVEITKQDTKVELETYKQTRQGLDEMYSDVWKQLKEEKKVRLELEKELELQIGMKTEMEIAMKLLEKDTHEKQDTLVALRQQLEEVKAINLQMFHKAQNAESSLQQKNEAITSFEGKTNQVMSSMKQMEERLQHSERARQGAEERSHKLQQELGGRIGALQLQLSQLHEQCSSLEKELKSEKEQRQALQRELQHEKDTSSLLRMELQQVEGLKKELRELQDEKAELQKICEEQEQALQEMGLHLSQSKLKMEDIKEVNQALKGHAWLKDDEATHCRQCEKEFSISRRKHHCRNCGHIFCNTCSSNELALPSYPKPVRVCDSCHTLLLQRCSSTAS

SEQ ID NO: 218121 - DNA, 2127 bp, Artificial Sequence
  derived and/or modified sequence
atggccgacagagagggcggctgcgccgccggcagaggcagagagctggagcccgagctggagcccggccccggccccggcagcgccctggagcccggcgaggagttcgagatcgtggacagaagccagctgcccggccccggcgacctgagaagcgccaccagacccagagccgccgagggctggagcgcccccatcctgaccctggccagaagagccaccggcaacctgagcgccagctgcggcagcgccctgagagccgccgccggcctgggcggcggcgacagcggcgacggcaccgccagagccgccagcaagtgccagatgatggaggagagagccaacctgatgcacatgatgaagctgagcatcaaggtgctgctgcagagcgccctgagcctgggcagaagcctggacgccgaccacgcccccctgcagcagttcttcgtggtgatggagcactgcctgaagcacggcctgaaggtgaagaagagcttcatcggccagaacaagagcttcttcggccccctggagctggtggagaagctgtgccccgaggccagcgacatcgccaccagcgtgagaaacctgcccgagctgaagaccgccgtgggcagaggcagagcctggctgtacctggccctgatgcagaagaagctggccgactacctgaaggtgctgatcgacaacaagcacctgctgagcgagttctacgagcccgaggccctgatgatggaggaggagggcatggtgatcgtgggcctgctggtgggcctgaacgtgctggacgccaacctgtgcctgaagggcgaggacctggacagccaggtgggcgtgatcgacttcagcctgtacctgaaggacgtgcaggacctggacggcggcaaggagcacgagagaatcaccgacgtgctggaccagaagaactacgtggaggagctgaacagacacctgagctgcaccgtgggcgacctgcagaccaagatcgacggcctggagaagaccaacagcaagctgcaggaggagctgagcgccgccaccgacagaatctgcagcctgcaggaggagcagcagcagctgagagagcagaacgagctgatcagagagagaagcgagaagagcgtggagatcaccaagcaggacaccaaggtggagctggagacctacaagcagaccagacagggcctggacgagatgtacagcgacgtgtggaagcagctgaaggaggagaagaaggtgagactggagctggagaaggagctggagctgcagatcggcatgaagaccgagatggagatcgccatgaagctgctggagaaggacacccacgagaagcaggacaccctggtggccctgagacagcagctggaggaggtgaaggccatcaacctgcagatgttccacaaggcccagaacgccgagagcagcctgcagcagaagaacgaggccatcaccagcttcgagggcaagaccaaccaggtgatgagcagcatgaagcagatggaggagagactgcagcacagcgagagagccagacagggcgccgaggagagaagccacaagctgcagcaggagctgggcggcagaatcggcgccctgcagctgcagctgagccagctgcacgagcagtgcagcagcctggagaaggagctgaagagcgagaaggagcagagacaggccctgcagagagagctgcagcacgagaaggacaccagcagcctgctgagaatggagctgcagcaggtggagggcctgaagaaggagctgagagagctgcaggacgagaaggccgagctgcagaagatctgcgaggagcaggagcaggccctgcaggagatgggcctgcacctgagccagagcaagctgaagatggaggacatcaaggaggtgaaccaggccctgaagggccacgcctggctgaaggacgacgaggccacccactgcagacagtgcgagaaggagttcagcatcagcagaagaaagcaccactgcagaaactgcggccacatcttctgcaacacctgcagcagcaacgagctggccctgcccagctaccccaagcccgtgagagtgtgcgacagctgccacaccctgctgctgcagagatgcagcagcaccgccagctag

SEQ ID NO: 218122 - DNA, 1803 bp, Artificial Sequence
  derived and/or modified sequence
atgatggaggagagagccaacctgatgcacatgatgaagctgagcatcaaggtgctgctgcagagcgccctgagcctgggcagaagcctggacgccgaccacgcccccctgcagcagttcttcgtggtgatggagcactgcctgaagcacggcctgaaggtgaagaagagcttcatcggccagaacaagagcttcttcggccccctggagctggtggagaagctgtgccccgaggccagcgacatcgccaccagcgtgagaaacctgcccgagctgaagaccgccgtgggcagaggcagagcctggctgtacctggccctgatgcagaagaagctggccgactacctgaaggtgctgatcgacaacaagcacctgctgagcgagttctacgagcccgaggccctgatgatggaggaggagggcatggtgatcgtgggcctgctggtgggcctgaacgtgctggacgccaacctgtgcctgaagggcgaggacctggacagccaggtgggcgtgatcgacttcagcctgtacctgaaggacgtgcaggacctggacggcggcaaggagcacgagagaatcaccgacgtgctggaccagaagaactacgtggaggagctgaacagacacctgagctgcaccgtgggcgacctgcagaccaagatcgacggcctggagaagaccaacagcaagctgcaggaggagctgagcgccgccaccgacagaatctgcagcctgcaggaggagcagcagcagctgagagagcagaacgagctgatcagagagagaagcgagaagagcgtggagatcaccaagcaggacaccaaggtggagctggagacctacaagcagaccagacagggcctggacgagatgtacagcgacgtgtggaagcagctgaaggaggagaagaaggtgagactggagctggagaaggagctggagctgcagatcggcatgaagaccgagatggagatcgccatgaagctgctggagaaggacacccacgagaagcaggacaccctggtggccctgagacagcagctggaggaggtgaaggccatcaacctgcagatgttccacaaggcccagaacgccgagagcagcctgcagcagaagaacgaggccatcaccagcttcgagggcaagaccaaccaggtgatgagcagcatgaagcagatggaggagagactgcagcacagcgagagagccagacagggcgccgaggagagaagccacaagctgcagcaggagctgggcggcagaatcggcgccctgcagctgcagctgagccagctgcacgagcagtgcagcagcctggagaaggagctgaagagcgagaaggagcagagacaggccctgcagagagagctgcagcacgagaaggacaccagcagcctgctgagaatggagctgcagcaggtggagggcctgaagaaggagctgagagagctgcaggacgagaaggccgagctgcagaagatctgcgaggagcaggagcaggccctgcaggagatgggcctgcacctgagccagagcaagctgaagatggaggacatcaaggaggtgaaccaggccctgaagggccacgcctggctgaaggacgacgaggccacccactgcagacagtgcgagaaggagttcagcatcagcagaagaaagcaccactgcagaaactgcggccacatcttctgcaacacctgcagcagcaacgagctggccctgcccagctaccccaagcccgtgagagtgtgcgacagctgccacaccctgctgctgcagagatgcagcagcaccgccagctag

SEQ ID NO: 218123 - DNA, 2127 bp, Artificial Sequence
  derived and/or modified sequence
atggctgacagagaagggggctgtgcagccggccggggacgcgagcttgaacctgagcttgagccagggccgggcccaggaagtgccctcgaacctggcgaagagtttgaaatcgtggaccgcagccagctgcctgggccgggcgatctcagaagtgccacgcgcccacgggctgcagagggatggtcagctcccattctgaccctggccagacgagccactggcaaccttagtgcctcgtgcggttccgcgctgcgggctgcagctggcctcggcggcggggattctggcgatggaacggcccgcgcggctagcaaatgccaaatgatggaggagagggccaacctgatgcatatgatgaagttatctatcaaggtcctgctccagtctgccctgagtctgggacgctccctcgatgctgatcatgccccactgcagcaattctttgtcgtaatggaacactgtctgaaacatggtctcaaagtgaaaaaatcatttattggtcagaataagagttttttcgggcctttagagttggtggagaagctttgtcctgaggcctccgacattgcaacctcggtgcggaacttaccggagctcaaaacggccgtgggaagggggcgcgcttggctctatctagcactgatgcaaaagaagctggctgattacctcaaagtcttaattgacaataagcacctcctgagtgagttctacgagcctgaagcactgatgatggaagaggaggggatggtgattgttggtttgctggttggcctgaacgtgttggacgccaatctgtgcctcaaaggcgaggacctggactcccaggtgggagtgatcgacttctcactctatctgaaagatgtacaagatctggacggcggaaaagaacatgagcgcattacagacgttctggatcagaagaattatgtcgaggaacttaacaggcatctgtcatgtacagtgggagatcttcaaaccaaaattgatgggctcgagaaaacaaatagtaaactgcaggaagaactctctgctgccaccgaccgcatctgctcgctgcaggaagagcagcaacagttaagagagcagaacgagctgatccgtgaaaggagtgagaagagcgtagagatcaccaagcaggataccaaggtcgaactggagacttacaaacaaacaaggcaagggctggatgaaatgtatagcgacgtttggaaacagctgaaggaggagaaaaaagttcgcttggagcttgagaaggagcttgagctgcaaattggcatgaagacagagatggaaattgccatgaagctccttgaaaaagacacccacgagaagcaagacacattggtcgctctgaggcaacagctggaagaggtgaaagcaatcaacctacaaatgttccataaggcacagaacgctgagagcagcctgcagcagaagaatgaggccatcacttcatttgaagggaaaacaaaccaagtgatgtccagcatgaagcagatggaggagcgacttcagcactctgaaagggcacgtcagggtgccgaggagagaagccataagctccaacaggagctggggggacggattggcgccctgcagctgcagctgagccagctccacgagcagtgtagttctcttgagaaggagctcaagagcgagaaggagcaacggcaggccctgcagcgcgagttacaacatgagaaggacaccagttccttgttgcgaatggagctccagcaggtggagggtctgaaaaaggagctgcgggagttgcaggatgagaaggccgagctacagaaaatatgcgaagagcaggagcaggcattacaggaaatgggcctccatttatcccagtcaaagctgaaaatggaggatatcaaggaagtgaatcaggcgctaaaggggcacgcctggctcaaggacgatgaggcaacccactgcagacagtgtgaaaaagaattcagcatcagccggcgcaagcatcactgtcgcaattgcggacatattttctgtaacacctgttcatctaacgagctggcactcccaagctatccgaagcccgtgcgcgtgtgcgacagttgccacacactgttgctccaaaggtgtagtagcaccgcttcctag

SEQ ID NO: 218124 - DNA, 1803 bp, Artificial Sequence
  derived and/or modified sequence
atgatggaagagagagctaatttgatgcatatgatgaaactgagcattaaagttcttctgcaatccgctctgtctttaggccgcagtctcgatgcagaccacgcccccttacagcagtttttcgtagttatggagcactgtttaaagcacggattgaaagtgaaaaagtccttcattgggcagaataaaagcttctttggccccctggagttggtggaaaaactgtgccccgaggcatcagacatagcaacaagcgtccgcaatctgcctgaactaaagacagccgtcgggcgaggacgggcgtggctgtacctcgccctgatgcagaaaaaactggctgactacctaaaagtgttgatcgataataagcacctgctgtccgagttctatgaacccgaggcactcatgatggaagaggaaggaatggtgatagtgggcctgctagtggggctgaatgtgcttgatgctaacctgtgcctgaagggcgaggacctggattcccaggtgggcgtgattgatttcagtctctatcttaaagacgtgcaggatcttgatggaggtaaagagcacgagagaattaccgatgtgttagaccagaagaactacgtagaggagcttaatcggcacctgtcctgtactgtgggagatctgcaaacaaagattgatgggttagagaagactaactcgaaacttcaagaagaactgagtgccgccaccgatcgaatatgcagtctacaggaggaacagcagcaactgcgcgagcagaacgagcttatcagagagcgatctgagaaatccgtagagatcacaaaacaggacacaaaagtggaactagaaacctacaaacagactagacaggggctggacgaaatgtacagcgacgtttggaaacagctgaaagaggagaaaaaggtgcgccttgagctggagaaagagctggaattacagatcggtatgaaaacagagatggagatcgcaatgaagcttctcgagaaagatacccacgaaaaacaggatacattggtggcgctgagacaacagctcgaggaagttaaagccattaatcttcagatgtttcacaaggcccagaacgccgaatcatcattgcagcaaaagaatgaggctataacatcgtttgagggtaagacgaaccaggtgatgtcctctatgaaacagatggaagaaagactgcaacactctgaacgcgcccgacagggcgcagaggaaagaagccataagctgcagcaagaactggggggccgtatcggagctttacagttgcagctgagccagctgcacgagcagtgctcttctctggaaaaggaactcaaatccgaaaaggaacagagacaagccctgcagagagagctgcaacatgagaaggacacctcctcccttcttcgtatggagctgcaacaggtggagggcctgaagaaggagctccgggagctccaagatgagaaagccgagctccagaaaatatgcgaggagcaggagcaggccctgcaggagatgggactacacttgtctcagagcaaattaaagatggaagacatcaaggaggtgaatcaggctctgaagggccatgcctggctgaaagatgatgaggctactcactgccgtcagtgtgagaaagagttcagtatctctaggcgcaaacatcattgtaggaactgcggccatatcttttgtaacacatgttccagtaacgagcttgccttaccttcctatccaaagcccgtgcgagtttgtgactcttgccacaccttgctgctgcagcgttgtagtagcactgcatcttag

SEQ ID NO: 218125 - DNA, 1803 bp, Artificial Sequence
  derived and/or modified sequence
atgatggaggagagggctaacctgatgcatatgatgaaattgagtattaaggtactgctgcagtctgccttgtccctggggagatcactggacgccgatcacgcccccctgcaacagtttttcgtggttatggagcactgcctgaagcatggcttgaaggtaaagaagtcttttattggccagaataaatccttctttgggcctctggaattggttgagaagctttgcccagaagcttcagatatcgccacgagtgtgcgcaacctgccggaactcaaaacggctgtaggacgcggtcgagcctggctgtacctggctctcatgcagaaaaaactggctgattaccttaaggtgctgatcgacaacaaacacctgctctcagaattctacgaacctgaggcccttatgatggaagaagaagggatggttatcgtgggtctcttggtggggctaaatgtcctcgacgctaacctgtgcctgaagggcgaggacttggacagtcaagttggcgtcatcgatttctcactttacctgaaagacgtccaggatttggatggcggcaaggagcatgagcgaataactgatgtgctggaccagaaaaattacgtggaagagctgaacaggcaccttagctgtacagtgggagacttacagaccaagatcgacggcctagagaaaacaaatagtaaactccaggaagagctctccgccgctacagatagaatttgctccctacaagaagaacaacagcagctgagagagcagaatgaacttatccgcgagcgatctgagaagagcgtggagatcactaaacaggacacgaaagtcgagctagagacttacaaacagacaaggcagggtctcgatgagatgtacagcgacgtttggaaacaacttaaggaagagaaaaaagttcggctggaattggagaaggagctggagctccagataggaatgaaaacagaaatggagatcgccatgaaactcctggaaaaggacacacacgagaagcaagacacactcgtagctctccggcaacagctggaagaggtcaaagcgattaatcttcaaatgtttcacaaagcacagaacgctgagtcatccctccagcagaaaaatgaagcaataaccagcttcgaaggaaagactaaccaagtaatgtcttctatgaaacagatggaggagaggctgcagcactccgaacgggctcgccaaggagcagaagaaaggagccacaaactccagcaggaattgggtggaagaattggagctctacaactgcagttgtctcaactgcacgaacagtgttcatcactggagaaagagctgaaatcagagaaggaacagcgccaggcactgcaaagggaactgcagcacgagaaggatacgagttcactccttcgtatggagctgcagcaggttgaggggctcaagaaagagctgagggaactccaagacgaaaaggcagagttacagaagatctgtgaagagcaggagcaggcactccaggagatggggctccatctgtcacagtctaagttaaagatggaggacatcaaagaggtcaaccaggctctcaagggccacgcatggctgaaagacgacgaggccacccattgccgccagtgcgaaaaagagttcagcatctctagaagaaagcatcactgtcgaaactgcggtcatatattttgcaatacctgttcaagcaacgaactggccctgcctagttatccaaaaccggtacgcgtgtgtgacagctgccatactttactgttgcagcggtgctcgagtacagcatcctag

SEQ ID NO: 218126 - DNA, 2127 bp, Artificial Sequence
  derived and/or modified sequence
atggctgaccgggagggcggctgtgccgccggccggggccgggagctggagcctgagctggagcccggccctggccctggcagcgccctggagcccggggaggagtttgagatcgtggacaggagccagctgcccggccctggggacctgcggagcgccacccggcccagggctgctgagggctggagcgcccccatcctgaccctggcccggcgggccaccggcaacctgagcgccagctgtggcagcgccctgcgggctgctgctggcctgggcggcggggacagcggagatggaacagcccgggccgccagcaagtgccagatgatggaggagcgggccaacctgatgcacatgatgaagctgagcatcaaggtgctgctgcagagcgccctgagcctgggccgcagcctggatgctgaccacgcccccctgcagcagttctttgtggtgatggagcactgcctgaagcacggcctgaaggtgaagaagagcttcatcggccagaacaagagcttcttcggccccctggagctggtggagaagctgtgcccagaggccagtgacatcgccacctctgtgaggaacctgcctgagctgaagacagctgtgggccggggccgggcctggctgtacctggccctgatgcagaagaagctggccgactacctgaaggtgctgattgacaacaagcacctgctgtctgagttctatgagcctgaggccctgatgatggaggaggagggcatggtgattgtgggcctgctggtgggcctgaatgtgctggatgccaacctgtgcctgaagggggaggacctggacagccaggtgggcgtcatcgacttcagcctgtacctgaaggatgtgcaggacctggatggcggcaaggagcacgagcgcatcacagatgtgctggaccagaagaactacgtggaggagctgaacagacacctgagctgcaccgtgggggacctgcagaccaagattgatggcctggagaagaccaacagcaagctgcaggaggagctgtctgctgccacagaccgcatctgcagcctgcaggaggagcagcagcagctgcgggagcagaatgagctgatccgggagaggtctgagaagtctgtggagatcaccaagcaggacaccaaggtggagctggagacctacaagcagacccggcagggcctggatgagatgtacagtgatgtgtggaagcagctgaaggaggagaagaaggtgcggctggagctggagaaggagctggagctgcagatcggcatgaagacagagatggagatcgccatgaagctgctggagaaggacacccatgagaagcaggacaccctggtggccctgcggcagcagctggaggaggtgaaggccatcaacctgcagatgttccacaaggcccagaatgctgagagcagcctgcagcagaagaatgaggccatcaccagctttgagggcaagaccaaccaggtgatgagctccatgaagcagatggaggagcggctgcagcacagcgagcgggcccggcagggcgctgaggagaggagccacaagctgcagcaggagctgggcggccgcatcggggccctgcagctgcagctgagccagctgcacgagcagtgcagcagcctggagaaggagctgaagtctgagaaggagcagaggcaggccctgcagcgggagctgcagcacgagaaggacaccagcagcctgctgaggatggagctgcagcaggtggagggcctgaagaaggagctgcgggagctgcaggatgagaaggccgagctgcagaagatctgtgaggagcaggagcaggccctgcaggagatgggcctgcacctgagccagagcaagctgaagatggaggacatcaaggaggtgaaccaggccctgaagggccacgcctggctgaaggatgatgaggccacccactgccggcagtgtgagaaggagttcagcatcagcaggaggaagcaccactgcaggaactgtggccacatcttctgcaacacctgcagcagcaatgagctggccctgcccagctaccccaagcctgtgcgggtgtgtgacagctgccacaccctgctgctgcagcgctgcagcagcacagccagctag

SEQ ID NO: 218127 - DNA, 1803 bp, Artificial Sequence
  derived and/or modified sequence
atgatggaggagcgggccaacctgatgcacatgatgaagctgagcatcaaggtgctgctgcagagcgccctgagcctgggccgcagcctggatgctgaccacgcccccctgcagcagttctttgtggtgatggagcactgcctgaagcacggcctgaaggtgaagaagagcttcatcggccagaacaagagcttcttcggccccctggagctggtggagaagctgtgcccagaggccagtgacatcgccacctctgtgaggaacctgcctgagctgaagacagctgtgggccggggccgggcctggctgtacctggccctgatgcagaagaagctggccgactacctgaaggtgctgattgacaacaagcacctgctgtctgagttctatgagcctgaggccctgatgatggaggaggagggcatggtgattgtgggcctgctggtgggcctgaatgtgctggatgccaacctgtgcctgaagggggaggacctggacagccaggtgggcgtcatcgacttcagcctgtacctgaaggatgtgcaggacctggatggcggcaaggagcacgagcgcatcacagatgtgctggaccagaagaactacgtggaggagctgaacagacacctgagctgcaccgtgggggacctgcagaccaagattgatggcctggagaagaccaacagcaagctgcaggaggagctgtctgctgccacagaccgcatctgcagcctgcaggaggagcagcagcagctgcgggagcagaatgagctgatccgggagaggtctgagaagtctgtggagatcaccaagcaggacaccaaggtggagctggagacctacaagcagacccggcagggcctggatgagatgtacagtgatgtgtggaagcagctgaaggaggagaagaaggtgcggctggagctggagaaggagctggagctgcagatcggcatgaagacagagatggagatcgccatgaagctgctggagaaggacacccatgagaagcaggacaccctggtggccctgcggcagcagctggaggaggtgaaggccatcaacctgcagatgttccacaaggcccagaatgctgagagcagcctgcagcagaagaatgaggccatcaccagctttgagggcaagaccaaccaggtgatgagctccatgaagcagatggaggagcggctgcagcacagcgagcgggcccggcagggcgctgaggagaggagccacaagctgcagcaggagctgggcggccgcatcggggccctgcagctgcagctgagccagctgcacgagcagtgcagcagcctggagaaggagctgaagtctgagaaggagcagaggcaggccctgcagcgggagctgcagcacgagaaggacaccagcagcctgctgaggatggagctgcagcaggtggagggcctgaagaaggagctgcgggagctgcaggatgagaaggccgagctgcagaagatctgtgaggagcaggagcaggccctgcaggagatgggcctgcacctgagccagagcaagctgaagatggaggacatcaaggaggtgaaccaggccctgaagggccacgcctggctgaaggatgatgaggccacccactgccggcagtgtgagaaggagttcagcatcagcaggaggaagcaccactgcaggaactgtggccacatcttctgcaacacctgcagcagcaatgagctggccctgcccagctaccccaagcctgtgcgggtgtgtgacagctgccacaccctgctgctgcagcgctgcagcagcacagccagctag

SEQ ID NO: 218128 - DNA, 2127 bp, Artificial Sequence
  derived and/or modified sequence
atggccgaccgggagggcggctgcgccgccggccggggccgggagctggagcccgagctcgagccaggtccaggccctgggtctgccttggaacctggcgaggaattcgagatcgtggaccgcagccagttacccgggcccggtgatctcagaagcgcaacgcgacctcgcgcagccgagggctggtctgcacctatcttgaccctggcaagaagagccaccggcaacttgtccgccagctgtggatccgcattacgggcggctgctgggctcggtggtggcgactcaggggatggtaccgctcgcgcagcctctaaatgtcagatgatggaggaacgcgctaacctcatgcacatgatgaagctgtccatcaaagtgctgctgcagagcgccctcagtttaggacggagtttggatgccgatcacgctccgcttcagcaatttttcgtggtcatggaacactgtctgaaacatggccttaaggtgaagaaatccttcattggccaaaataagagcttctttggccctctggagctggtggagaagctgtgccctgaggccagcgatatagccacttcagtgagaaacctgccagagttgaagaccgccgtgggccggggacgagcttggctgtaccttgccctgatgcagaagaaactagccgactatctaaaagtgttgattgataataagcatctcctctcagagttctatgagccggaggccttaatgatggaggaggaaggaatggtcatcgttggcctcctcgtgggacttaatgtattggatgctaatctgtgtttgaagggggaggaccttgactcacaggtgggcgttatcgacttcagcctttatctgaaggatgtccaggacttggacgggggaaaagagcacgagcgaattacagacgtgcttgatcagaagaattacgtggaggaactcaaccggcacctgtcttgtaccgtgggtgacctccagactaagatcgatgggctcgaaaagactaactccaagttgcaagaggagctttcagctgctaccgataggatctgttcactccaagaggaacagcaacaactgcgagaacaaaatgaattaatccgtgaaaggagtgagaagagcgtcgaaatcaccaaacaagacacaaaagtcgaactagagacatacaagcagacgcgtcagggccttgacgagatgtactctgacgtatggaagcagctcaaggaggaaaaaaaggtcagattggaactggaaaaggagctggaacttcagatcggtatgaagactgaaatggagatcgctatgaaactgctggaaaaggatacacacgaaaagcaagacactttggtggcactccgccaacaactggaagaggtgaaggcaatcaatctgcagatgttccataaggcacagaacgctgaatcctctctgcagcagaagaacgaagccatcacgagcttcgaagggaaaacgaatcaggtgatgtcgtctatgaaacagatggaggagcggttgcagcactccgaaagggcaaggcagggggccgaagagaggtctcataagcttcaacaggagctgggaggacgcattggcgcactgcagttacaactctctcagctgcacgaacagtgctcgtctttagaaaaggagctgaagtctgaaaaagaacagaggcaagctttgcagagagaattgcagcacgagaaggacaccagctctttactgaggatggaactgcagcaagtagaaggactcaagaaggagctcagggagctccaggatgagaaggccgagcttcagaagatttgtgaagaacaagaacaagccctccaggagatgggtttgcacctcagccagagcaaacttaagatggaagacattaaagaggtcaatcaggcccttaaggggcatgcttggctaaaggatgatgaggccactcactgtaggcagtgtgagaaggaattctcaatatcacggcgcaaacatcattgcaggaactgtgggcacatattctgcaacacctgtagcagtaacgagcttgcccttcctagctaccctaaacccgtgagggtgtgcgatagttgccacactctgctgctccaaagatgctcatctacagcttcatag

SEQ ID NO: 218129 - DNA, 1803 bp, Artificial Sequence
  derived and/or modified sequence
atgatggaggagcgggccaacctgatgcacatgatgaagctgagcatcaaggttctgctgcaatccgctcttagcttgggaaggagcctggacgccgatcacgccccactccagcagttctttgttgtcatggaacattgtctgaaacacggactgaaggtgaaaaagtcttttattggacagaacaaaagcttcttcggcccgctggagctggtcgaaaaactgtgccccgaggcttcagatatcgctacctcagtcaggaatctccccgaactcaagacagccgtcggaagaggaagagcctggctgtacttggctctaatgcaaaaaaagttagctgactacttaaaagttctaatcgacaataaacacctcttgtctgagttctatgagcctgaagctctcatgatggaagaggaagggatggtgatcgtgggcctacttgtgggactgaacgtcctggacgcaaacctgtgtttaaaaggagaggacctagattctcaagtgggtgtgatcgatttttcgctctaccttaaggacgtacaagacctggacggtggtaaggagcatgagaggattactgatgtgctggaccagaagaactacgtggaggagcttaacagacatctgagctgtactgtcggggatctgcagactaaaatagatggattggagaaaaccaacagtaagctgcaagaagaactctcagctgccaccgataggatctgcagtctgcaggaagagcaacaacagctccgggagcagaatgagctaatcagagaaaggtctgagaagagcgtcgagatcacaaagcaggacactaaggtcgaattggaaacttacaaacaaacgcggcaaggactcgacgaaatgtactctgacgtgtggaaacagctgaaagaggagaaaaaagtacgcctggagctggaaaaggagctcgagcttcagatcgggatgaagaccgaaatggagattgccatgaagttactggagaaagatacccatgaaaaacaggataccctggtggcgctgaggcagcaacttgaggaagtaaaggctatcaatctgcagatgtttcataaggcgcagaacgctgaaagttcactgcagcagaaaaacgaggccattacatcgttcgagggcaagaccaatcaagtgatgtcatcaatgaagcaaatggaagaacgtctgcagcactctgagcgtgctcgtcaaggcgcagaggagaggagccacaagctgcagcaggagctaggaggacgaattggcgcgctgcaactacaactctctcagctgcacgagcagtgctcttccctggaaaaggaactgaagtccgagaaggagcagaggcaagcattacaaagagaactgcagcatgagaaagacacatcctctttgttgaggatggagcttcagcaggtcgaagggctgaagaaggagcttcgcgaattgcaggatgagaaggcagagctgcagaagatatgcgaagaacaggagcaggctctgcaagaaatgggactccacctgtcacagtccaagttgaagatggaggacattaaggaagttaaccaggccctgaagggccacgcgtggctaaaggacgacgaggccacccattgccgccagtgcgagaaagaattctccatttcccgccgaaagcaccattgccgaaactgtgggcatattttctgtaatacctgctcatccaacgaactggcattgccctcctaccccaaacctgtgcgggtttgtgacagctgtcataccctgttgctgcagagatgttcttcgacggcaagttag

SEQ ID NO: 218130 - DNA, 1803 bp, Artificial Sequence
  derived and/or modified sequence
atgatggaggagcgggccaacctgatgcacatgatgaagctgagcattaaagtgcttctccagtcagctttgagtcttggacgcagtctcgacgccgaccacgctcccctccagcaattcttcgtggtaatggagcactgcctcaaacatgggcttaaagttaagaaatcctttataggccagaataagtcattctttgggcccctggagctggtggaaaagttgtgtcccgaggctagcgatatcgctacctctgtaaggaatctgccggaactgaaaactgctgttggccgcgggagagcatggctgtatctggcccttatgcaaaagaagctcgctgactatctgaaagtactgatagataacaagcacctgttgagtgaattttacgagcctgaagctctgatgatggaggaggaagggatggtcatcgtggggctgttagttgggctcaacgtgctcgacgctaacttgtgtctcaagggagaggacctcgatagtcaggtgggtgtgatagacttttccctgtacctgaaggacgtccaggacctcgatggtgggaaggagcacgaacgtatcactgatgttctggatcaaaagaattacgtggaagagctgaacaggcacctctcctgtactgtaggagatctccagactaagattgacggtctcgagaagactaattcgaagcttcaggaagaattatccgcggcaaccgatcgcatctgttcactgcaggaggagcaacaacagttgcgcgaacaaaatgaactcattcgggagagatcagagaagagcgtggagatcaccaaacaggataccaaggtagagctcgagacctataaacagacgcgtcagggcctggacgagatgtacagcgacgtgtggaagcaacttaaggaggaaaagaaagttagactggagctggaaaaggagctcgaactgcagataggcatgaaaacagaaatggagatcgctatgaaactcctggaaaaggacacgcatgaaaaacaggatacactggtggctctccgtcaacagttggaggaggtgaaggcaattaaccttcaaatgtttcacaaggcgcagaatgccgaatcttctctgcagcaaaaaaacgaggccatcacctccttcgaggggaaaacaaaccaggtgatgtcttccatgaaacagatggaagagaggcttcaacatagcgagagagcccggcaaggcgcagaagagcggagccacaaattgcagcaggagttgggcgggcgcattggagccctgcagctccaactgtcccagctccatgagcagtgttcctcactggagaaggagctcaagagcgaaaaagagcagcgccaagcccttcagagggagctgcaacatgagaaggacacttcatcacttctaaggatggaactgcagcaggtagagggcttgaagaaagagcttagagagctgcaggacgagaaagccgaacttcaaaagatttgcgaagaacaggagcaggcgttacaggagatgggccttcatctgagccagtccaagctgaaaatggaggacatcaaggaagtcaatcaggcactgaaaggacacgcctggctgaaagacgacgaggctacccattgccggcaatgcgagaaggagttttctatctcacgccgtaagcatcattgccgtaactgtggccacattttttgcaatacttgttcatcaaatgagctggcattaccgagttatcctaaacccgtcagagtttgcgattcgtgtcacacactgctgctgcagaggtgctcgtccacagccagctag

SEQ ID NO: 218131 - DNA, 2127 bp, Artificial Sequence
  derived and/or modified sequence
atggctgaccgggaggggggttgtgccgctggacgaggcagagaactcgaacctgagcttgagcctgggccaggccctggcagcgctctggagcccggagaggagttcgagatcgtggacaggagtcagcttccaggcccaggggacctgagatcagcgacaagaccacgggcagccgagggatggtctgcacctatccttaccctggcccgacgtgccacaggcaatctttccgcttcttgcgggtcggccttgcgagcggctgccggacttgggggaggagattccggggacggcactgccagagccgcatcaaaatgccagatgatggaagagagagccaacctgatgcacatgatgaaattgagtattaaggtgctgcttcaaagcgctctcagcttgggaaggtctctggacgcagaccatgcacctctgcagcagtttttcgtcgtgatggaacattgcctgaagcacggtctgaaggtaaaaaagtctttcatcggacagaacaagtcttttttcgggccactcgagttagtagagaagctctgtccagaggcatctgacatagccacctcagttagaaacctgccagaactaaagaccgcagtggggaggggcagagcgtggctgtatctggcgttaatgcagaaaaaactcgcagactatctgaaggttctcattgacaataagcacctactaagcgagttttacgagcctgaggcactcatgatggaagaggaagggatggtcatcgtcgggctgctcgtcggcctgaacgtgttggatgccaatctgtgtctgaagggcgaggacctggattcccaggtgggggttatcgatttctctctctacctgaaggacgtgcaagatctagatggcggaaaggaacacgaacggatcaccgacgtgttagaccagaaaaactacgtggaagagctgaacagacacctgagttgcacagtcggcgatctgcaaacgaagatagacggacttgaaaagacaaacagcaaattgcaggaggaactttccgccgctaccgaccgcatctgttctttacaggaagaacagcaacagcttagggaacagaatgagctgatccgggagcgaagcgagaagagcgttgaaatcacaaagcaagataccaaagttgaactggaaacatacaagcaaacaagacaggggctggacgagatgtacagtgacgtgtggaagcaactgaaagaagagaagaaagtgaggctcgagttggagaaggaactggaactccagatcggaatgaaaaccgaaatggaaattgctatgaagctgttggagaaggacactcacgagaaacaggacactttggtcgcactccgccagcaactagaagaggtgaaagctatcaacctccaaatgtttcacaaagcacagaatgcagagtcatctctccaacagaagaatgaagcaatcacctctttcgaaggaaagaccaatcaggtcatgtcctccatgaagcagatggaggaacgactccaacatagcgagagagccaggcagggtgcagaagagcggagccacaagctccagcaggagctgggcggtaggattggggctctccaactgcaactctcccagctacatgagcaatgttcgtcattggagaaggagctgaagtctgagaaggaacagcgccaagcgctgcagagagagctgcaacatgaaaaagatacttcgagtcttctgaggatggagctacagcaagttgaagggctcaaaaaggagctccgggaactacaagacgaaaaagcagagttgcagaagatttgcgaagagcaggaacaggccttgcaagaaatgggcctgcacttgtcacaaagtaagctgaagatggaggacatcaaggaggtcaaccaagctctcaaggggcacgcatggttgaaagacgatgaggccacccactgcagacagtgcgaaaaggaattttccatttcaagacgtaagcaccactgccggaactgtggacacatcttttgtaatacttgcagcagcaatgagttggccctgccgagctacccaaaacccgtgcgggtgtgcgattcatgccatacactccttctgcagagatgctcctcgactgctagttag

SEQ ID NO: 218132 - DNA, 1803 bp, Artificial Sequence
  derived and/or modified sequence
atgatggaagagcgggctaatctgatgcatatgatgaaactgtcaataaaagtgctgttgcagagtgccctcagtttgggccgaagcctggacgctgatcacgcccctttgcagcaattcttcgtggttatggagcactgcctaaagcacgggctgaaagtgaaaaagtcctttattggccagaacaaatccttctttggcccattagaattggtcgaaaagttatgcccagaggcatccgacatcgccacaagtgttcggaacctgccagaactgaagactgctgtgggccgagggagagcctggctgtacctagccttgatgcagaagaagctggccgattatttgaaagttctgatagacaataagcacctcctgtctgagttttacgaacccgaggcattgatgatggaggaggagggaatggtcatcgtcggtcttttggtcggattaaacgtactagatgctaacctttgcctgaaaggggaggacctggactcccaggtgggcgtgatcgacttcagcctgtatctgaaggacgtccaagacttggatggcggaaaggaacatgaaaggatcaccgacgtactagaccagaaaaactacgtagaagagttgaatcgccatctgtcctgtactgtgggagacctgcagacaaaaatagatgggctcgagaaaaccaactctaagttgcaagaggagctgagtgcggctaccgaccgaatctgtagtcttcaagaggagcagcagcaactgcgggaacagaatgagctcattcgggaacgtagcgagaaaagcgttgagatcactaagcaggacactaaagtggagctcgaaacgtataaacagaccaggcagggactagacgaaatgtatagcgacgtgtggaagcagcttaaagaagaaaaaaaggtaaggttagagctggagaaagagctggaactgcagattggtatgaagacagaaatggagatcgctatgaaactgctcgagaaggacacccacgagaaacaggacaccctggtcgctctcaggcagcagctggaagaggtcaaagccattaatctgcagatgtttcataaagctcagaacgctgaatcatccttgcagcagaaaaacgaggctatcacctcattcgagggcaagacaaatcaggtgatgtcatctatgaaacagatggaagaaaggcttcagcactcagagcgagccaggcagggtgccgaggaacggagtcataagttgcaacaggaactcggaggcagaatcggcgctttgcagctgcagcttagccagttgcacgagcagtgctcttctctcgaaaaagagctgaagtctgagaaggagcagagacaggccttacagagagaactgcagcacgagaaggatacatccagccttctgcgtatggagctgcagcaagtcgagggtttgaagaaggagctgagggagctccaagatgagaaggcagaactgcagaaaatatgcgaggaacaggaacaggcactccaggagatgggtttacatctgtcccagtccaagctgaagatggaggatataaaagaggttaaccaggctctgaaaggccatgcgtggctcaaagatgatgaagctacccattgtcgacagtgcgagaaggagttttctatttccagacggaagcatcattgcaggaactgcggtcatattttttgcaacacctgttcctcaaatgagttagcactgccatcttatccaaagcccgtgcgagtgtgcgatagttgtcacaccttgctactgcaaagatgctcaagcacagcaagttag

SEQ ID NO: 218133 - DNA, 1803 bp, Artificial Sequence
  derived and/or modified sequence
atgatggaggagcgagctaatctcatgcatatgatgaagctgtccattaaggtgcttctgcagagcgcactctcactgggccgttcactggatgccgaccacgccccactgcagcagttcttcgtggtcatggaacattgcctgaagcatgggctgaaggtcaagaagagtttcataggacagaacaaatcattctttggccctctcgaattggtggaaaagctgtgtcccgaggctagtgatatcgcaacatcggtaagaaacttgcccgaactaaagacagccgtaggaagaggcagggcttggctatacctggctctgatgcagaaaaaattggcggattacctgaaagtgctcattgacaacaaacacctactgagcgagttctacgagcccgaagcccttatgatggaagaggaggggatggtgattgtaggactgctggtgggtttaaacgtgctggacgctaacctctgcctcaagggggaggacctggactcgcaagtgggcgtcatagacttctctttgtacctgaaagatgtccaagacttggacggcggaaaggagcatgagcgaatcacggacgtcctggaccaaaaaaactatgtggaggaactgaacaggcacctgtcctgcactgtgggcgacttgcagacaaagatcgatgggctggagaagacaaactctaaacttcaggaggaactctccgctgctacagaccgtatttgctcacttcaagaagaacaacaacaactccgcgaacaaaacgagcttatccgcgaaagatccgaaaaaagtgtcgaaatcacaaagcaagataccaaagtggagttggaaacttataagcagactcgacagggcttggatgagatgtactcggacgtgtggaagcagctgaaagaagagaagaaagttcgccttgaacttgagaaagagctagaactgcaaattgggatgaagaccgagatggaaatagcaatgaaactcctggaaaaagatactcatgagaaacaggacaccttggtcgctttgcggcagcagttagaggaggtgaaagcaattaatctacagatgtttcataaggcccagaatgccgagagctccctgcaacagaaaaatgaggcaattacaagcttcgaagggaagactaatcaagtgatgtcctccatgaagcagatggaggaacgcctgcagcattcagaaagggcccgacagggggcagaagagaggtcacacaagttgcagcaggagctcggcggacggatcggcgctctgcagctgcagcttagtcagctgcacgagcagtgttcctccctggagaaggagctcaaatctgaaaaggaacaaaggcaggctttacagcgggagctgcagcatgagaaagacacctcaagcctcctacggatggagttgcaacaggtagagggcttgaagaaggagttacgagaactgcaggacgagaaggccgaattgcagaagatttgtgaggagcaagagcaagcattacaggaaatgggcctgcatctgagtcagtcaaaactaaaaatggaggacatcaaggaggtaaaccaggcgctgaaaggccacgcatggctgaaagacgacgaagctactcactgcaggcagtgtgagaaggagttttccattagtcggagaaagcaccactgccgcaactgcgggcatatcttttgtaatacatgcagctctaatgagttggcgctgccctcttaccccaagcctgtcagagtctgtgatagttgtcataccttactgctgcaaagatgctcctcaacagcttcttag

SEQ ID NO: 218134 - DNA, 2646 bp, Artificial Sequence
  derived and/or modified sequence
gacacggccaagatggccgaccgggaaggcggctgcgctgctgggcgggggcgggagctggagccggagctggagccggggccggggcccgggtcagcgcttgagccgggagaagagtttgagatcgtggaccgaagccagctgcccggcccaggcgacctgcggagcgcaacgaggccgcgggcggccgagggctggtcggcgcccatcctgaccctggcacgcagggccaccgggaacctgtcggcgagctgcgggagcgcgctgcgcgcggccgcggggctgggcggcggggacagcggggacggcacggcgcgcgcagcttctaagtgccagatgatggaggagcgtgccaacctgatgcacatgatgaaactcagcatcaaggtgttgctccagtcggctctgagcctgggccgcagcctggatgcggaccatgcccccttgcagcagttctttgtagtgatggagcactgcctcaaacatgggctgaaagttaagaagagttttattggccaaaataaatcattctttggtcctttggagctggtggagaaactttgtccagaagcatcagatatagcgactagtgtcagaaatcttccagaattaaagacagctgtgggaagaggccgagcgtggctttatcttgcactcatgcaaaagaaactggcagattatctgaaagtgcttatagacaataaacatctcttaagcgagttctatgagcctgaggctttaatgatggaggaagaagggatggtgattgttggtctgctggtgggactcaatgttctcgatgccaatctctgcttgaaaggagaagacttggattctcaggttggagtaatagatttttccctctaccttaaggatgtgcaggatcttgatggtggcaaggagcatgaaagaattactgatgtccttgatcaaaaaaattatgtggaagaacttaaccggcacttgagctgcacagttggggatcttcaaaccaagatagatggcttggaaaagactaactcaaagcttcaagaagagctttcagctgcaacagaccgaatttgctcacttcaagaagaacagcagcagttaagagaacaaaatgaattaattcgagaaagaagtgaaaagagtgtagagataacaaaacaggataccaaagttgagctggagacttacaagcaaactcggcaaggtctggatgaaatgtacagtgatgtgtggaagcagctaaaagaggagaagaaagtccggttggaactggaaaaagaactggagttacaaattggaatgaaaaccgaaatggaaattgcaatgaagttactggaaaaggacacccacgagaagcaggacacactagttgccctccgccagcagctggaagaagtcaaagcgattaatttacagatgtttcacaaagctcagaatgcagagagcagtttgcagcagaagaatgaagccatcacatcctttgaaggaaaaaccaaccaagttatgtccagcatgaaacaaatggaagaaaggttgcagcactcggagcgggcgaggcagggggctgaggagcggagccacaagctgcagcaggagctgggcgggaggatcggcgccctgcagctgcagctctcccagctgcacgagcaatgctcaagcctggagaaagaattgaaatcagaaaaagagcaaagacaggctcttcagcgcgaattacagcacgagaaagacacttcctctctactcaggatggagctgcaacaagtggaaggactgaaaaaggagttgcgggagcttcaggacgagaaggcagagctgcagaagatctgcgaggagcaggaacaagccctccaggaaatgggcctgcacctcagccagtccaagctgaagatggaagatataaaagaagtgaaccaggcactgaagggccacgcctggctgaaagatgacgaagcgacacactgtaggcagtgtgagaaggagttctccatttcccggagaaagcaccactgccggaactgtggccacatcttctgcaacacctgctccagcaacgagctggccctgccctcctaccccaagccggtgcgagtgtgcgacagctgccacaccctgctcctgcagcgctgctcctccacggcctcctgaacgtccgtcctcaggagcacagcctcacggacagtgccaaaccctgtgggtctccaggggcttgggaaatgtgttctttcccaagagtatcaaaggaaagaatcaaatttcttgcccggtcactggcactccagaagacagcgtgccggaaccggcagctctcacctttctgtgacttgttcggaattaactcctctggatggaaacttccatcttacttggttacatcacggctctggttcagatacaacttcatgattttgctactatcatttttcacttttcaaagaatttaacctattttacagcagttcagttctgctagtgagtagttttcctctcctaccttccttctaaaaacctgattcatgcacagcgtttgacacacatggagtctgccagtgtgccttctctgcttcagacaagagatctgccatttcatgcccttgtgactacctatcattggccctgcaataaaatcatttatttttcactctggtgcgtgca

SEQ ID NO: 218135 - DNA, 2454 bp, Artificial Sequence
  derived and/or modified sequence
aaaaatggaaccggggttgcgggagaagccaaacgcggcgagtcttgctaaagccgtcgccgtagcaacgcgcggagccgtctgggagaggcctctggagcaggaggcccagtggctcttctgacccaaggccccgccgtccagcttctaagtgccagatgatggaggagcgtgccaacctgatgcacatgatgaaactcagcatcaaggtgttgctccagtcggctctgagcctgggccgcagcctggatgcggaccatgcccccttgcagcagttctttgtagtgatggagcactgcctcaaacatgggctgaaagttaagaagagttttattggccaaaataaatcattctttggtcctttggagctggtggagaaactttgtccagaagcatcagatatagcgactagtgtcagaaatcttccagaattaaagacagctgtgggaagaggccgagcgtggctttatcttgcactcatgcaaaagaaactggcagattatctgaaagtgcttatagacaataaacatctcttaagcgagttctatgagcctgaggctttaatgatggaggaagaagggatggtgattgttggtctgctggtgggactcaatgttctcgatgccaatctctgcttgaaaggagaagacttggattctcaggttggagtaatagatttttccctctaccttaaggatgtgcaggatcttgatggtggcaaggagcatgaaagaattactgatgtccttgatcaaaaaaattatgtggaagaacttaaccggcacttgagctgcacagttggggatcttcaaaccaagatagatggcttggaaaagactaactcaaagcttcaagaagagctttcagctgcaacagaccgaatttgctcacttcaagaagaacagcagcagttaagagaacaaaatgaattaattcgagaaagaagtgaaaagagtgtagagataacaaaacaggataccaaagttgagctggagacttacaagcaaactcggcaaggtctggatgaaatgtacagtgatgtgtggaagcagctaaaagaggagaagaaagtccggttggaactggaaaaagaactggagttacaaattggaatgaaaaccgaaatggaaattgcaatgaagttactggaaaaggacacccacgagaagcaggacacactagttgccctccgccagcagctggaagaagtcaaagcgattaatttacagatgtttcacaaagctcagaatgcagagagcagtttgcagcagaagaatgaagccatcacatcctttgaaggaaaaaccaaccaagttatgtccagcatgaaacaaatggaagaaaggttgcagcactcggagcgggcgaggcagggggctgaggagcggagccacaagctgcagcaggagctgggcgggaggatcggcgccctgcagctgcagctctcccagctgcacgagcaatgctcaagcctggagaaagaattgaaatcagaaaaagagcaaagacaggctcttcagcgcgaattacagcacgagaaagacacttcctctctactcaggatggagctgcaacaagtggaaggactgaaaaaggagttgcgggagcttcaggacgagaaggcagagctgcagaagatctgcgaggagcaggaacaagccctccaggaaatgggcctgcacctcagccagtccaagctgaagatggaagatataaaagaagtgaaccaggcactgaagggccacgcctggctgaaagatgacgaagcgacacactgtaggcagtgtgagaaggagttctccatttcccggagaaagcaccactgccggaactgtggccacatcttctgcaacacctgctccagcaacgagctggccctgccctcctaccccaagccggtgcgagtgtgcgacagctgccacaccctgctcctgcagcgctgctcctccacggcctcctgaacgtccgtcctcaggagcacagcctcacggacagtgccaaaccctgtgggtctccaggggcttgggaaatgtgttctttcccaagagtatcaaaggaaagaatcaaatttcttgcccggtcactggcactccagaagacagcgtgccggaaccggcagctctcacctttctgtgacttgttcggaattaactcctctggatggaaacttccatcttacttggttacatcacggctctggttcagatacaacttcatgattttgctactatcatttttcacttttcaaagaatttaacctattttacagcagttcagttctgctagtgagtagttttcctctcctaccttccttctaaaaacctgattcatgcacagcgtttgacacacatggagtctgccagtgtgccttctctgcttcagacaagagatctgccatttcatgcccttgtgactacctatcattggccctgcaataaaatcatttatttttca

SEQ ID NO: 218136 - DNA, 2642 bp, Artificial Sequence
  derived and/or modified sequence
aaaaatggaaccggggttgcgggagaagccaaacgcggcgagtcttgctaaagccgtcgccgtagcaacgcgcggagccgtctgggagaggcctctggagcaggaggcccagtggctcttctgacccaaggccccgccgtccaggtagggggctgtggcctctagggatcagggactacttacctgcgaatcccggttgcccgcccgccagcacgtccgttccctaagcagaccgcctggcctcctgcctgacccgtcttctcaccgttgcccggagtctgacctccccacgctcagtccactaacgaagctatccctgctcctgccccacagcttctaagtgccagatgatggaggagcgtgccaacctgatgcacatgatgaaactcagcatcaaggtgttgctccagtcggctctgagcctgggccgcagcctggatgcggaccatgcccccttgcagcagttctttgtagtgatggagcactgcctcaaacatgggctgaaagttaagaagagttttattggccaaaataaatcattctttggtcctttggagctggtggagaaactttgtccagaagcatcagatatagcgactagtgtcagaaatcttccagaattaaagacagctgtgggaagaggccgagcgtggctttatcttgcactcatgcaaaagaaactggcagattatctgaaagtgcttatagacaataaacatctcttaagcgagttctatgagcctgaggctttaatgatggaggaagaagggatggtgattgttggtctgctggtgggactcaatgttctcgatgccaatctctgcttgaaaggagaagacttggattctcaggttggagtaatagatttttccctctaccttaaggatgtgcaggatcttgatggtggcaaggagcatgaaagaattactgatgtccttgatcaaaaaaattatgtggaagaacttaaccggcacttgagctgcacagttggggatcttcaaaccaagatagatggcttggaaaagactaactcaaagcttcaagaagagctttcagctgcaacagaccgaatttgctcacttcaagaagaacagcagcagttaagagaacaaaatgaattaattcgagaaagaagtgaaaagagtgtagagataacaaaacaggataccaaagttgagctggagacttacaagcaaactcggcaaggtctggatgaaatgtacagtgatgtgtggaagcagctaaaagaggagaagaaagtccggttggaactggaaaaagaactggagttacaaattggaatgaaaaccgaaatggaaattgcaatgaagttactggaaaaggacacccacgagaagcaggacacactagttgccctccgccagcagctggaagaagtcaaagcgattaatttacagatgtttcacaaagctcagaatgcagagagcagtttgcagcagaagaatgaagccatcacatcctttgaaggaaaaaccaaccaagttatgtccagcatgaaacaaatggaagaaaggttgcagcactcggagcgggcgaggcagggggctgaggagcggagccacaagctgcagcaggagctgggcgggaggatcggcgccctgcagctgcagctctcccagctgcacgagcaatgctcaagcctggagaaagaattgaaatcagaaaaagagcaaagacaggctcttcagcgcgaattacagcacgagaaagacacttcctctctactcaggatggagctgcaacaagtggaaggactgaaaaaggagttgcgggagcttcaggacgagaaggcagagctgcagaagatctgcgaggagcaggaacaagccctccaggaaatgggcctgcacctcagccagtccaagctgaagatggaagatataaaagaagtgaaccaggcactgaagggccacgcctggctgaaagatgacgaagcgacacactgtaggcagtgtgagaaggagttctccatttcccggagaaagcaccactgccggaactgtggccacatcttctgcaacacctgctccagcaacgagctggccctgccctcctaccccaagccggtgcgagtgtgcgacagctgccacaccctgctcctgcagcgctgctcctccacggcctcctgaacgtccgtcctcaggagcacagcctcacggacagtgccaaaccctgtgggtctccaggggcttgggaaatgtgttctttcccaagagtatcaaaggaaagaatcaaatttcttgcccggtcactggcactccagaagacagcgtgccggaaccggcagctctcacctttctgtgacttgttcggaattaactcctctggatggaaacttccatcttacttggttacatcacggctctggttcagatacaacttcatgattttgctactatcatttttcacttttcaaagaatttaacctattttacagcagttcagttctgctagtgagtagttttcctctcctaccttccttctaaaaacctgattcatgcacagcgtttgacacacatggagtctgccagtgtgccttctctgcttcagacaagagatctgccatttcatgcccttgtgactacctatcattggccctgcaataaaatcatttatttttc

SEQ ID NO: 218137 - protein, 514 aa, Artificial Sequence
  derived and/or modified sequence
MQESGCRLEHPSATKFRNHVMEGDWDKAENDLNELKPLVHSPHAIVVRGALEISQTLLGIIVRMKFLLLQQKYLEYLEDGKVLEALQVLRCELTPLKYNTERIHVLSGYLMCSHAEDLRAKAEWEGKGTASRSKLLDKLQTYLPPSVMLPPRRLQTLLRQAVELQRDRCLYHNTKLDNNLDSVSLLIDHVCSRRQFPCYTQQILTEHCNEVWFCKFSNDGTKLATGSKDTTVIIWQVDPDTHLLKLLKTLEGHAYGVSYIAWSPDDNYLVACGPDDCSELWLWNVQTGELRTKMSQSHEDSLTSVAWNPDGKRFVTGGQRGQFYQCDLDGNLLDSWEGVRVQCLWCLSDGKTVLASDTHQRIRGYNFEDLTDRNIVQEDHPIMSFTISKNGRLALLNVATQGVHLWDLQDRVLVRKYQGVTQGFYTIHSCFGGHNEDFIASGSEDHKVYIWHKRSELPIAELTGHTRTVNCVSWNPQIPSMMASASDDGTVRIWGPAPFIDHQNIEEECSSMDS

SEQ ID NO: 218138 - protein, 661 aa, Artificial Sequence
  derived and/or modified sequence
MQANGAGGGGGGGGGGGGGGGGGGGQGQTPELACLSAQNGESSPSSSSSAGDLAHANGLLPSAPSAASNNSNSLNVNNGVPGGAAAASSATVAAASATTAASSSLATPELGSSLKKKKRLSQSDEDVIRLIGQHLNGLGLNQTVDLLMQESGCRLEHPSATKFRNHVMEGDWDKAENDLNELKPLVHSPHAIVVRGALEISQTLLGIIVRMKFLLLQQKYLEYLEDGKVLEALQVLRCELTPLKYNTERIHVLSGYLMCSHAEDLRAKAEWEGKGTASRSKLLDKLQTYLPPSVMLPPRRLQTLLRQAVELQRDRCLYHNTKLDNNLDSVSLLIDHVCSRRQFPCYTQQILTEHCNEVWFCKFSNDGTKLATGSKDTTVIIWQVDPDTHLLKLLKTLEGHAYGVSYIAWSPDDNYLVACGPDDCSELWLWNVQTGELRTKMSQSHEDSLTSVAWNPDGKRFVTGGQRGQFYQCDLDGNLLDSWEGVRVQCLWCLSDGKTVLASDTHQRIRGYNFEDLTDRNIVQEDHPIMSFTISKNGRLALLNVATQGVHLWDLQDRVLVRKYQGVTQGFYTIHSCFGGHNEDFIASGSEDHKVYIWHKRSELPIAELTGHTRTVNCVSWNPQIPSMMASASDDGTVRIWGPAPFIDHQNIEEECSSMDS

SEQ ID NO: 218139 - DNA, 1986 bp, Artificial Sequence
  derived and/or modified sequence
atgcaggccaacggcgccggcggcggcggcggcggcggcggcggcggcggcggcggcggcggcggcggcggcggccagggccagacccccgagctggcctgcctgagcgcccagaacggcgagagcagccccagcagcagcagcagcgccggcgacctggcccacgccaacggcctgctgcccagcgcccccagcgccgccagcaacaacagcaacagcctgaacgtgaacaacggcgtgcccggcggcgccgccgccgccagcagcgccaccgtggccgccgccagcgccaccaccgccgccagcagcagcctggccacccccgagctgggcagcagcctgaagaagaagaagagactgagccagagcgacgaggacgtgatcagactgatcggccagcacctgaacggcctgggcctgaaccagaccgtggacctgctgatgcaggagagcggctgcagactggagcaccccagcgccaccaagttcagaaaccacgtgatggagggcgactgggacaaggccgagaacgacctgaacgagctgaagcccctggtgcacagcccccacgccatcgtggtgagaggcgccctggagatcagccagaccctgctgggcatcatcgtgagaatgaagttcctgctgctgcagcagaagtacctggagtacctggaggacggcaaggtgctggaggccctgcaggtgctgagatgcgagctgacccccctgaagtacaacaccgagagaatccacgtgctgagcggctacctgatgtgcagccacgccgaggacctgagagccaaggccgagtgggagggcaagggcaccgccagcagaagcaagctgctggacaagctgcagacctacctgccccccagcgtgatgctgccccccagaagactgcagaccctgctgagacaggccgtggagctgcagagagacagatgcctgtaccacaacaccaagctggacaacaacctggacagcgtgagcctgctgatcgaccacgtgtgcagcagaagacagttcccctgctacacccagcagatcctgaccgagcactgcaacgaggtgtggttctgcaagttcagcaacgacggcaccaagctggccaccggcagcaaggacaccaccgtgatcatctggcaggtggaccccgacacccacctgctgaagctgctgaagaccctggagggccacgcctacggcgtgagctacatcgcctggagccccgacgacaactacctggtggcctgcggccccgacgactgcagcgagctgtggctgtggaacgtgcagaccggcgagctgagaaccaagatgagccagagccacgaggacagcctgaccagcgtggcctggaaccccgacggcaagagattcgtgaccggcggccagagaggccagttctaccagtgcgacctggacggcaacctgctggacagctgggagggcgtgagagtgcagtgcctgtggtgcctgagcgacggcaagaccgtgctggccagcgacacccaccagagaatcagaggctacaacttcgaggacctgaccgacagaaacatcgtgcaggaggaccaccccatcatgagcttcaccatcagcaagaacggcagactggccctgctgaacgtggccacccagggcgtgcacctgtgggacctgcaggacagagtgctggtgagaaagtaccagggcgtgacccagggcttctacaccatccacagctgcttcggcggccacaacgaggacttcatcgccagcggcagcgaggaccacaaggtgtacatctggcacaagagaagcgagctgcccatcgccgagctgaccggccacaccagaaccgtgaactgcgtgagctggaacccccagatccccagcatgatggccagcgccagcgacgacggcaccgtgagaatctggggccccgcccccttcatcgaccaccagaacatcgaggaggagtgcagcagcatggacagctag

SEQ ID NO: 218140 - DNA, 1545 bp, Artificial Sequence
  derived and/or modified sequence
atgcaggagtctggatgcagactggagcacccttccgctactaagttcagaaaccatgtgatggaaggcgactgggacaaagccgaaaacgatttgaacgagcttaagccactcgtgcattctccccatgccatagtagtacggggtgcccttgagatctcccagactctgttgggaatcatcgtgaggatgaaatttctcctgctgcaacagaagtatcttgaatatttggaggacgggaaagtcctggaagcactgcaggtgttgagatgcgagctgacccccctgaaatataacaccgagagaattcatgttctctccggctatctgatgtgctctcatgctgaggacttgcgagcaaaggccgagtgggaaggtaagggaactgcctcaaggagtaaactgctggacaagttacagacttatctgccaccctctgttatgctgccacctaggcgcctgcagaccctgctccgccaagccgtggagctgcagagggaccgctgtttgtatcataatacaaaactggacaacaacttagacagtgtgtctcttttgatcgaccacgtgtgctcccgtagacaatttccttgttacacacagcagatcctaactgaacattgtaacgaggtttggttctgtaaattcagcaatgatggtactaaattggccaccggcagtaaggacaccactgttattatctggcaggtggatccagatactcaccttttaaaattgttgaagacactggagggccacgcatacggagtgagctatattgcatggtccccagacgataactacctcgtggcctgtggcccggatgactgctccgagctctggctgtggaacgtccagaccggcgaactccggaccaaaatgtctcaatcgcacgaagacagtctgacatcagtggcctggaatccagacggaaaacgtttcgtcaccgggggccagagagggcagttctaccaatgcgatctcgacggaaatctgttagactcatgggagggggtccgtgtccagtgtttatggtgcctcagcgatggtaagactgtcctggcctccgacactcatcagcgaattcgtgggtataacttcgaagatctgactgaccggaatatcgttcaagaagatcatcctatcatgagcttcaccatatccaagaatggccgcttggctttgctcaatgtggctacacagggcgtccacctgtgggacctccaggatagggttctggtgagaaaatatcagggggttacccagggcttctacacaattcacagctgttttggagggcataatgaggactttatcgctagcggttctgaggatcataaggtatatatttggcataagagatcggaactgccgattgccgagctgaccggccatacccgcaccgttaactgtgtgagctggaaccctcagattccctctatgatggcctcagctagcgatgatgggactgtcagaatctggggccctgcaccttttatagaccaccagaacatcgaggaggagtgtagtagcatggatagctag

SEQ ID NO: 218141 - DNA, 1986 bp, Artificial Sequence
  derived and/or modified sequence
atgcaggctaatggtgccgggggggggggagggggagggggaggcggagggggaggcggaggaggaggaggcggacagggccaaaccccagaactcgcgtgcctatctgcccagaatggagaatcttcaccctcatcttccagcagcgccggagatctggcacacgcaaacgggctgttgccctctgctccctccgcagcctctaataactcaaatagcctgaatgtaaacaacggggtgcctgggggcgcggccgccgcttccagtgcaaccgttgctgccgccagcgcaaccaccgctgcatcttcttcactcgcgacgcccgaactggggtcctcactcaagaagaagaaacgcctctctcagagtgacgaggacgtcataagattgataggacagcacctgaacggactcggcctgaatcagacagtcgacctattaatgcaggaatccgggtgtcgcctggagcatcccagcgcgaccaaattcaggaatcatgtgatggaaggcgactgggataaggcggaaaacgatctgaatgagctgaagcctctcgtgcactcaccacacgccatagtcgttaggggagctctcgagatcagccaaaccctgctgggcatcattgttaggatgaaatttttgctcttgcagcagaagtatctggagtacctggaagacgggaaagtgctcgaggctctgcaggttctgcggtgtgaactgacacccctgaagtacaatacggagcgaatccatgtcctctcagggtacctgatgtgctctcacgccgaggatctgagggcaaaagccgaatgggaaggtaagggcaccgcgtccagaagtaaactgctggataaactccaaacttatcttcctccatccgtaatgctccccccgcggagactgcaaaccctgctccgacaagccgtcgaacttcagcgcgaccgctgtttataccataacactaaattggacaataatctcgactcggttagcctactgatagaccacgtctgttcacgcaggcagttcccgtgctacacccagcagatccttacagagcattgcaatgaggtatggttttgcaaattttccaatgacggaactaagttagccacgggctctaaagacactaccgtgataatctggcaggtggaccccgatactcatttgttgaagctcctcaagactctggaagggcacgcctatggcgtatcatatattgcctggagtcctgacgacaattacctggtggcatgcgggcccgatgattgttctgaactgtggctctggaacgttcagacaggagaactgagaacaaaaatgagccagtcccacgaggacagcttgactagcgtcgcctggaatcctgacggcaaacgatttgtgacaggtggacaaagaggccagttctaccagtgcgatctcgatggcaacttgcttgattcttgggagggagtgagagtccaatgtttgtggtgcctgagcgatggaaagactgtgttagccagcgatacgcaccaacggattaggggctacaattttgaagatttgacagatcggaacatcgtccaggaagaccatccaattatgtcgttcacgattagcaaaaacggccgcctcgcgcttctcaatgtggccacacaaggagtccacttatgggatctccaggatcgtgttctggtacgtaagtaccagggggtcacccagggcttttacaccattcatagctgtttcggcggtcataatgaagattttatcgctagtggatccgaggatcacaaggtctacatatggcataaacgatcagaactcccaattgcagaactgactgggcatactagaactgtgaactgtgtctcatggaacccgcagattccgtccatgatggcaagcgctagcgatgacggcacagtgagaatctggggccctgcaccatttatcgaccatcagaacattgaggaagagtgcagctctatggatagttag

SEQ ID NO: 218142 - DNA, 1545 bp, Artificial Sequence
  derived and/or modified sequence
atgcaggagagcggctgccgcctggagcaccccagcgccaccaagttcagaaatcatgtgatggagggggactgggacaaggcagaaaatgacctgaatgagctgaagcccctggtgcacagcccccacgccatcgtggtgcggggggccctggagatcagccagaccctgctgggcatcatcgtgaggatgaagttcctgctgctgcagcagaagtacctggagtacctggaggatggcaaggtgctggaggccctgcaggtgctgcgctgtgagctgacccccctgaagtacaacacagagcgcatccacgtgctgagcggctacctgatgtgcagccatgctgaggacctgcgggccaaggccgagtgggagggcaaaggaacagccagccgcagcaagctgctggacaagctgcagacctacctgccccccagcgtgatgctgcccccccggcggctgcagaccctgctgcggcaggccgtggagctgcagagggaccgctgcctgtaccacaacaccaagctggacaacaacctggacagcgtgtccctgctgattgaccacgtgtgcagccggcggcagttcccctgctacacccagcagatcctgacagagcactgcaatgaggtgtggttctgcaagttcagcaatgatggcaccaagctggccaccggcagcaaggacaccaccgtcatcatctggcaggtggaccctgacacccacctgctgaagctgctgaagaccctggagggccacgcctatggagtgtcctacatcgcctggagcccagatgacaactacctggtggcctgtggcccagatgactgcagcgagctgtggctgtggaatgtgcagacaggagagctgcggaccaagatgagccagagccatgaggacagcctgacctctgtggcctggaacccagatggcaagagatttgtgactggaggccagaggggccagttctaccagtgtgacctggatggcaacctgctggacagctgggagggcgtgcgggtgcagtgcctgtggtgcctgagtgatggcaagacagtgctggccagtgacacccaccagaggatccggggctacaactttgaggacctgacagacagaaatattgtgcaggaggaccaccccatcatgtccttcaccatcagcaagaatggccgcctggccctgctgaatgtggccacccagggcgtgcacctgtgggacctgcaggacagagtgctggtgaggaagtaccagggcgtgacccagggcttctacaccatccacagctgctttggaggccacaatgaagacttcatcgccagcggcagcgaggaccacaaggtgtacatctggcacaagaggtctgagctgcccatcgccgagctgaccggccacaccaggacagtgaactgtgtgtcctggaacccccagatccccagcatgatggccagcgccagtgatgatggcaccgtgcgcatctggggccctgcccccttcatcgaccaccagaacatcgaggaggagtgcagctccatggacagctag

SEQ ID NO: 218143 - DNA, 1986 bp, Artificial Sequence
  derived and/or modified sequence
atgcaggccaacggggccggcggcggcggcggcggcggcggcggcggcggcggcggcggcggcggcggcggcggccagggccagaccccagagctggcctgcctgagcgcccagaatggagagagcagccccagcagcagcagcagcgctggggacctggcccacgccaacggcctgctgcccagcgcccccagcgctgccagcaacaacagcaacagcctgaatgtgaacaacggggtgcctggaggagctgctgctgccagcagcgccaccgtggccgccgccagcgccaccacagctgccagcagcagcctggccaccccagagctgggcagcagcctgaagaagaagaagaggctgagccagagtgatgaagatgtgatccggctgattggccagcacctgaatggcctgggcctgaaccagacagtggacctgctgatgcaggagagcggctgccgcctggagcaccccagcgccaccaagttcaggaaccacgtgatggagggggactgggacaaggccgagaatgacctgaatgagctgaagcccctggtgcacagcccccacgccatcgtggtgcggggggccctggagatcagccagaccctgctgggcatcatcgtgaggatgaagttcctgctgctgcagcagaagtacctggagtacctggaggatggcaaggtgctggaggccctgcaggtgctgcgctgtgagctgacccccctgaagtacaacacagagcgcatccacgtgctgagcggctacctgatgtgcagccatgctgaggacctgcgggccaaggccgagtgggagggcaagggcacagccagccgcagcaagctgctggacaagctgcagacctacctgcccccatctgtgatgctgcccccccggcggctgcagaccctgctgcggcaggccgtggagctgcagagggaccgctgcctgtaccacaacaccaagctggacaacaacctggacagcgtgtccctgctgattgaccacgtgtgcagccggcggcagttcccctgctacacccagcagatcctgacagagcactgcaatgaggtgtggttctgcaagttcagcaatgatggcaccaagctggccaccggcagcaaggacaccaccgtcatcatctggcaggtggaccctgacacccacctgctgaagctgctgaagaccctggagggccacgcctacggcgtgtcctacatcgcctggagcccagatgacaactacctggtggcctgtggcccagatgactgcagcgagctgtggctgtggaatgtgcagacaggagagctgcggaccaagatgagccagagccatgaggacagcctgacctctgtggcctggaacccagatggcaagagatttgtgactggaggccagaggggccagttctaccagtgtgacctggatggcaacctgctggacagctgggagggcgtgcgggtgcagtgcctgtggtgcctgagtgatggcaagacagtgctggccagtgacacccaccagaggatccggggctacaactttgaggacctgacagacaggaacatcgtgcaggaggaccaccccatcatgtccttcaccatcagcaagaatggccgcctggccctgctgaatgtggccacccagggcgtgcacctgtgggacctgcaggacagagtgctggtgaggaagtaccagggcgtgacccagggcttctacaccatccacagctgcttcggcggccacaatgaagacttcatcgccagcggcagcgaggaccacaaggtgtacatctggcacaagaggtctgagctgcccatcgccgagctgaccggccacaccaggacagtgaactgtgtgtcctggaacccccagatccccagcatgatggccagcgccagtgatgatggcaccgtgcgcatctggggccctgcccccttcatcgaccaccagaacatcgaggaggagtgcagctccatggacagctag

SEQ ID NO: 218144 - DNA, 1545 bp, Artificial Sequence
  derived and/or modified sequence
atgcaggagagcggctgccggctggagcaccccagcgccaccaagttcaggaatcacgtcatggaaggcgactgggacaaagcagagaacgacttaaatgaactgaagcccctggttcactctccacacgctatagttgtccggggtgccctggaaatctcgcaaacgctcttagggattattgttagaatgaaatttttgttgctgcaacagaagtatttagaatatctggaggacgggaaggtgttagaggcccttcaggttctgcgctgcgagcttactccgctgaagtataacaccgagagaatccacgtgctgtccggctacctgatgtgtagccacgccgaagacctgagggctaaggccgagtgggaaggcaagggtactgcaagtcgatccaagcttctggacaaactgcagacttatctccctcccagcgtgatgcttccccctagacggctgcaaaccttgcttcgccaagccgtcgagctccagagagaccgttgtctctatcacaatactaagctggataacaatctggactccgtgtctctgctgatagaccatgtctgttcccgtcgccaatttccctgctacacccaacagatccttaccgagcactgtaacgaggtgtggttttgtaagtttagcaacgatggaaccaaactggcaactggaagcaaagatacaacagtgatcatctggcaggtggaccccgacacccatctgctcaagctacttaaaacgctagagggccatgcctacggcgtgtcatacatcgcttggagcccggacgacaattacctggtcgcatgcggccctgatgattgctcagaattgtggctgtggaacgttcagactggcgaactccgcacaaagatgtctcagagccacgaggattctctgacatctgtggcctggaatccggacggcaagaggttcgtgactggagggcagcgaggacaattctatcagtgtgatctcgacgggaaccttttggactcgtgggagggagtgcgcgttcagtgtctgtggtgtttgtccgacgggaaaaccgttctcgcatccgacacccaccaaagaatacggggatataacttcgaggacctgacagataggaacatcgtccaggaagatcatcccattatgtcatttactattagcaaaaatggcaggctggccttactaaacgtggcaacacagggggtgcatctgtgggacctccaagatagggttttggtgagaaagtatcagggagttacacagggtttctacacaatccactcttgcttcggcggacacaacgaggattttattgcatcgggcagcgaggatcacaaggtttacatttggcataaaagatctgagctgcccatcgcagagctgactgggcacacccggaccgtgaattgtgtatcctggaatccacagattccttctatgatggccagtgcaagcgatgatggaactgtgagaatctggggccctgccccttttatcgatcatcagaatattgaggaggagtgttcatccatggacagctag

SEQ ID NO: 218145 - DNA, 1986 bp, Artificial Sequence
  derived and/or modified sequence
atgcaggccaacggcgccggcggcggcggcggcggcggcggcggcgggggtggtggaggtggaggcggtgggggacagggtcagacccctgaactagcctgcctgtccgctcaaaacggagagagctctcccagtagctcttcttccgctggagacctggcgcacgctaatgggctgctccccagcgctccctctgccgccagtaataacagtaacagcctcaacgtgaataacggtgtccccggcggggccgccgccgcttcctcagctaccgtggcagcagcatcagccactaccgctgcttcatccagtctagctacaccagagctggggagctccctgaagaaaaaaaaacgcctctcgcaaagcgacgaagatgtcatccggctaatcgggcaacatctgaatggactgggccttaatcagacagtggacttgctcatgcaggaaagcggttgcaggctggaacacccttctgctacaaaattccggaaccatgtgatggagggcgactgggacaaggctgagaatgacctgaatgaacttaagcctttagtacactctccacatgccatcgtcgtgcgcggggcccttgaaatctcccagacacttctcggaatcattgtgcgcatgaagttcctgttgctccagcaaaagtacctagaatatctggaggatggcaaggttctggaggccctccaggtgttaagatgcgagctgacgcctctcaagtacaacaccgaacgcatacacgtcctatctgggtatctgatgtgcagccacgcagaggacctaagggctaaagccgaatgggaaggcaaaggtacagctagtcggagtaagctgcttgacaagttacagacatatttgcccccgtctgtaatgctgccccccagacgtctccaaaccttacttaggcaggccgtcgaactccagcgcgatagatgcctgtaccataataccaagctcgataataacttggacagtgtttccctcttgatcgatcacgtctgcagtaggaggcagttcccatgctacacacagcagattttaactgaacactgcaacgaggtgtggttttgcaaattctccaatgacggaactaaactcgccacgggaagtaaggacacaactgttatcatctggcaggttgatccagatactcatctgctcaaactgttaaaaactctggaaggtcatgcttatggcgtgtcatacatcgcgtggtctcctgacgataactatttagtggcatgcggacctgatgactgtagcgagctttggctgtggaatgttcaaacaggtgaactcagaaccaaaatgagtcaaagccacgaggattccctgacctccgtcgcctggaacccagacggcaagcgattcgttactggaggtcagcgaggtcagttttaccagtgcgatcttgacggcaatcttctggactcttgggaaggcgtgcgcgtgcagtgcttgtggtgcttgtccgatggaaagaccgtgctggcctccgatacccaccagcgcattcgtgggtacaattttgaggatctgacggaccgcaatatcgtgcaagaggaccatccaatcatgagcttcacgatcagtaagaacggccggcttgcattgctcaacgttgccactcaaggcgtgcacttgtgggatctgcaggaccgcgtgcttgtgcggaaataccagggtgtgacgcagggtttctacactatccactcttgtttcggcggtcacaatgaggattttatcgcgtctggcagcgaagatcacaaagtgtatatctggcacaaacgcagcgaattgcctattgccgaactcacgggccatacgcggacagtgaactgtgtgtcctggaacccccagattccttccatgatggcttcagccagtgacgatggcaccgtaaggatttgggggcccgcccctttcattgaccaccagaacatagaggaggagtgcagcagcatggacagttag

SEQ ID NO: 218146 - DNA, 6872 bp, Artificial Sequence
  derived and/or modified sequence
cggagggagtaggagagcccggggcttcggcaggcagagcaggcctctcccctccgtcctcgtcgtcctcgtcctcctcctcctcctcctcctccgtggtggtagtggtgggacttcccccggctgctgcccctcccgccgccgctgctgtcccccaccgaagtagcggccacagcctggtcagcggcagcatcatgcaggccaatggggcaggaggaggaggaggaggtggcggcggcggcggtggaggaggagggggcggcgggggccagggacagaccccggaactcgcctgcttgtcggcccagaacggggagtcgtccccctcgtcgtcgtcgtccgcgggggacctggcccacgccaatgggctcctgccttccgccccctccgccgccagcaacaatagcaacagcctgaatgtcaataacggggttcccggcggggcggccgccgcatcctcagccaccgtcgcagctgcctccgccaccaccgccgcctcctcttccttggccaccccagaactgggcagcagcctcaagaagaagaagcggctctcccagtcagatgaggatgtcattaggctaataggacagcacttgaatggcttagggctcaaccagactgttgatctcctcatgcaagagtcaggatgtcgtttagaacatccttctgctaccaaattccgaaatcatgtcatggaaggagactgggataaggcagaaaatgacctgaatgaactaaagcctttagtgcattctcctcatgctattgtggtaagaggcgcacttgaaatctctcaaacgttgttgggaataattgtgaggatgaagtttttgctgctgcagcagaagtacctagaatacctggaggatggcaaggtcctggaggcacttcaagttctacgctgtgaattgacgccgctgaaatacaatacagagcgcattcatgttcttagtgggtatctgatgtgtagccatgcagaagacctacgtgcaaaagcagaatgggaaggcaaagggacagcttcccgatctaaactattggataaacttcagacctatttaccaccatcagtgatgcttcccccacggcgtttacagactctcctgcggcaggcggtggaactacaaagggatcggtgcctatatcacaataccaaacttgataataatctagattctgtgtctctgcttatagaccatgtttgtagtaggaggcagttcccatgttatacgcagcagatacttacggagcattgtaatgaagtgtggttctgtaaattctctaatgatggcactaaactagcaacaggatcaaaagatacaacagttatcatatggcaagttgatccggatacacacctgctaaaactgcttaaaacattagaaggacatgcttatggcgtttcttatattgcatggagtccagatgacaactatcttgttgcttgtggcccagatgactgctctgagctttggctttggaatgtacaaacaggagaactaaggacaaaaatgagccagtctcatgaagacagtttgacaagtgtggcttggaatccagatgggaagcgctttgtgactggaggtcagcgtgggcagttctatcagtgtgacttagatggtaatctccttgactcctgggaaggggtaagagtgcaatgcctttggtgcttgagtgatggaaagactgttctggcatcagatacacaccagcgaattcggggctataacttcgaggaccttacagataggaacatagtacaagaagatcatcctattatgtcttttactatttcaaaaaatggccgattagctttgttaaatgtagcaactcagggagttcatttatgggacttgcaagacagagttttagtaagaaagtatcaaggtgttacacaagggttttatacaattcattcatgttttggaggccataatgaagacttcatcgctagtggcagtgaagatcacaaggtttacatctggcacaaacgtagtgaactgccaattgcggagctgacagggcacacacgtacagtaaactgtgtgagctggaacccacagattccatccatgatggccagcgcctcagatgatggcactgttagaatatggggaccagcaccttttatagaccaccagaatattgaagaggaatgcagtagcatggatagttgatggtgaatttggagcagacgacttctgtttaacttaaaattagtcgtattttaatggcttgggatttggtgcaaacaaacatgattgatagctggacagacatgctcgtcatgaaaaaagaaccatttctgaagcccgattggggccaaacatttacaccttgcttcatagtaaccagttgagatgaagcacgtcgttagaacgttgttggacaccatgttgaattattcccccatcggttgtgaagaactgtgctacattcaggcttacccattgaactcagtatatatatttttttccttcctgtcttttgtctggcaggataccattcttgttgctcttctgtgtaatgaagtttaaatgcttgtttggaaaactttatttaacagtttagaaggcttgatagaaagagtgcattagtctgaagagtatacattggataggaaagaatttccttcttttgtttctccaaatctttccgccttatttagcttgagatctttgcagcttggttcatggattctagccttgcccgttgcgcagtatatactgatccagatgataaaccagtgaactatgtcaaaagcactctcaatattacatttgacaaaaagttttgtacttttcacatagcttgttgccccgtaaaagggttaacagcacaattttttaaaaataaattaagaagtatttataggattaaagtgacttcatttgtatacatttggaatctaaaccagcttaaaaacagtttcctcaatgacttagatacacagtataactgatgctcttctggaataccacatgagacatggtcagaaacagtgcttggaaggacattacacaagaaattcagagtaatgctttgaagatttccccccttttgttttattcctgaaggaacatcagtacccgatcttgaagaaattcaagattcaaaaagaattttaaatacaccaacatgagacatcagtagtcagttggttttcagtaaagcttgttccaagttgttctcaacttaggaagtaattttggtgtgatctagcaaaagagtaggaatcagcgatacaaccactttggaagtttatagtataattgaaattattagaagaattcagcaggttacagacatacttaaactgggattaaaacctcatagtcatttttcttaattgcccttaatattttgacatatagggatacataaatttaaagaatattttttctcagttttttcagatattgccatactgaacctcattctaaactggtgctgtggatagtctttccctctcccctcctgttttagtttaaggaaaggtttccttcatggaaaagcacttttaattttgagaatttcacatttaaaataagccaaaagcctgatgttcacattgtgcttttaaactccgtaacagctgaatacaacataacatagtctcccttgaaattccctccctttttcagtagaggataaatagggtgactccagctgttggaatgagaatggggatacccccaaaataagattctggtgaagaaaaagtcttgtactaagttcccctttaggtgtagccaagtctataatataattatgatcatgaatagactccagaatccacaaagagaagagggcttggatgtcaaaaattcttccattgtggggtaggtggtcggggatgggagaaagggaaaagtcagggaaggggagaagaaagaaaaacacatttggccttaaaatagcatgcattctcccagaagcccatagtaaagaaaatgacagatcgtggtcagcagactcttatcaaattggtatgtaaaagatttcttcaagctccattttgcagagaccaccacttagagaatcaaaaaattcctgttttgatacttctaagttaaaatatatgttacagtttatctggtacttcatttttcttaactaaaattactttttactttaagcttgaataaaaatcttcattggtaactgtatgtaattaagtggcaacttctctttacctcagtatagttaaaaaccattcatattttaagtgattcatgtataccctgaagccgttaatacaccccagtctctatggtaacatcactaaatgtgggcatagaaactccacagctgtttacaaatttggttacagtgtgctacggtgcatttgtaacactcagatttgtgcccattcaggggcaatttggcactcagattctactctacttcacctaaccacccctagatctgagttttcagagtgcttctgaagtacagtttaaaaacactttttaaaaagtggagtaaaagtgaggcacattttacaagaacataactcctattaaaacggagtaacaactatgcaaaggtttctatagcagctaggtgagtttgttttccgggtctgtcttaactggcagcttcctgtacatactggtacttatttgctgtaaacgtctgtttcatacatttgccatgcagtgactgtgctcgaaaggtgaaatcaatggtaaagaagcctaggattttatggtatgagaaactgatcgcaggattttctgatccatagctattaattgaaaacttctgatagtgctgtaggctctatagtaggcttaagagtgagtcttatactatgaagccagccacaagatactaacaaatgtataaattgaaaagtaccaatactttttgcacatagatcaaaatagagtggagaatttgggctccaaaaatcaggttagtaggctcatttccatgtgcttaaaaatgtttttgttgttatgcattgattaagggctagagcaaatataaaattaaatgtctttttcctccaaataattggttattaatggtaaaatgttggacttggggattactgagattagtatgtgggtagtaaagaattggagtgggagttagtggggagggatgacaaagcttcagctttggtttttgtatttttttagtcttcataacagctacatttctgttgctcttattggccagataaatgtgttatattaaaccaggtaagtattttaaacagagaacattttatttgcatatatccctacaaattggcccattttattgggtggggggataaaaaagggattccctaactttaaataatcagaatatcctgcaattgaaaggagaaaaaaatccaattttgtcagtattttcttagtctgaaaaaaacagcagtagtaatctggtgaatgttattattaggagtgttctgcctctacagtggcatattccatgacattaatagaaaacccttctttcccacccctccccatcttgacattttcttttttaggatgttggttcctgcaaacaagaactgaccctatcacctctgcctcacagtgggtaaatatatcatacatctcttgaaagggaaaatatccatgtcagtttctttcacagtagaagaatggctgcttttgaatggggaggaaagaagacatttttcttaatatcctttttgtcccatctctaaaatgtataaatattttgatttggttttactttaatttctcattcataatttcgcaactgtccttttgggttgccctccaacacattacttccatttcagaaaccatatctgatttaatataaactgctaacttaagaagaggtgaatttgcatttacacttagacactttctaaaaacagggtgaacttaattgaaatttttcagtgttgttaagctattgttatagtagctgccctatagttacaaaaataaaaactataaaaacccatcccctatctacttaatccagatagcctggatttaacaaaaccaatagtataaaaatgtgtgtgtgtgttctgtgtgtgtgtgagagagagagtacttgattcattaaaaagtcctggaaacagctgttctaggatcttgtcatttttactgaaagtctcgtgcacatgtgaagtgccctctgagtttaaggtttggttaatactggtatatttttataagattgaaattgtgtccccatctttaacttaaacattttcattatcagggtcaatgtgctagaactgaattgtaacatttttaggcacagatggaaaaaaatgttattggctccttgaaaatgtgtgtgtgtggcgaggggaatagatccacaaaagcatgtatgtacttacaaaccaagctgtagagatcaagaaaagaacttaagtgttgatctcaagatttctaaattgtcaagatttacatggcattgtggtggaactagttaacacttagagcttttggtatgtaataactatttgctatggactgattaaatgtttcaaaagattgtgttcttcaattttggtgggttttgatttttgtttttttaactgcctctcagattatatttacttagtttaaatttctttgctttattcattaaagtataaaaacttcaggtctctgatatttattttcacttgtttactaattatttacaaaacaccctttgttgacttttattttataaatgtgtaatgtattaaacgtctttaaatttttgttcaactgaaactacattaactttgatttgctttactgggatttttttttaaagacactttttccatgtcagtgcgcagcacttaaccagtcgtttgtattccctttctttcaatccaataaacagaatgaatacctaaataa

SEQ ID NO: 218147 - DNA, 1545 bp, Artificial Sequence
  derived and/or modified sequence
atgcaggagagtgggtgccgtttagaacacccatctgctaccaaatttcgcaaccacgtcatggagggtgactgggataaagctgaaaatgatttaaatgaacttaagccactcgttcattccccccatgccatcgtggtcagaggggcactcgaaatatctcagacacttctggggatcattgttaggatgaaatttctcttgctccagcaaaagtatctcgaatacctagaggacgggaaggtcctcgaagcgctgcaggtgctcagatgtgagctcactccccttaaatacaacacagagcggatccatgtccttagtggttatttaatgtgctcccatgctgaagacctgagggccaaagctgagtgggaaggtaagggtaccgcctcgcggtctaaactgcttgacaagctgcagacctatctgccaccaagcgtgatgctcccacctagacgtctgcaaacacttctgaggcaggcagtcgaactgcagcgcgatcggtgtttgtatcataacactaagttggataataatctggactcggtttccttgctcattgatcatgtatgtagtagacgacagtttccctgttatacgcagcagatcctcacagagcactgtaacgaggtttggttctgtaaatttagtaacgatgggaccaagctggccactgggtcaaaggacactaccgttattatttggcaagtcgacccagacacacacctgctgaagcttctgaagacactcgagggccacgcatatggggtgtcttatatcgcctggagtcccgacgataattacttggtggcctgcggacctgacgattgtagcgaactgtggttgtggaatgtgcagactggagagctgcgaacgaagatgtctcagagccacgaagacagcttgaccagcgtggcttggaacccagatggaaaaagattcgtcaccggcggtcaaaggggccaattttatcagtgcgacctcgatgggaatcttctggacagttgggagggtgtacgcgtccagtgtttgtggtgtcttagcgacgggaaaaccgtgcttgcgagtgacacgcaccagcgtatccggggttacaatttcgaggacctcactgatagaaacatcgtacaggaagatcacccgattatgtccttcacaatttccaagaatggccgtctggcgctgcttaacgtcgctactcagggagttcacttgtgggacttacaggacagggtacttgtcagaaagtaccagggcgtgacacaaggattctacacgatccacagttgtttcggaggccacaatgaggacttcattgccagcggtagcgaagatcacaaggtgtatatctggcacaaaaggtctgagttgcccatcgcggagcttaccggtcatactaggacggtgaattgcgttagttggaacccccagattccaagcatgatggcttcagcctctgatgatggcactgtgcggatatgggggccagcccctttcattgatcaccaaaatatcgaagaagagtgttcctcaatggactcatag

SEQ ID NO: 218148 - DNA, 1986 bp, Artificial Sequence
  derived and/or modified sequence
atgcaggccaatggtgctggagggggaggaggaggcggaggaggcggaggaggtggtggagggggtgggggaggtcaaggacaaactccagagttggcttgcctatctgcgcagaatggagaatctagcccaagcagctcttctagtgctggcgatcttgcacatgctaatggcttgctgccctcggccccaagtgccgcaagcaacaatagcaatagtttaaatgttaacaatggcgtccctggcggtgcagctgcagccagctccgccacggtggctgcagctagcgcaaccaccgctgccagcagctccttagccacacctgaactcggatcttccctcaagaagaagaaacggttaagtcagtccgatgaggacgtgatacgcctgattggacagcatcttaatggcctgggtctgaatcagaccgtggacttgctgatgcaggagagtgggtgtcgactcgagcatccctccgccactaagtttcggaatcacgtgatggaaggggactgggacaaagccgagaatgatctaaatgaactgaaacccctggtgcactcgccccacgccattgtggtcaggggcgcacttgaaatctcccagacactgctgggtattattgtgcggatgaagtttctgcttctgcagcagaagtacctcgagtatctggaggacggaaaagtcctcgaagccctgcaggtcctcaggtgtgaactaacacctctcaagtacaatacagaaagaattcacgtcctgtccgggtatctgatgtgcagccacgcagaggatctccgggctaaggctgagtgggagggtaagggaacagcctcccgctccaagctgctggataagctccagacatatctcccaccgtcggtgatgcttcccccaagacgcctgcaaacactgctgaggcaggccgttgaacttcagcgcgatagatgcctctaccacaacaccaagctcgacaacaatcttgattccgtgtccctgctaattgaccatgtatgttcacgacgtcagtttccatgctatactcagcagattctgactgagcattgtaacgaggtctggttctgtaagttttccaatgatggcactaaattagcgaccggttctaaagacacaacagtcatcatatggcaggtcgaccccgacactcacttactcaaactgctgaagacactcgaaggacacgcctatggggtgagctatattgcctggtccccagacgataattatctggtggcctgcggacccgatgactgttccgagctctggctgtggaacgtgcaaactggcgaactgcggacgaagatgtcacaatcacacgaagactccctcaccagtgtggcatggaaccccgacggcaagagattcgtgaccggcggacagagggggcagttctaccagtgcgaccttgatggtaacctgctggacagctgggagggggtgagagtgcagtgcctgtggtgccttagcgatggaaaaacagtgctggctagcgatacacaccagaggattagagggtacaattttgaggacctaaccgaccgaaatatcgtacaagaagatcaccctatcatgagttttaccatttccaagaatggtagattggccctcctgaatgtagcgacacagggggtgcacctttgggacttgcaagacagagtacttgttagaaagtaccagggcgttacacaggggttttataccatccactcttgttttgggggtcacaacgaggacttcattgcatctggctctgaggatcataaagtgtacatttggcacaagcgcagcgaactgcccatcgccgaattgactggacacaccagaacagtgaattgcgtgtcctggaatccacaaatcccgagtatgatggcatcggcctccgatgacggcactgttcgcatttgggggcctgcaccctttattgaccaccagaacatcgaagaagagtgctcctcaatggacagctag

SEQ ID NO: 218149 - DNA, 6866 bp, Artificial Sequence
  derived and/or modified sequence
cggagggagtaggagagcccggggcttcggcaggcagagcaggcctctcccctccgtcctcgtcgtcctcgtcctcctcctcctcctcctcctccgtggtggtagtggtgggacttcccccggctgctgcccctcccgccgccgctgctgtcccccaccgaagtagcggccacagcctggtcagcggcagcatcatgcaggccaatggggcaggaggaggaggaggaggtggcggcggcggcggtggaggaggagggggcggcgggggccagggacagaccccggaactcgcctgcttgtcggcccagaacggggagtcgtccccctcgtcgtcgtcgtccgcgggggacctggcccacgccaatgggctcctgccttccgccccctccgccgccagcaacaatagcaacagcctgaatgtcaataacggggttcccggcggggcggccgccgcatcctcagccaccgtcgcagctgcctccgccaccaccgccgcctcctcttccttggccaccccagaactgggcagcagcctcaagaagaagaagcggctctcccagtcagatgaggatgtcattaggctaataggacagcacttgaatggcttagggctcaaccagactgttgatctcctcatgcaagagtcaggatgtcgtttagaacatccttctgctaccaaattccgaaatcatgtcatggaaggagactgggataaggcagaaaatgacctgaatgaactaaagcctttagtgcattctcctcatgctattgtggtaagaggcgcacttgaaatctctcaaacgttgttgggaataattgtgaggatgaagtttttgctgctgcagcagaagtacctagaatacctggaggatggcaaggtcctggaggcacttcaagttctacgctgtgaattgacgccgctgaaatacaatacagagcgcattcatgttcttagtgggtatctgatgtgtagccatgcagaagacctacgtgcaaaagcagaatgggaaggcaaagggacagcttcccgatctaaactattggataaacttcagacctatttaccaccatcagtgatgcttcccccacggcgtttacagactctcctgcggcaggcggtggaactacaaagggatcggtgcctatatcacaataccaaacttgataataatctagattctgtgtctctgcttatagaccatgtttgtagtaggaggcagttcccatgttatacgcagcagatacttacggagcattgtaatgaagtgtggttctgtaaattctctaatgatggcactaaactagcaacaggatcaaaagatacaacagttatcatatggcaagttgatccggatacacacctgctaaaactgcttaaaacattagaaggacatgcttatggcgtttcttatattgcatggagtccagatgacaactatcttgttgcttgtggcccagatgactgctctgagctttggctttggaatgtacaaacaggagaactaaggacaaaaatgagccagtctcatgaagacagtttgacaagtgtggcttggaatccagatgggaagcgctttgtgactggaggtcagcgtgggcagttctatcagtgtgacttagatggtaatctccttgactcctgggaaggggtaagagtgcaatgcctttggtgcttgagtgatggaaagactgttctggcatcagatacacaccagcgaattcggggctataacttcgaggaccttacagataggaacatagtacaagaagatcatcctattatgtcttttactatttcaaaaaatggccgattagctttgttaaatgtagcaactcagggagttcatttatgggacttgcaagacagagttttagtaagaaagtatcaaggtgttacacaagggttttatacaattcattcatgttttggaggccataatgaagacttcatcgctagtggcagtgaagatcacaaggtttacatctggcacaaacgtagtgaactgccaattgcggagctgacagggcacacacgtacagtaaactgtgtgagctggaacccacagattccatccatgatggccagcgcctcagatgatggcactgttagaatatggggaccagcaccttttatagaccaccagaatattgaagaggaatgcagtagcatggatagttgatggtgaatttggagcagacgacttctgtttaacttaaaattagtcgtattttaatggcttgggatttggtgcaaacaaacatgattgatagctggacagacatgctcgtcatgaaaaaagaaccatttctgaagcccgattggggccaaacatttacaccttgcttcatagtaaccagttgagatgaagcacgtcgttagaacgttgttggacaccatgttgaattattcccccatcggttgtgaagaactgtgctacattcaggcttacccattgaactcagtatatatatttttttccttcctgtcttttgtctggcaggataccattcttgttgctcttctgtgtaatgaagtttaaatgcttgtttggaaaactttatttaacagtttagaaggcttgatagaaagagtgcattagtctgaagagtatacattggataggaaagaatttccttcttttgtttctccaaatctttccgccttatttagcttgagatctttgcagcttggttcatggattctagccttgcccgttgcgcagtatatactgatccagatgataaaccagtgaactatgtcaaaagcactctcaatattacatttgacaaaaagttttgtacttttcacatagcttgttgccccgtaaaagggttaacagcacaattttttaaaaataaattaagaagtatttataggattaaagtgacttcatttgtatacatttggaatctaaaccagcttaaaaacagtttcctcaatgacttagatacacagtataactgatgctcttctggaataccacatgagacatggtcagaaacagtgcttggaaggacattacacaagaaattcagagtaatgctttgaagatttccccccttttgttttattcctgaaggaacatcagtacccgatcttgaagaaattcaagattcaaaaagaattttaaatacaccaacatgagacatcagtagtcagttggttttcagtaaagcttgttccaagttgttctcaacttaggaagtaattttggtgtgatctagcaaaagagtaggaatcagcgatacaaccactttggaagtttatagtataattgaaattattagaagaattcagcaggttacagacatacttaaactgggattaaaacctcatagtcatttttcttaattgcccttaatattttgacatatagggatacataaatttaaagaatattttttctcagttttttcagatattgccatactgaacctcattctaaactggtgctgtggatagtctttccctctcccctcctgttttagtttaaggaaaggtttccttcatggaaaagcacttttaattttgagaatttcacatttaaaataagccaaaagcctgatgttcacattgtgcttttaaactccgtaacagctgaatacaacataacatagtctcccttgaaattccctccctttttcagtagaggataaatagggtgactccagctgttggaatgagaatggggatacccccaaaataagattctggtgaagaaaaagtcttgtactaagttcccctttaggtgtagccaagtctataatataattatgatcatgaatagactccagaatccacaaagagaagagggcttggatgtcaaaaattcttccattgtggggtaggtggtcggggatgggagaaagggaaaagtcagggaaggggagaagaaagaaaaacacatttggccttaaaatagcatgcattctcccagaagcccatagtaaagaaaatgacagatcgtggtcagcagactcttatcaaattggtatgtaaaagatttcttcaagctccattttgcagagaccaccacttagagaatcaaaaaattcctgttttgatacttctaagttaaaatatatgttacagtttatctggtacttcatttttcttaactaaaattactttttactttaagcttgaataaaaatcttcattggtaactgtatgtaattaagtggcaacttctctttacctcagtatagttaaaaaccattcatattttaagtgattcatgtataccctgaagccgttaatacaccccagtctctatggtaacatcactaaatgtgggcatagaaactccacagctgtttacaaatttggttacagtgtgctacggtgcatttgtaacactcagatttgtgcccattcaggggcaatttggcactcagattctactctacttcacctaaccacccctagatctgagttttcagagtgcttctgaagtacagtttaaaaacactttttaaaaagtggagtaaaagtgaggcacattttacaagaacataactcctattaaaacggagtaacaactatgcaaaggtttctatagcagctaggtgagtttgttttccgggtctgtcttaactggcagcttcctgtacatactggtacttatttgctgtaaacgtctgtttcatacatttgccatgcagtgactgtgctcgaaaggtgaaatcaatggtaaagaagcctaggattttatggtatgagaaactgatcgcaggattttctgatccatagctattaattgaaaacttctgatagtgctgtaggctctatagtaggcttaagagtgagtcttatactatgaagccagccacaagatactaacaaatgtataaattgaaaagtaccaatactttttgcacatagatcaaaatagagtggagaatttgggctccaaaaatcaggttagtaggctcatttccatgtgcttaaaaatgtttttgttgttatgcattgattaagggctagagcaaatataaaattaaatgtctttttcctccaaataattggttattaatggtaaaatgttggacttggggattactgagattagtatgtgggtagtaaagaattggagtgggagttagtggggagggatgacaaagcttcagctttggtttttgtatttttttagtcttcataacagctacatttctgttgctcttattggccagataaatgtgttatattaaaccaggtaagtattttaaacagagaacattttatttgcatatatccctacaaattggcccattttattgggtggggggataaaaaagggattccctaactttaaataatcagaatatcctgcaattgaaaggagaaaaaaatccaattttgtcagtattttcttagtctgaaaaaaacagcagtagtaatctggtgaatgttattattaggagtgttctgcctctacagtggcatattccatgacattaatagaaaacccttctttcccacccctccccatcttgacattttcttttttaggatgttggttcctgcaaacaagaactgaccctatcacctctgcctcacagtgggtaaatatatcatacatctcttgaaagggaaaatatccatgtcagtttctttcacagtagaagaatggctgcttttgaatggggaggaaagaagacatttttcttaatatcctttttgtcccatctctaaaatgtataaatattttgatttggttttactttaatttctcattcataatttcgcaactgtccttttgggttgccctccaacacattacttccatttcagaaaccatatctgatttaatataaactgctaacttaagaagaggtgaatttgcatttacacttagacactttctaaaaacagggtgaacttaattgaaatttttcagtgttgttaagctattgttatagtagctgccctatagttacaaaaataaaaactataaaaacccatcccctatctacttaatccagatagcctggatttaacaaaaccaatagtataaaaatgtgtgtgtgtgttctgtgtgtgtgtgagagagagagtacttgattcattaaaaagtcctggaaacagctgttctaggatcttgtcatttttactgaaagtctcgtgcacatgtgaagtgccctctgagtttaaggtttggttaatactggtatatttttataagattgaaattgtgtccccatctttaacttaaacattttcattatcagggtcaatgtgctagaactgaattgtaacatttttaggcacagatggaaaaaaatgttattggctccttgaaaatgtgtgtgtgtggcgaggggaatagatccacaaaagcatgtatgtacttacaaaccaagctgtagagatcaagaaaagaacttaagtgttgatctcaagatttctaaattgtcaagatttacatggcattgtggtggaactagttaacacttagagcttttggtatgtaataactatttgctatggactgattaaatgtttcaaaagattgtgttcttcaattttggtgggttttgatttttgtttttttaactgcctctcagattatatttacttagtttaaatttctttgctttattcattaaagtataaaaacttcaggtctctgatatttattttcacttgtttactaattatttacaaaacaccctttgttgacttttattttataaatgtgtaatgtattaaacgtctttaaatttttgttcaactgaaactacattaactttgatttgctttactgggatttttttttaaagacactttttccatgtcagtgcgcagcacttaaccagtcgtttgtattccctttctttcaatccaataaacagaatgaatacct

SEQ ID NO: 218150 - DNA, 1545 bp, Artificial Sequence
  derived and/or modified sequence
atgcaggagagcggctgcagactggagcaccccagcgccaccaagttcagaaaccacgtgatggagggcgactgggacaaggccgagaacgacctgaacgagctgaagcccctggtgcacagcccccacgccatcgtggtgagaggcgccctggagatcagccagaccctgctgggcatcatcgtgagaatgaagttcctgctgctgcagcagaagtacctggagtacctggaggacggcaaggtgctggaggccctgcaggtgctgagatgcgagctgacccccctgaagtacaacaccgagagaatccacgtgctgagcggctacctgatgtgcagccacgccgaggacctgagagccaaggccgagtgggagggcaagggcaccgccagcagaagcaagctgctggacaagctgcagacctacctgccccccagcgtgatgctgccccccagaagactgcagaccctgctgagacaggccgtggagctgcagagagacagatgcctgtaccacaacaccaagctggacaacaacctggacagcgtgagcctgctgatcgaccacgtgtgcagcagaagacagttcccctgctacacccagcagatcctgaccgagcactgcaacgaggtgtggttctgcaagttcagcaacgacggcaccaagctggccaccggcagcaaggacaccaccgtgatcatctggcaggtggaccccgacacccacctgctgaagctgctgaagaccctggagggccacgcctacggcgtgagctacatcgcctggagccccgacgacaactacctggtggcctgcggccccgacgactgcagcgagctgtggctgtggaacgtgcagaccggcgagctgagaaccaagatgagccagagccacgaggacagcctgaccagcgtggcctggaaccccgacggcaagagattcgtgaccggcggccagagaggccagttctaccagtgcgacctggacggcaacctgctggacagctgggagggcgtgagagtgcagtgcctgtggtgcctgagcgacggcaagaccgtgctggccagcgacacccaccagagaatcagaggctacaacttcgaggacctgaccgacagaaacatcgtgcaggaggaccaccccatcatgagcttcaccatcagcaagaacggcagactggccctgctgaacgtggccacccagggcgtgcacctgtgggacctgcaggacagagtgctggtgagaaagtaccagggcgtgacccagggcttctacaccatccacagctgcttcggcggccacaacgaggacttcatcgccagcggcagcgaggaccacaaggtgtacatctggcacaagagaagcgagctgcccatcgccgagctgaccggccacaccagaaccgtgaactgcgtgagctggaacccccagatccccagcatgatggccagcgccagcgacgacggcaccgtgagaatctggggccccgcccccttcatcgaccaccagaacatcgaggaggagtgcagcagcatggacagctag

SEQ ID NO: 218151 - protein, 1263 aa, Artificial Sequence
  derived and/or modified sequence
MPARIGYYEIDRTIGKGNFAVVKRATHLVTKAKVAIKIIDKTQLDEENLKKIFREVQIMKMLCHPHIIRLYQVMETERMIYLVTEYASGGEIFDHLVAHGRMAEKEARRKFKQIVTAVYFCHCRNIVHRDLKAENLLLDANLNIKIADFGFSNLFTPGQLLKTWCGSPPYAAPELFEGKEYDGPKVDIWSLGVVLYVLVCGALPFDGSTLQNLRARVLSGKFRIPFFMSTECEHLIRHMLVLDPNKRLSMEQICKHKWMKLGDADPNFDRLIAECQQLKEERQVDPLNEDVLLAMEDMGLDKEQTLQSLRSDAYDHYSAIYSLLCDRHKRHKTLRLGALPSMPRALAFQAPVNIQAEQAGTAMNISVPQVQLINPENQIVEPDGTLNLDSDEGEEPSPEALVRYLSMRRHTVGVADPRTEVMEDLQKLLPGFPGVNPQAPFLQVAPNVNFMHNLLPMQNLQPTGQLEYKEQSLLQPPTLQLLNGMGPLGRRASDGGANIQLHAQQLLKRPRGPSPLVTMTPAVPAVTPVDEESSDGEPDQEAVQSSTYKDSNTLHLPTERFSPVRRFSDGAASIQAFKAHLEKMGNNSSIKQLQQECEQLQKMYGGQIDERTLEKTQQQHMLYQQEQHHQILQQQIQDSICPPQPSPPLQAACENQPALLTHQLQRLRIQPSSPPPNHPNNHLFRQPSNSPPPMSSAMIQPHGAASSSQFQGLPSRSAIFQQQPENCSSPPNVALTCLGMQQPAQSQQVTIQVQEPVDMLSNMPGTAAGSSGRGISISPSAGQMQMQHRTNLMATLSYGHRPLSKQLSADSAEAHSLNVNRFSPANYDQAHLHPHLFSDQSRGSPSSYSPSTGVGFSPTQALKVPPLDQFPTFPPSAHQQPPHYTTSALQQALLSPTPPDYTRHQQVPHILQGLLSPRHSLTGHSDIRLPPTEFAQLIKRQQQQRQQQQQQQQQQEYQELFRHMNQGDAGSLAPSLGGQSMTERQALSYQNADSYHHHTSPQHLLQIRAQECVSQASSPTPPHGYAHQPALMHSESMEEDCSCEGAKDGFQDSKSSSTLTKGCHDSPLLLSTGGPGDPESLLGTVSHAQELGIHPYGHQPTAAFSKNKVPSREPVIGNCMDRSSPGQAVELPDHNGLGYPARPSVHEHHRPRALQRHHTIQNSDDAYVQLDNLPGMSLVAGKALSSARMSDAVLSQSSLMGSQQFQDGENEECGASLGGHEHPDLSDGSQHLNSSCYPSTCITDILLSYKHPEVSFSMEQAGV

SEQ ID NO: 218152 - protein, 1321 aa, Artificial Sequence
  derived and/or modified sequence
MAAAAASGAGGAAGAGTGGAGPAGRLLPPPAPGSPAAPAAVSPAAGQPRPPAPASRGPMPARIGYYEIDRTIGKGNFAVVKRATHLVTKAKVAIKIIDKTQLDEENLKKIFREVQIMKMLCHPHIIRLYQVMETERMIYLVTEYASGGEIFDHLVAHGRMAEKEARRKFKQIVTAVYFCHCRNIVHRDLKAENLLLDANLNIKIADFGFSNLFTPGQLLKTWCGSPPYAAPELFEGKEYDGPKVDIWSLGVVLYVLVCGALPFDGSTLQNLRARVLSGKFRIPFFMSTECEHLIRHMLVLDPNKRLSMEQICKHKWMKLGDADPNFDRLIAECQQLKEERQVDPLNEDVLLAMEDMGLDKEQTLQSLRSDAYDHYSAIYSLLCDRHKRHKTLRLGALPSMPRALAFQAPVNIQAEQAGTAMNISVPQVQLINPENQIVEPDGTLNLDSDEGEEPSPEALVRYLSMRRHTVGVADPRTEVMEDLQKLLPGFPGVNPQAPFLQVAPNVNFMHNLLPMQNLQPTGQLEYKEQSLLQPPTLQLLNGMGPLGRRASDGGANIQLHAQQLLKRPRGPSPLVTMTPAVPAVTPVDEESSDGEPDQEAVQSSTYKDSNTLHLPTERFSPVRRFSDGAASIQAFKAHLEKMGNNSSIKQLQQECEQLQKMYGGQIDERTLEKTQQQHMLYQQEQHHQILQQQIQDSICPPQPSPPLQAACENQPALLTHQLQRLRIQPSSPPPNHPNNHLFRQPSNSPPPMSSAMIQPHGAASSSQFQGLPSRSAIFQQQPENCSSPPNVALTCLGMQQPAQSQQVTIQVQEPVDMLSNMPGTAAGSSGRGISISPSAGQMQMQHRTNLMATLSYGHRPLSKQLSADSAEAHSLNVNRFSPANYDQAHLHPHLFSDQSRGSPSSYSPSTGVGFSPTQALKVPPLDQFPTFPPSAHQQPPHYTTSALQQALLSPTPPDYTRHQQVPHILQGLLSPRHSLTGHSDIRLPPTEFAQLIKRQQQQRQQQQQQQQQQEYQELFRHMNQGDAGSLAPSLGGQSMTERQALSYQNADSYHHHTSPQHLLQIRAQECVSQASSPTPPHGYAHQPALMHSESMEEDCSCEGAKDGFQDSKSSSTLTKGCHDSPLLLSTGGPGDPESLLGTVSHAQELGIHPYGHQPTAAFSKNKVPSREPVIGNCMDRSSPGQAVELPDHNGLGYPARPSVHEHHRPRALQRHHTIQNSDDAYVQLDNLPGMSLVAGKALSSARMSDAVLSQSSLMGSQQFQDGENEECGASLGGHEHPDLSDGSQHLNSSCYPSTCITDILLSYKHPEVSFSMEQAGV

SEQ ID NO: 218153 - DNA, 3966 bp, Artificial Sequence
  derived and/or modified sequence
atggccgccgccgccgccagcggcgccggcggcgccgccggcgccggcaccggcggcgccggccccgccggcagactgctgcccccccccgcccccggcagccccgccgcccccgccgccgtgagccccgccgccggccagcccagaccccccgcccccgccagcagaggccccatgcccgccagaatcggctactacgagatcgacagaaccatcggcaagggcaacttcgccgtggtgaagagagccacccacctggtgaccaaggccaaggtggccatcaagatcatcgacaagacccagctggacgaggagaacctgaagaagatcttcagagaggtgcagatcatgaagatgctgtgccacccccacatcatcagactgtaccaggtgatggagaccgagagaatgatctacctggtgaccgagtacgccagcggcggcgagatcttcgaccacctggtggcccacggcagaatggccgagaaggaggccagaagaaagttcaagcagatcgtgaccgccgtgtacttctgccactgcagaaacatcgtgcacagagacctgaaggccgagaacctgctgctggacgccaacctgaacatcaagatcgccgacttcggcttcagcaacctgttcacccccggccagctgctgaagacctggtgcggcagccccccctacgccgcccccgagctgttcgagggcaaggagtacgacggccccaaggtggacatctggagcctgggcgtggtgctgtacgtgctggtgtgcggcgccctgcccttcgacggcagcaccctgcagaacctgagagccagagtgctgagcggcaagttcagaatccccttcttcatgagcaccgagtgcgagcacctgatcagacacatgctggtgctggaccccaacaagagactgagcatggagcagatctgcaagcacaagtggatgaagctgggcgacgccgaccccaacttcgacagactgatcgccgagtgccagcagctgaaggaggagagacaggtggaccccctgaacgaggacgtgctgctggccatggaggacatgggcctggacaaggagcagaccctgcagagcctgagaagcgacgcctacgaccactacagcgccatctacagcctgctgtgcgacagacacaagagacacaagaccctgagactgggcgccctgcccagcatgcccagagccctggccttccaggcccccgtgaacatccaggccgagcaggccggcaccgccatgaacatcagcgtgccccaggtgcagctgatcaaccccgagaaccagatcgtggagcccgacggcaccctgaacctggacagcgacgagggcgaggagcccagccccgaggccctggtgagatacctgagcatgagaagacacaccgtgggcgtggccgaccccagaaccgaggtgatggaggacctgcagaagctgctgcccggcttccccggcgtgaacccccaggcccccttcctgcaggtggcccccaacgtgaacttcatgcacaacctgctgcccatgcagaacctgcagcccaccggccagctggagtacaaggagcagagcctgctgcagccccccaccctgcagctgctgaacggcatgggccccctgggcagaagagccagcgacggcggcgccaacatccagctgcacgcccagcagctgctgaagagacccagaggccccagccccctggtgaccatgacccccgccgtgcccgccgtgacccccgtggacgaggagagcagcgacggcgagcccgaccaggaggccgtgcagagcagcacctacaaggacagcaacaccctgcacctgcccaccgagagattcagccccgtgagaagattcagcgacggcgccgccagcatccaggccttcaaggcccacctggagaagatgggcaacaacagcagcatcaagcagctgcagcaggagtgcgagcagctgcagaagatgtacggcggccagatcgacgagagaaccctggagaagacccagcagcagcacatgctgtaccagcaggagcagcaccaccagatcctgcagcagcagatccaggacagcatctgccccccccagcccagcccccccctgcaggccgcctgcgagaaccagcccgccctgctgacccaccagctgcagagactgagaatccagcccagcagccccccccccaaccaccccaacaaccacctgttcagacagcccagcaacagccccccccccatgagcagcgccatgatccagccccacggcgccgccagcagcagccagttccagggcctgcccagcagaagcgccatcttccagcagcagcccgagaactgcagcagcccccccaacgtggccctgacctgcctgggcatgcagcagcccgcccagagccagcaggtgaccatccaggtgcaggagcccgtggacatgctgagcaacatgcccggcaccgccgccggcagcagcggcagaggcatcagcatcagccccagcgccggccagatgcagatgcagcacagaaccaacctgatggccaccctgagctacggccacagacccctgagcaagcagctgagcgccgacagcgccgaggcccacagcctgaacgtgaacagattcagccccgccaactacgaccaggcccacctgcacccccacctgttcagcgaccagagcagaggcagccccagcagctacagccccagcaccggcgtgggcttcagccccacccaggccctgaaggtgccccccctggaccagttccccaccttcccccccagcgcccaccagcagcccccccactacaccaccagcgccctgcagcaggccctgctgagccccaccccccccgactacaccagacaccagcaggtgccccacatcctgcagggcctgctgagccccagacacagcctgaccggccacagcgacatcagactgccccccaccgagttcgcccagctgatcaagagacagcagcagcagagacagcagcagcagcagcagcagcagcagcaggagtaccaggagctgttcagacacatgaaccagggcgacgccggcagcctggcccccagcctgggcggccagagcatgaccgagagacaggccctgagctaccagaacgccgacagctaccaccaccacaccagcccccagcacctgctgcagatcagagcccaggagtgcgtgagccaggccagcagccccacccccccccacggctacgcccaccagcccgccctgatgcacagcgagagcatggaggaggactgcagctgcgagggcgccaaggacggcttccaggacagcaagagcagcagcaccctgaccaagggctgccacgacagccccctgctgctgagcaccggcggccccggcgaccccgagagcctgctgggcaccgtgagccacgcccaggagctgggcatccacccctacggccaccagcccaccgccgccttcagcaagaacaaggtgcccagcagagagcccgtgatcggcaactgcatggacagaagcagccccggccaggccgtggagctgcccgaccacaacggcctgggctaccccgccagacccagcgtgcacgagcaccacagacccagagccctgcagagacaccacaccatccagaacagcgacgacgcctacgtgcagctggacaacctgcccggcatgagcctggtggccggcaaggccctgagcagcgccagaatgagcgacgccgtgctgagccagagcagcctgatgggcagccagcagttccaggacggcgagaacgaggagtgcggcgccagcctgggcggccacgagcaccccgacctgagcgacggcagccagcacctgaacagcagctgctaccccagcacctgcatcaccgacatcctgctgagctacaagcaccccgaggtgagcttcagcatggagcaggccggcgtgtag

SEQ ID NO: 218154 - DNA, 3792 bp, Artificial Sequence
  derived and/or modified sequence
atgcctgctagaatcgggtattacgagatagatcgaacaatcggcaaggggaattttgccgtcgtgaaacgggctacccatctggtgacaaaagccaaagtagctatcaagattatagacaaaacccagctggatgaagaaaacttgaagaaaatttttagggaggtgcagatcatgaagatgctctgccatccccatataatcagactgtatcaggttatggaaactgagaggatgatctatctcgttactgagtacgcgtcaggcggcgaaatcttcgatcatctggtggctcacgggaggatggccgagaaggaggccaggagaaagtttaaacagattgtgacagcagtatatttttgtcattgccggaatattgtgcaccgcgatctaaaggctgagaacctgctgctggatgctaacctgaacatcaagatcgctgatttcggatttagtaacctgttcacaccaggtcagctgctgaagacctggtgcggaagccctccgtacgcggcaccagaattgtttgaaggaaaggaatacgacggaccaaaagtggacatatggtctcttggagttgtgctgtacgtcctggtgtgcggagccctgccatttgacggatcaactctacaaaacctccgggcaagagtcttgtctggaaagttccgaattcctttctttatgagtaccgagtgcgagcatctaatccggcacatgcttgtactggatcccaataaacggctttcaatggaacagatctgcaagcataagtggatgaaactaggagatgcagaccccaatttcgataggttaatagcagaatgccaacagttaaaagaggagcgtcaggtcgaccctctgaatgaggatgtgttactagccatggaggatatgggcctagataaggaacaaaccctgcagtctttgcgtagcgatgcctacgatcactattccgccatttactcgctgctttgcgacaggcacaagcggcataagactctgcgtctgggggcattgccttcaatgccacgggcgctggccttccaagctcccgttaacattcaggccgagcaggccggcacagctatgaacatttctgttcctcaggtgcagctgattaacccagagaaccagatcgtggaacccgacggcaccttaaacctcgacagcgatgaaggtgaggagcctagccctgaggccctggtgagatatttgtcaatgaggcggcatacagttggagtagcggatccacggactgaggtgatggaggacttgcagaagctcctgccaggcttcccgggcgttaaccctcaggctccatttctgcaggttgcacccaatgtgaacttcatgcataatctgttgcccatgcagaaccttcagccaacaggccagttggagtataaggaacagtctctattgcagcctccgacgctgcaattgcttaatggtatgggacctttgggccggagggcctcagacgggggggctaacattcaacttcatgcccagcaactgcttaaaaggcctaggggccctagtccgcttgtcacgatgactcctgctgtgcctgccgtaacacccgtcgacgaggagagttccgacggagagcccgatcaggaggcagtgcagtcttctacatataaagatagtaataccctgcatctccctactgagcggtttagcccggtgcggagattctccgatggggccgcttccatccaggctttcaaggctcacctggagaaaatggggaataacagctccattaaacagctgcagcaggagtgcgaacagctccaaaaaatgtacggcggtcaaattgatgagcggacactggaaaaaacgcaacaacagcatatgctgtatcagcaggaacagcatcatcagattctgcagcaacaaatccaggattcgatatgtcctcctcagccaagccctccactccaagccgcatgcgagaaccagcccgccctgctgacccatcaactgcagcggctcaggattcagccgagcagtccacctcccaaccatcctaacaaccatctatttagacaaccctctaacagcccaccacctatgagtagcgctatgatccagccccacggagctgcctcatccagccagtttcagggactgccatcccggtcagctatctttcagcaacaacctgagaactgttcaagtcccccaaacgtagcactcacttgtctggggatgcaacagccggcacagtcacagcaggtcaccattcaagtccaggaacccgtggacatgctgtctaacatgcccggaaccgcggcagggagcagcggccgcgggatctccatctcgccatcagcaggacagatgcagatgcagcaccgtactaacctcatggccaccttgagttacggccataggcccctgagtaagcaactgtctgctgattccgccgaggcccatagcttgaatgttaacagattctcacccgcaaattacgatcaggctcacctccatccacacttattctctgatcagtctcgaggctctccgtcttcctatagtccgagcacgggggttggtttcagtccaacccaggcactgaaggtcccgcccctcgaccagttcccaacattcccgccaagtgcacatcaacagcccccacattacactactagtgccctgcagcaagcgctactgtctcctacccccccggattacactcgacaccaacaggtcccccatatcctccaagggctgcttagccccagacattccctgacaggacattccgatatccgcctgcctccgacagagttcgcccaactgattaagcggcagcagcaacagcgccagcagcagcagcaacagcagcagcagcaggaataccaggagctattcaggcacatgaatcagggcgatgcagggagtcttgctcctagcctgggcgggcagtcaatgaccgaaagacaagccctttcatatcagaatgctgactcataccaccatcacacgagtcctcaacatctccttcagatccgggcacaggaatgtgtgagtcaagcgagttctcctacccctccgcatggatatgctcatcagccggcgttgatgcactctgagagtatggaggaggattgcagttgtgaaggggccaaagacggcttccaggactccaaatcctcctcaacactcactaagggctgccacgactccccgcttcttctgtccacaggaggaccgggagatcctgagtcacttctcggcacagtgagccacgcccaggaactggggattcatccgtacggccaccagcccaccgccgctttctctaagaataaggttccctcacgggagcccgtgattggcaattgtatggatcggagtagccccggccaagctgtggaactgcctgaccacaacggcctgggctacccagccagaccttcagtacatgagcatcataggccgagagctctccagcgtcaccacaccatccagaatagtgacgacgcctatgttcagcttgataacctacccggaatgagtctggttgctgggaaagctctctcatccgccagaatgtcagacgccgttctctctcagtcgtcactaatgggctcccagcagttccaggatggggaaaacgaggagtgcggggccagtttgggcggtcatgagcacccagacctatctgatggatctcagcacctaaactcctcatgctatcctagtacgtgtatcacagacatattgctatcctacaaacacccagaagtctctttcagtatggagcaagcaggggtctag

SEQ ID NO: 218155 - DNA, 3966 bp, Artificial Sequence
  derived and/or modified sequence
atggcagccgctgccgcctcaggtgccggcggagcggccggcgcaggtaccgggggagctggcccagcaggaagactgttgccaccgccagcccctggctctccagcagcccccgcggcagtgagcccagcggccggacagcctcgaccacctgctccagcctcaagaggccctatgcccgcaagaatcggctattacgagattgacagaaccatcggcaagggaaactttgcagttgtaaaacgcgcaacccatttggtgaccaaggcaaaagtcgctataaagattatcgacaagacgcaattagatgaggagaatcttaagaagatcttccgggaagttcagataatgaaaatgctctgtcacccacatatcatccgcttgtaccaggttatggaaaccgagcgtatgatctatttagtgaccgaatatgcaagtggaggagagatatttgatcacctagtcgcccacggaaggatggcggagaaggaggctcggagaaagttcaagcagatagttacagccgtttatttttgccattgcaggaacatcgtgcaccgcgacctgaaggcggagaacctcttacttgacgccaatttaaacattaaaattgccgattttgggttttctaacctttttaccccaggtcaattgttaaaaacgtggtgcggcagccctccctatgccgctccagaactattcgagggcaaagaatatgatggccccaaagtggatatttggagcctgggtgtcgtcctttatgtactcgtgtgtggagccctacctttcgatgggtccacactacagaacctgagagcccgcgtgctctccggcaagtttagaatccctttctttatgagcactgaatgcgaacaccttatacgacacatgcttgtcttggatcctaacaaaaggctgtctatggaacagatttgcaaacacaagtggatgaagttgggcgacgctgaccccaactttgacagactcattgcggaatgccagcaactgaaggaagagcgccaggtagaccccctaaatgaggatgttctcctggccatggaggatatggggttggataaagaacagacactgcagagcctcagaagcgacgcgtacgatcactattcggccatttactctctgttgtgcgatagacataaacgccacaagaccctgaggctgggagccctccctagcatgcccagagccctggcttttcaggcccccgtcaacatccaagcagaacaggcgggtactgcgatgaacataagcgtgcctcaggtccagctgataaaccctgagaaccaaattgttgagcctgacgggaccctgaatctggattctgacgaaggtgaagagccaagccctgaggcactggtccggtatctgagcatgagaagacacaccgtgggagtcgccgacccacggacagaagtgatggaggatctacagaagttactccccggcttccccggagtgaacccccaagcccccttcttgcaggttgcccccaatgtcaatttcatgcacaacctgttgccaatgcagaacttgcagcccacaggtcagctggaatacaaggagcagtcattgctgcagccaccgactcttcagcttcttaatggcatgggaccactggggcggcgggcctcggatggcggggcaaacatccagctccatgcacagcagctcctgaaaaggcctcgcggaccttctccactcgttaccatgactccggcggtgccagctgtgacacccgttgatgaggagtcatcagacggcgaacccgaccaggaggccgttcagtcctctacctataaggatagcaacactctgcatttgccgacggaacggttctccccagtgcgacgctttagcgacggggctgcttccatacaggccttcaaggcacacctggagaagatggggaacaactcatcaattaaacagctgcagcaagaatgtgagcagctgcagaagatgtacggtgggcaaatagacgaacgcactttggagaaaacacagcagcagcacatgttgtaccagcaggagcaacaccaccagatactccagcagcaaatccaggatagcatctgtcccccgcagccctctcctccactgcaggctgcctgtgagaaccagcctgccctgttgacgcatcagctccagcggctcagaatccagccatcttcccctccacccaaccaccccaataaccaccttttccgccagccaagcaactctcccccgcccatgagcagtgccatgatccagccacacggggccgcctcaagctcccaattccaaggactgccaagcaggtctgcaatcttccagcagcagcctgaaaactgctcctctcctcccaatgtggccttgacgtgcttgggtatgcagcaaccagcgcagagccagcaagtcactatccaagtacaagaacccgtggacatgttgtcaaatatgccgggaaccgccgccgggagtagtggccgcgggatctcaatttcaccctccgccggacagatgcaaatgcagcacagaaccaatcttatggcaacactttcctacggacatcggccccttagcaaacaactgagcgcagattccgccgaagctcattcactgaacgtaaacagattcagtcctgcaaactatgaccaggcacacctgcaccctcatctgttctctgaccagtcgagaggaagcccctcatcctactcccctagtacaggtgtcggtttcagccccacacaggccctcaaggtgcctcccctggaccaattccccactttcccacccagcgcacaccaacagcctccacactatactaccagtgctctgcagcaggccctcctcagcccgaccccaccagattataccaggcaccagcaagtcccacatattctgcagggacttctctccccacgccatagccttacaggacacagtgatattcgacttcccccaacagaatttgcccagctaatcaagcggcagcagcaacagcgccagcaacagcaacagcagcagcagcagcaggaataccaggaactgtttaggcatatgaaccagggcgacgccggctcactcgcgccatctctgggaggacagtcaatgactgagcggcaggcactctcctaccagaacgcggactcctaccaccatcataccagcccacagcacttgttgcagatccgtgcccaagagtgcgtgtcccaggcctcatctcccacacccccacacgggtatgctcatcagccagcgttaatgcactctgaatccatggaggaagactgcagctgtgaaggagccaaggatggattccaagacagcaagagctccagcacattaaccaagggttgtcacgactctcccctgcttttgagcaccggcgggccaggagatcctgagagccttctcggtacagtgtctcacgcacaggagcttggcatacacccctacggccatcagccaacggccgccttttctaagaacaaagtgccgagccgcgagccagtaatcgggaactgcatggacagaagttctccaggccaggctgtcgagctgcctgaccacaatggcctaggctacccagcaaggccttcagtgcatgagcatcataggcctcgagcactccagagacatcacaccatccaaaacagcgatgatgcgtacgtgcagctggataatctcccaggcatgtccctagtcgccgggaaagccctctctagcgctagaatgagcgatgctgttctgtcacaatcaagtctgatgggctcgcagcagttccaggacggcgaaaatgaggagtgcggcgccagcctgggtggacacgagcaccccgacctcagtgacgggtctcagcatctaaactcgagttgctatccgagcacatgcattaccgatattttacttagctacaagcacccagaagtaagcttctcaatggaacaagccggtgtttag

SEQ ID NO: 218156 - DNA, 3792 bp, Artificial Sequence
  derived and/or modified sequence
atgcctgccagaattggctactatgaaattgacaggaccatcggcaagggcaactttgctgtggtgaagagggccacccacctggtgaccaaggccaaggtggccatcaagatcatcgacaagacccagctggatgaggagaacctgaagaagatcttccgggaggtgcagatcatgaagatgctgtgccacccccacatcatccggctgtaccaggtgatggagacagagaggatgatctacctggtgacagaatatgccagcggcggggagatctttgaccacctggtggcccacggccgcatggccgagaaggaggcccggaggaagttcaagcagatcgtgacagctgtgtacttctgccactgcaggaacatcgtgcaccgggacctgaaggccgagaacctgctgctggatgccaacctgaacatcaagattgctgactttggcttcagcaacctcttcaccccaggccagctgctgaagacctggtgtggcagccccccctatgctgcccctgagctgtttgagggcaaggagtatgatggccccaaggtggacatctggagcctgggcgtggtgctgtatgtgctggtgtgtggggccctgccctttgatggcagcaccctgcagaacctgcgggcccgggtgctgagcggcaagttccgcatccccttcttcatgagcacagaatgtgagcacctgatccgccacatgctggtgctggaccccaacaagaggctgtccatggagcagatctgcaagcacaagtggatgaagctgggagatgctgaccccaactttgaccggctgattgctgagtgccagcagctgaaggaggagcggcaggtggaccccctgaatgaagatgtgctgctggccatggaggacatgggcctggacaaggagcagaccctgcagagcctgcggagtgatgcctatgaccactacagcgccatctacagcctgctgtgtgacagacacaagaggcacaagaccctgcggctgggcgccctgcccagcatgccccgggccctggccttccaggcccctgtgaacatccaggccgagcaggccggcacagccatgaacatctctgtgccccaggtgcagctgatcaaccctgagaaccagatcgtggagccagatggcaccctgaacctggacagtgatgaaggagaggagcccagccctgaggccctggtgcgctacctgtccatgaggaggcacacagtgggcgtggccgaccccaggacagaggtgatggaggacctgcagaagctgctgcccggcttccctggggtgaacccccaggcccccttcctgcaggtggccccaaatgtgaacttcatgcacaacctgctgcccatgcagaacctgcagcccaccggccagctggagtacaaggagcagagcctgctgcagccccccaccctgcagctgctgaatggcatgggccccctgggccggcgggccagtgatggaggagccaacatccagctgcacgcccagcagctgctgaagaggccccggggccccagccccctggtgaccatgaccccagctgtgcctgctgtgacccctgtggatgaggagagcagtgatggagagccagaccaggaggccgtgcagagcagcacctacaaggacagcaacaccctgcacctgcccacagagcgcttcagccctgtgcggcgcttcagtgatggagctgccagcatccaggccttcaaggcccacctggagaagatgggcaacaacagcagcatcaagcagctgcagcaggagtgtgagcagctgcagaagatgtatggaggccagattgatgagaggaccctggagaagacccagcagcagcacatgctgtaccagcaggagcagcaccaccagatcctgcagcagcagatccaggacagcatctgccccccccagcccagcccccccctgcaggccgcctgtgagaaccagcctgccctgctgacccaccagctgcagaggctgcgcatccagcccagcagccccccacccaaccaccccaacaaccacctgttccggcagcccagcaacagccccccacccatgagcagcgccatgatccagccccacggggccgccagcagcagccagttccagggcctgcccagccgcagcgccatcttccagcagcagcctgagaactgcagcagcccccccaacgtggccctgacctgcctgggcatgcagcagcctgcccagagccagcaggtgaccatccaggtgcaggagcctgtggacatgctgagcaacatgcctggaacagctgctggcagcagcggccggggcatcagcatcagccccagcgctggccagatgcagatgcagcacaggaccaacctgatggccaccctgtcctatggccaccggcccctgagcaagcagctgtctgctgacagcgctgaggcccacagcctgaatgtgaaccgcttcagccctgccaactatgaccaggcccacctgcacccccacctgttcagtgaccagagccggggcagccccagcagctacagccccagcactggagtgggcttcagccccacccaggccctgaaggtgccccccctggaccagttccccaccttcccccccagcgcccaccagcagcccccccactacaccaccagcgccctgcagcaggccctgctgagccccaccccaccagactacaccaggcaccagcaggtgccccacatcctgcagggcctgctgagccccaggcacagcctgaccggccacagcgacatccggctgcccccaacagaatttgcccagctgatcaagaggcagcagcagcagaggcagcagcagcagcagcagcagcagcagcaggagtaccaggagctgttccgccacatgaaccagggagatgctggcagcctggcccccagcctgggcggccagagcatgacagagcggcaggccctgagctaccagaatgctgacagctaccaccaccacaccagcccccagcacctgctgcagatccgggcccaggagtgtgtgtcccaggccagcagccccaccccacctcatggctacgcccaccagcctgccctgatgcacagcgagagcatggaggaggactgcagctgtgagggcgccaaggatggcttccaggacagcaagagcagcagcaccctgaccaagggctgccacgacagccccctgctgctgagcactggaggccctggggaccctgagagcctgctgggcaccgtgtcccatgcccaggagctgggcatccacccctacggccaccagcccacagctgccttcagcaagaacaaggtgcccagccgggagcccgtcatcggcaactgcatggacaggagcagccctggccaggccgtggagctgcctgaccacaacggcctgggctacccagcccggcccagcgtgcatgagcaccaccggccccgggccctgcagaggcaccacaccatccagaacagtgatgatgcctacgtgcagctggacaacctgcccggcatgagcctggtggccggcaaggccctgagcagcgccaggatgtctgatgctgtgctgagccagagcagcctgatgggcagccagcagttccaggatggagaaaatgaggagtgtggggccagcctgggcggccacgagcacccagacctgagtgatggcagccagcacctgaacagcagctgctaccccagcacctgcatcacagacatcctgctgagctacaagcaccctgaggtgtccttctccatggagcaggccggcgtgtag

SEQ ID NO: 218157 - DNA, 6213 bp, Artificial Sequence
  derived and/or modified sequence
aacaagatggcggcggcggcggcgagcggagctggcggggctgccggggccgggactgggggagccgggcccgcgggccgcctgctgcctccgcccgcgccggggtccccagccgcccccgctgccgtgtcccctgcggccggccagccgcgtcccccagccccggcctcccgcggacccatgcccgcccgtatcggctactacgagatcgaccgcaccatcggcaagggcaacttcgcggtggtcaagcgggccacgcacctcgtcaccaaggccaaggttgctatcaagatcatagataagacccagctggatgaagaaaacttgaagaagattttccgggaagttcaaattatgaagatgctttgccacccccatatcatcaggctctaccaggttatggagacagaacggatgatttatctggtgacagaatatgctagtggaggggaaatatttgaccacctggtggcccatggtagaatggcagaaaaggaggcacgtcggaagttcaaacagatcgtcacagctgtctatttttgtcactgtcggaacattgttcatcgtgatttaaaagctgaaaatttacttctggatgccaatctgaatatcaaaatagcagattttggtttcagtaacctcttcactcctgggcagctgctgaagacctggtgtggcagccctccctatgctgcacctgaactctttgaaggaaaagaatatgatgggcccaaagtggacatctggagccttggagttgtcctctacgtgcttgtgtgcggtgccctgccatttgatggaagcacactgcagaatctgcgggcccgcgtgctgagtggaaagttccgcatcccattttttatgtccacagaatgtgagcatttgatccgccatatgttggtgttagatcccaataagcgcctctccatggagcagatctgcaagcacaagtggatgaagctaggggacgccgatcccaactttgacaggttaatagctgaatgccaacaactaaaggaagaaagacaggtggaccccctgaatgaggatgtcctcttggccatggaggacatgggactggacaaagaacagacactgcagtcattaagatcagatgcctatgatcactatagtgcaatctacagcctgctgtgtgatcgacataagagacataaaaccctgcgtctcggagcacttcctagcatgccccgagccctggcctttcaagcaccagtcaatatccaggcggagcaggcaggtactgctatgaacatcagcgttccccaggtgcagctgatcaacccagagaaccaaattgtggagccggatgggacactgaatttggacagtgatgagggtgaagagccttcccctgaagcattggtgcgctatttgtcaatgaggaggcacacagtgggtgtggctgacccacgcacggaagttatggaagatctgcagaagctcctacctggctttcctggagtcaacccccaggctccattcctgcaggtggcccctaatgtgaacttcatgcacaacctgttgcctatgcaaaacttgcaaccaaccgggcaacttgagtacaaggagcagtctctcctacagccgcccacgctacagctgttgaatggaatgggcccccttggccggagggcatcagatggaggagccaacatccaactgcatgcccagcagctgctgaagcgcccacggggaccctctccgcttgtcaccatgacaccagcagtgccagcagttacccctgtggacgaggagagctcagacggggagccagaccaggaagctgtgcagagctctacctacaaggactccaacactctgcacctccctacggagcgtttctcccctgtgcgccggttctcagatggggctgcgagcatccaggccttcaaagctcacctggaaaaaatgggcaacaacagcagcatcaaacagctgcagcaggagtgtgagcagctgcagaagatgtacggggggcagattgatgaaagaaccctggagaagacccagcagcagcatatgttataccagcaggagcagcaccatcaaattctccagcaacaaattcaagactctatctgtcctcctcagccatctccacctcttcaggctgcatgtgaaaatcagccagccctccttacccatcagctccagaggttaaggattcagccttcaagcccaccccccaaccaccccaacaaccatctcttcaggcagcccagtaatagtcctccccccatgagcagtgccatgatccagcctcacggggctgcatcttcttcccagtttcaaggcttaccttcccgcagtgcaatctttcagcagcaacctgagaactgttcctctcctcccaacgtggcactaacctgcttgggtatgcagcagcctgctcagtcacagcaggtcaccatccaagtccaagagcctgttgacatgctcagcaacatgccaggcacagctgcaggctccagtgggcgcggcatctccatcagccccagtgctggtcagatgcagatgcagcaccgtaccaacctgatggccaccctcagctatgggcaccgtcccttgtccaagcagctgagtgctgacagtgcagaggctcacagcttgaacgtgaatcggttctcccctgctaactacgaccaggcgcatttacacccccatctgttttcggaccagtcccggggttcccccagcagctacagcccttcaacaggagtggggttctctccaacccaagccctgaaagtccctccacttgaccaattccccaccttccctcccagtgcacatcagcagccgccacactataccacgtcggcactacagcaggccctgctgtctcccacgccgccagactatacaagacaccagcaggtaccccacatccttcaaggactgctttctccccggcattcgctcaccggccactcggacatccggctgcccccaacagagtttgcacagctcattaaaaggcagcagcaacaacggcagcagcagcagcaacagcagcaacagcaagaataccaggaactgttcaggcacatgaaccaaggggatgcggggagtctggctcccagccttgggggacagagcatgacagagcgccaggctttatcttatcaaaatgctgactcttatcaccatcacaccagcccccagcatctgctacaaatcagggcacaagaatgtgtctcacaggcttcctcacccaccccgccccacgggtatgctcaccagccggcactgatgcattcagagagcatggaggaggactgctcgtgtgagggggccaaggatggcttccaagacagtaagagttcaagtacattgaccaaaggttgccatgacagccctctgctcttgagtaccggtggacctggggaccctgaatctttgctaggaactgtgagtcatgcccaagaattggggatacatccctatggtcatcagccaactgctgcattcagtaaaaataaggtgcccagcagagagcctgtcatagggaactgcatggatagaagttctccaggacaagcagtggagctgccggatcacaatgggctcgggtacccagcacgcccctccgtccatgagcaccacaggccccgggccctccagagacaccacacgatccagaacagcgacgatgcttatgtacagctggataacttgccaggaatgagtctcgtggctgggaaagcacttagctctgcccggatgtcggatgcagttctcagtcagtcttcgctcatgggcagccagcagtttcaggatggggaaaatgaggaatgtggggcaagcctgggaggtcatgagcacccagacctgagtgatggcagccagcatttaaactcctcttgctatccatctacgtgtattacagacattctgctcagctacaagcaccccgaagtctccttcagcatggagcaggcaggcgtgtaacaagaaacagagagttttgtgtacagcttgggaatgaaaaggttgattgtaaacccacagtatctagcagcgttgtgccaaattgcccttgtgtttctctccacccaaaatatcacagctgctttcctcacatttggttcatccgtgtgctgttcttttgggttctgagagggttttgccatgtttgcttgtatgaccaagtcaccaaggaaataaacaggaaggaaatccatgttctccatcttttgtgaaagtatatttgagttggtggttttttgttttgtttgggggtttgtgttttgttttgtttttggtatgttttcttccagaggtgatatactttcttttttttcttcctttcttttttttctttcgttccttttttgaaacaggagagcaaagcagttagagttcagaggccagcggcctcagggccactccctccctagccttcatcagcagagcaccctccatccccctgcattgctcttctgtgaaagcaaatactaaaggatgccatcctctggaatcctaatggcaggcaaagggagagaggaagggtgacggcttctggcacttagaaaacaaaaagaacaaaaaaagagaaacccccaagcctggaacgcagagaggtctttactgctgggatccacggaaaacatgtctgtcctagccaagatcatatgaagagtttggcacggaggctgagaatgacctggcatagatggtttgccagttaggatgtctcaatttgagcctttgcttttggtggataactcagctcccctcttgtaacctggaaagttggttgcctttatcatcctgctggttttatccatggactgaacacccaacagcagtgcactatgctttctatggcatctttcattctcattttatattgtgctataaaaaggattgtttctccatatatatattatatatgtgtgtatatatataatataatatatgtgtatatatatattatatatataatatataatataatatattatatatatattatatatataatatatatataaaatatatatatatatgctctcctctttcagcctctttgtcacagggaagaagtgtaggaggttgccttgggccctgcctctctcctaacctcctcttccccactgggtaccctcagcccctatattttaattcttgatcatgtagaaattgtttttggtaaatgttgatattattgttattatcattattaataaataaagagaaaaggaatttttgtttaaatgagaaatgtttaaccagattctgttctatttgaattgtgacttgcaccttttgttcaaagtatttcctttaggcattgtaattgtgaacagctcttacttgtgccagtgacagatgcagtggtctcctttccccagttgaagcagtgcatacgcagtagctattatttgtgttatctttatttctcttcattgttagaaaccaaagtcttctctgctggctggggctgagagagggtctgggttatctccttctgatcttcaaaacaagagagagaccttgaatacactgactcttccaccctttttttttctgggaaaggagagcaagaggtcccgagtcccctcctagtctttcatcctgaatttgcacagaggaaagcgggtgcccggcatggccatcctgatgttgctggcgggatccccatgcaccttgtccttctccactgatactggcagctcggctcctggacccaagatcccttgagtggaattctgcagtgcaagagcccttcgtgggagctgtcccatgtttccatggtccccagtctcccctccacttggtggggtcaccaactactcaccagaagggggcttaccaagaaagccctaaaaagctgttgacttatctgcgcttgttccaactcttatgcccccaacctgccctaccaccaccacgcgctcagcctgatgtgtttacatggtactgtatgtatgggagagcagactgcaccctccagcaacaacagatgaaagccagtgagcctactaaccgtgccatcttgcaaactacactttaaaaaaaactcattgctttgtattgtagtaaccaatatgtgcagtatacgttgaatgtatatgaacatactttcctatttctgttctttgaaaatgtcagaaatatttttttctttctcattttatgttgaactaaaaaggattaaaaaaaaaatctccagactcaagttgctaa

SEQ ID NO: 218158 - DNA, 3966 bp, Artificial Sequence
  derived and/or modified sequence
atggctgctgctgctgccagcggggccggcggcgctgctggagctggcactggaggagctggccctgctggccgcctgctgcccccaccagcccctggcagccctgctgccccagctgctgtgtccccagctgctggccagccccggcccccagccccagccagccggggccccatgcctgccagaattggctactatgaaattgacaggaccatcggcaagggcaactttgctgtggtgaagagggccacccacctggtgaccaaggccaaggtggccatcaagatcatcgacaagacccagctggatgaggagaacctgaagaagatcttccgggaggtgcagatcatgaagatgctgtgccacccccacatcatccggctgtaccaggtgatggagacagagaggatgatctacctggtgacagaatatgccagcggcggggagatctttgaccacctggtggcccacggccgcatggccgagaaggaggcccggaggaagttcaagcagatcgtgacagctgtgtacttctgccactgcaggaacatcgtgcaccgggacctgaaggccgagaacctgctgctggatgccaacctgaacatcaagattgctgactttggcttcagcaacctcttcaccccaggccagctgctgaagacctggtgtggcagccccccctatgctgcccctgagctgtttgagggcaaggagtatgatggccccaaggtggacatctggagcctgggcgtggtgctgtatgtgctggtgtgtggggccctgccctttgatggcagcaccctgcagaacctgcgggcccgggtgctgagcggcaagttccgcatccccttcttcatgagcacagaatgtgagcacctgatccgccacatgctggtgctggaccccaacaagaggctgtccatggagcagatctgcaagcacaagtggatgaagctgggagatgctgaccccaactttgaccggctgattgctgagtgccagcagctgaaggaggagcggcaggtggaccccctgaatgaagatgtgctgctggccatggaggacatgggcctggacaaggagcagaccctgcagagcctgcggagtgatgcctatgaccactacagcgccatctacagcctgctgtgtgacagacacaagaggcacaagaccctgcggctgggcgccctgcccagcatgccccgggccctggccttccaggcccctgtgaacatccaggccgagcaggccggcacagccatgaacatctctgtgccccaggtgcagctgatcaaccctgagaaccagatcgtggagccagatggcaccctgaacctggacagtgatgaaggagaggagcccagccctgaggccctggtgcgctacctgtccatgaggaggcacacagtgggcgtggccgaccccaggacagaggtgatggaggacctgcagaagctgctgcccggcttccctggggtgaacccccaggcccccttcctgcaggtggccccaaatgtgaacttcatgcacaacctgctgcccatgcagaacctgcagcccaccggccagctggagtacaaggagcagagcctgctgcagccccccaccctgcagctgctgaatggcatgggccccctgggccggcgggccagtgatggaggagccaacatccagctgcacgcccagcagctgctgaagaggccccggggccccagccccctggtgaccatgaccccagctgtgcctgctgtgacccctgtggatgaggagagcagtgatggagagccagaccaggaggccgtgcagagcagcacctacaaggacagcaacaccctgcacctgcccacagagcgcttcagccctgtgcggcgcttcagtgatggagctgccagcatccaggccttcaaggcccacctggagaagatgggcaacaacagcagcatcaagcagctgcagcaggagtgtgagcagctgcagaagatgtatggaggccagattgatgagaggaccctggagaagacccagcagcagcacatgctgtaccagcaggagcagcaccaccagatcctgcagcagcagatccaggacagcatctgccccccccagcccagcccccccctgcaggccgcctgtgagaaccagcctgccctgctgacccaccagctgcagaggctgcgcatccagcccagcagccccccacccaaccaccccaacaaccacctgttccggcagcccagcaacagccccccacccatgagcagcgccatgatccagccccacggggccgccagcagcagccagttccagggcctgcccagccgcagcgccatcttccagcagcagcctgagaactgcagcagcccccccaacgtggccctgacctgcctgggcatgcagcagcctgcccagagccagcaggtgaccatccaggtgcaggagcctgtggacatgctgagcaacatgcctggaacagctgctggcagcagcggccggggcatcagcatcagccccagcgctggccagatgcagatgcagcacaggaccaacctgatggccaccctgtcctatggccaccggcccctgagcaagcagctgtctgctgacagcgctgaggcccacagcctgaatgtgaaccgcttcagccctgccaactatgaccaggcccacctgcacccccacctgttcagtgaccagagccggggcagccccagcagctacagccccagcactggagtgggcttcagccccacccaggccctgaaggtgccccccctggaccagttccccaccttcccccccagcgcccaccagcagcccccccactacaccaccagcgccctgcagcaggccctgctgagccccaccccaccagactacaccaggcaccagcaggtgccccacatcctgcagggcctgctgagccccaggcacagcctgaccggccacagcgacatccggctgcccccaacagaatttgcccagctgatcaagaggcagcagcagcagaggcagcagcagcagcagcagcagcagcagcaggagtaccaggagctgttccgccacatgaaccagggagatgctggcagcctggcccccagcctgggcggccagagcatgacagagcggcaggccctgagctaccagaatgctgacagctaccaccaccacaccagcccccagcacctgctgcagatccgggcccaggagtgtgtgtcccaggccagcagccccaccccacctcatggctacgcccaccagcctgccctgatgcacagcgagagcatggaggaggactgcagctgtgagggcgccaaggatggcttccaggacagcaagagcagcagcaccctgaccaagggctgccacgacagccccctgctgctgagcactggaggccctggggaccctgagagcctgctgggcaccgtgtcccatgcccaggagctgggcatccacccctacggccaccagcccacagctgccttcagcaagaacaaggtgcccagccgggagcccgtcatcggcaactgcatggacaggagcagccctggccaggccgtggagctgcctgaccacaacggcctgggctacccagcccggcccagcgtgcatgagcaccaccggccccgggccctgcagaggcaccacaccatccagaacagtgatgatgcctacgtgcagctggacaacctgcccggcatgagcctggtggccggcaaggccctgagcagcgccaggatgtctgatgctgtgctgagccagagcagcctgatgggcagccagcagttccaggatggagaaaatgaggagtgtggggccagcctgggcggccacgagcacccagacctgagtgatggcagccagcacctgaacagcagctgctaccccagcacctgcatcacagacatcctgctgagctacaagcaccctgaggtgtccttctccatggagcaggccggcgtgtag

SEQ ID NO: 218159 - DNA, 3792 bp, Artificial Sequence
  derived and/or modified sequence
atgcccgcccggatcggctactacgagatcgaccggaccatcggcaaagggaacttcgcggtggtaaagagagccactcacctcgttacaaaggccaaagtcgccataaagataatcgataaaacgcagctcgacgaggaaaacctcaagaagattttccgggaggtccagatcatgaaaatgctatgtcacccacacataattcgattgtaccaagtgatggagacagagaggatgatttatcttgtgacagaatacgcatcaggcggcgagattttcgaccacctggtggcacacggaaggatggcagagaaagaggcacggaggaagttcaaacagatcgtgaccgccgtttacttttgtcactgtaggaatattgttcaccgcgatctgaaagcagagaatctcctcctggacgctaatcttaatataaaaatcgcagactttggttttagcaatttgttcacccctggacagctgcttaaaacttggtgtggatctcccccctatgctgctccagagttatttgaggggaaggaatacgatgggccgaaggttgatatttggagcctcggcgtggtattgtacgtgctggtctgtggggcgctgccatttgacgggagcaccctgcagaatctacgcgctagagtgctgagcggaaaattcaggatcccatttttcatgagtacggagtgcgaacacctgatcagacatatgctggtgcttgacccaaacaaaaggttgagcatggagcagatctgcaagcataagtggatgaaactgggcgacgctgacccgaatttcgataggttgattgcagaatgtcaacaactgaaggaagagaggcaggttgatccactgaatgaggatgtgttactcgcaatggaagatatgggattagataaagaacaaacattacagagtctccgctcagacgcttatgaccactatagcgccatttattcgttgctttgtgatcggcataaacgccataaaactctgcggctaggggcgctccccagtatgccaagggctctcgcttttcaagccccagttaatattcaggccgaacaggcaggcactgcaatgaatatctctgttcctcaggtgcagttgatcaatcccgagaatcaaattgtggagcccgatggaacactcaacctggacagcgacgagggggaggagccatcccccgaagcactcgtccggtatctgtcaatgcggaggcatactgtcggggtcgcggatcctaggaccgaggtaatggaagacctgcagaagctactgccgggctttcccggcgtcaatccccaggcgcctttcttgcaggtggcccccaatgtcaatttcatgcataacctgctccccatgcagaatttacagccaactggacaacttgagtacaaggaacagtccctgctgcaaccgcccacactgcaactgctgaacggcatgggccccctggggaggcgggccagtgacggaggggccaacatacaattacacgcccagcaactgctaaaacgccctagaggtccttcacctctggtgacaatgacacccgccgtgcccgcagtaacccccgtcgatgaggaaagctccgatggggaacccgatcaagaggctgtgcaatcttccacctataaggactctaacaccctccacttgccaaccgaacgcttcagccccgtgaggcggttctccgacggggccgccagtattcaagctttcaaggcgcacctagagaaaatgggaaacaacagctccatcaaacagttgcagcaagagtgcgaacagctccaaaagatgtacggggggcagattgatgagcgtaccctggaaaagacacagcaacagcacatgttgtaccaacaggaacagcatcatcagattctgcaacagcaaatccaggattcaatttgcccaccacagccctcaccacccctgcaggccgcttgtgaaaatcagccagccctgctcacgcaccagctccagcgtttgcgcatacagccatcctctcctcctcccaaccatcccaataatcatctctttagacaaccttccaattcacctcctcccatgtcgagcgccatgatccagccacacggcgcagcaagctcatcacagtttcaggggctgccttcgagatccgcaatttttcaacagcaaccagagaactgctcttccccccccaatgttgccctgacgtgcttggggatgcaacagccggctcagtcacaacaggttaccattcaggtgcaggagcctgtggatatgctgtccaacatgcctggcaccgctgccggttcttctggacgaggcatatccatttccccttccgcaggccaaatgcagatgcagcaccgaacgaacctgatggccaccctttcatacggccaccgccctctgtccaagcagctctcagctgatagcgccgaggcacactcactcaacgttaacagattttctccagcaaactatgaccaggctcacctgcatcctcacctcttttccgatcaatctcgaggtagcccctcgtcgtactctccaagcaccggggtaggcttctctcctacacaggcgctgaaggtgccccccctcgatcaattccctaccttcccgccttccgcccaccagcagcctccccactatactacatctgctctccagcaagcgctgctatctccgacgcctcctgactacacccgccatcagcaggtgccacatattcttcagggtttacttagtccccggcatagcctgaccggacactcagatatcagacttccaccaaccgagttcgcgcagctcatcaaacggcagcagcagcagcggcagcagcagcagcagcagcagcagcagcaggagtatcaggaactgtttaggcacatgaaccagggcgatgcaggcagtctggcgccgagcctgggtggacagtccatgacggagaggcaggctctgtcttatcaaaacgcagactcttatcaccaccatacttcaccacagcatttgctccaaattcgggcccaggagtgcgtgagccaggcctccagccccactccccctcacggttatgcccaccagcccgcgttgatgcattctgagtcaatggaggaagactgcagctgcgagggcgctaaggatggatttcaggattccaagagcagtagtacacttacaaagggctgccatgacagtccattattgctttccactggggggcctggagaccctgagtctctgctgggcactgtcagtcacgcacaggaacttggaatccacccctatggacatcaacccactgccgccttctccaagaacaaagttccctccagagaacccgtgattgggaactgcatggatcgtagcagtcctggacaagcggtcgagcttcctgaccacaatggtctaggctaccccgccagacccagcgtgcatgagcaccaccgcccacgggctctgcaacggcaccacacaatccagaattcagacgatgcgtacgtccagctggataatctgcccgggatgtccctggttgccgggaaagctctgagttctgctcgaatgtcagacgccgtgctgtcccagagttctctgatgggctcacagcagttccaggacggggaaaatgaggaatgcggcgccagcttgggcggacacgagcaccccgacctgtcggatggatctcaacacctgaattctagctgctacccctccacctgtattaccgatatccttttgtcatataaacatcccgaagtttccttctctatggaacaggctggcgtttag

SEQ ID NO: 218160 - DNA, 3966 bp, Artificial Sequence
  derived and/or modified sequence
atggccgccgccgccgccagcggcgccggcggcgccgccggcgccggcaccggcggcgccggcccagccggccgacttcttcctcctcctgctcctggctctcctgcagctcctgccgccgtaagtccagcggcaggccagcctagacctcctgcaccggcgagcagaggacccatgcccgcaaggattggatattacgagatcgataggaccattggaaagggtaatttcgcggtggtcaaacgcgccacccacttggtgactaaggccaaagtagccatcaaaatcatcgacaagacgcagctggatgaagaaaacctcaagaagatctttcgagaggtgcagattatgaaaatgctgtgccacccccatattataagattgtatcaggtgatggagaccgagagaatgatttacttggtgacagagtacgcgtcaggcggggagatctttgaccacctggtagctcatggcagaatggccgaaaaagaagccaggcgcaaattcaagcagatcgtcaccgccgtgtacttttgtcactgccggaacatcgtacatcgcgacctgaaggccgaaaatctgttgctggatgctaacctgaacatcaaaatcgcagatttcgggttttcaaacctgtttactccaggccagctgctcaaaacatggtgcggaagtccaccttatgccgccccagaactgtttgagggtaaagaatatgatgggcctaaggtggatatatggtccttaggcgtggtgctgtatgtcctggtgtgtggcgccctcccattcgacggctccaccttgcagaatctcagagccagagttctgtccggcaagttccggattcccttttttatgagcaccgaatgtgagcacctgattaggcatatgctcgtcctcgatcccaacaagagactaagtatggaacaaatctgtaagcataagtggatgaagctgggggatgccgacccaaacttcgacaggctcatcgcggaatgtcaacagctgaaagaggaacggcaggtcgatcccctcaacgaggatgtccttttggctatggaggatatgggtctggataaagagcagactctacaaagcctgagaagcgatgcgtacgaccactacagcgccatctacagtctactgtgcgatcggcacaaacgtcataagactttgagactgggggccttgccgtcaatgcctagagcgctggcctttcaggcacctgtcaacattcaggctgagcaggccggaacagctatgaacataagcgtcccccaagtgcagctgattaaccccgaaaatcagatcgtggagcctgatggcacactcaacctcgattcagacgaaggggaggagcctagtcctgaggcactcgtacgctacctctccatgagaagacatacagtgggtgtcgccgacccgcgaactgaggtgatggaggacctgcaaaaattgctaccgggattccccggggtgaacccccaggcacccttcctgcaggtggcaccaaacgtaaactttatgcataacttgctgcctatgcagaacctgcaacccactgggcagctcgaatataaggagcagtctctgctacagccccctacattgcaactgctgaacggtatgggaccccttgggagacgggcgagcgatggaggagctaacattcaactgcatgcacaacagctgctcaagaggcccagggggccctctccactggtcaccatgacccctgccgtacccgcagttactcccgtggatgaagagtcaagcgatggcgagcccgaccaggaggcagtccagtctagcacatataaagactccaataccttgcaccttccaacagagaggttttcacccgtgaggcgcttttctgacggagctgcatccatacaagcattcaaggcccacctggaaaagatgggtaacaattcatcaattaaacagctgcagcaagagtgcgaacagctgcagaagatgtatggggggcagattgacgaaaggacactcgagaagacacagcagcagcatatgctgtatcagcaggagcagcatcatcagatcctccagcagcagattcaggattcaatatgtcctccacagccttcaccacctcttcaggctgcgtgtgagaatcagccagctctgctgactcaccagctgcaaagattaaggatccagccctcgtcccctcctccaaatcacccaaataatcacctgttcaggcagccatccaattcgcccccccctatgagctctgcgatgatacagccacacggagcggcaagctcttcacagtttcagggtctgccttcaaggagcgccatcttccagcaacagcctgagaactgctcaagcccccccaacgtcgcgctcacatgtctgggcatgcagcagccagcacaatctcagcaggtaacaattcaagtccaggagcccgtggatatgttgagtaacatgccaggaactgccgcaggatcatccggtagagggattagtataagcccaagcgccggccagatgcaaatgcaacaccggacaaacctgatggccactcttagctacggccatcgcccactcagtaaacaactttcagcagactccgctgaggcacattcactgaacgtgaaccgattctcccccgccaattacgatcaggcccatttacacccccacctcttttctgatcagtctaggggatcaccttcttcttattcccccagcacaggtgtgggcttctcacctactcaggcccttaaggtgccacctttagatcaattcccaaccttccctccatcagcgcaccaacagcccccccattacacaacctctgctctccagcaagctctgttgagtcctactccccccgattacacacgccaccaacaggtccctcatattctccaaggcctgctcagcccccgacattccctgactgggcactcagacatcagactgcctcccacggaattcgcacagctgatcaagaggcaacagcagcaaaggcagcagcaacagcagcaacagcagcagcaggaataccaggaactctttcggcacatgaaccagggagacgctgggtcactcgcaccatcactcggaggccaaagcatgacagaacgacaggcgctttcttaccagaacgccgacagctatcatcaccacacctctccgcaacatttgctgcagattagggcacaggagtgcgtgagtcaggcatcaagccctaccccaccacacggatacgcccaccaaccggctctgatgcactccgagagcatggaggaagattgttcatgtgagggtgctaaggacggttttcaggactcgaagagttcctccacattgaccaaaggttgccacgattcaccactgctgctcagcactggggggccaggggaccccgagtccctccttggcactgtgagtcacgctcaggagctgggcatacatccttatggacatcagcccactgcagcgttttcgaaaaataaggtccctagcagggagcctgtgattggcaactgtatggaccgaagctcaccgggacaggctgttgaactcccagatcataacgggctgggttaccccgcccgaccctctgtacatgaacaccaccgcccccgcgctctgcagagacatcacaccattcagaattccgatgacgcctacgtacagctggataacttgcctggaatgagcctggtcgccggaaaagccctgagctccgccagaatgagcgacgctgtgttgtcccagagcagcctgatgggatcacaacaattccaggatggcgagaatgaggagtgtggcgccagcctgggcgggcacgaacatcctgacctctccgacggctcccagcacttgaattccagctgttatcccagcacgtgcatcaccgacattctgctgtcctataagcatcctgaagtctcattctccatggagcaagctggcgtgtag

SEQ ID NO: 218161 - DNA, 3792 bp, Artificial Sequence
  derived and/or modified sequence
atgcctgccagaatcggctactacgaaatagatcggacaattgggaaaggcaatttcgccgtggtcaaacgggcaacccatctggtcaccaaggcaaaggtggccatcaagattattgataagacccagctggatgaggagaatctaaagaagattttcagagaggtccaaattatgaagatgctgtgccacccgcacataattagactttaccaagtgatggaaactgagcgcatgatataccttgtcacagagtacgctagtggcggtgagattttcgaccacctggtggcccatggacggatggccgagaaggaggcccgacgtaagttcaaacagatcgttaccgcagtatacttttgtcattgccgcaatatcgtgcacagggatctgaaagctgaaaacctgctgctggatgccaaccttaatataaagattgctgattttggcttcagcaacctctttactccgggacaactgttaaagacttggtgtggcagtcctccttacgcagctcccgagctttttgaagggaaggaatacgatggacccaaggtggatatttggtccctgggagtggtgctttatgtcctggtctgcggcgcacttccttttgatgggagcactctacagaatttaagagccagagtcctgtctgggaaattccggattccgtttttcatgtctaccgaatgcgaacacctgattcggcacatgctcgttctggatcctaacaagaggctcagtatggagcagatttgcaaacacaaatggatgaagcttggcgacgccgatcctaatttcgatcggttgatcgctgaatgccaacagttaaaagaggagagacaggtggatccactcaacgaagatgtgttgttggccatggaagacatgggcttggataaagagcaaactctacagagcttgcggtcagatgcgtatgatcactactccgcaatttactcacttctctgcgaccggcacaaaaggcataaaacgctccgccttggagccctcccttcaatgccgcgagcccttgccttccaggcccctgtgaatatacaagctgaacaagcgggtactgctatgaacatctcggtcccccaggtgcagctaataaacccggaaaaccaaattgtcgagccagacggcactctgaatctcgatagtgatgagggcgaagaaccttctccggaagccctggtccgctacctgagcatgcggcgtcataccgtcggagtagcagacccacggactgaagtgatggaagacctgcagaaactgcttccaggattcccaggtgtcaacccacaggctccattcctacaggttgcccctaatgtaaacttcatgcacaatctgctgcccatgcaaaatctgcagccaacgggccagctagagtacaaggaacaatccctcttgcagccccctacactgcaactgctgaatgggatgggccctctaggtcgtcgggcatctgatggaggggcaaacatccaactgcacgcccagcagctgctgaagcggcctcgcggtccatcccccctcgtgacaatgacgcccgcagtgcccgcagttacacctgtcgatgaggaaagttccgatggggaacccgaccaagaggccgtccaatcatcaacatacaaagacagtaacacacttcaccttcccaccgaacgctttagccccgtgagaagattttctgacggagccgcttccattcaagctttcaaagctcatcttgaaaaaatgggcaataattccagcataaagcaactacaacaagagtgtgagcagcttcagaagatgtatgggggacagatcgacgaacgaacccttgaaaagacccagcaacagcatatgctctaccagcaggagcagcatcatcagattctgcaacagcagattcaggacagtatttgtccaccgcaaccttccccacctcttcaggccgcatgcgaaaaccagccagccctgctgactcatcagctgcagaggctccgaatccagccatcatcccctcctcccaatcatccgaataatcacctgttcagacagccctcgaactcgccaccacctatgtccagcgcaatgatccagccccacggtgccgcaagctcctctcagttccaggggcttccatcacggagcgctattttccagcagcagcccgagaactgctcttcaccaccaaacgtagcgctaacttgcctcgggatgcaacagcctgcgcagtcacagcaggtgacgatccaggtgcaggagccggtggacatgttatccaacatgcccggtactgccgctggaagtagtggaagagggatatccatctccccttcggctgggcagatgcagatgcagcatcgtacaaatctcatggcaacgctctcttacggtcacaggccactgtctaaacaactgtctgcggactccgccgaagcacacagcttgaatgtcaacagattcagccctgccaactatgatcaagcacacctgcatccgcatctttttagtgaccaatcccggggaagcccttcttcatactctccctctacgggcgtgggattttctcctacccaggcactgaaagtgccaccactggatcagttccctactttccccccttcggctcaccagcagccccctcattacacaacgtccgcgctgcagcaggctctgctctcccctaccccccctgattatacaagacaccaacaggtcccccatattctgcaggggttactgtcaccacggcatagcctgacaggacactcagacatacgcctaccgcctaccgagttcgctcagctaatcaagcgccaacagcagcagagacagcagcagcagcagcagcagcagcagcaggaataccaagaactgtttagacacatgaaccagggggacgccggttcgctcgccccatccctgggcggacagtccatgaccgagcgccaggccctgtcataccaaaacgccgactcctaccaccaccatacttccccccagcacctcttacagattagagcccaggagtgcgtgtcgcaagcctcaagtccaaccccacctcacggctacgctcatcaacccgctttaatgcactcagagtccatggaggaggactgcagctgcgagggagctaaagatggcttccaagactctaagagcagctccaccctcacgaaagggtgccacgattctccattattgctctcaactggaggacccggagaccctgaatctctgctgggcaccgtgtcccatgctcaggagctgggaattcacccatatggtcaccaacccaccgctgcctttagcaaaaataaagtaccctcaagggagccggtgattgggaactgcatggacaggagctctccaggacaagctgttgaactgcccgatcacaatgggctcggctatcctgctagaccttccgtgcacgaacatcaccgcccacgggctctgcagcggcaccatactatccaaaattctgacgacgcctatgtgcaattagacaacctgccagggatgtctctggtcgcgggaaaggccctctccagtgcacggatgagcgatgcggtgttgtcgcagtccagccttatggggtcccaacagtttcaggatggagagaatgaggagtgtggcgcttccttaggcggacacgaacacccggatctttctgatgggtcacagcatttaaattcatcctgctacccgtctacgtgtatcactgatatcctgcttagttataaacatcccgaagtcagtttttcgatggaacaagcaggggtttag

SEQ ID NO: 218162 - DNA, 3966 bp, Artificial Sequence
  derived and/or modified sequence
atggccgctgccgcagcatcaggggctggcggtgccgcaggcgcaggaaccggtggggctgggccagccggtagattgctgccaccaccggcaccgggttcacccgcagcgcctgccgcagtgtctcccgcagctggacagcctagaccacccgcaccagcctctaggggtcctatgcccgctcgaattggttattacgagatcgaccggactattggaaagggtaactttgcagttgtgaaaagagctactcacctcgtgacaaaagcaaaagtcgccataaagatcatcgacaaaacgcagctggatgaagagaaccttaagaagatctttcgggaagtgcagattatgaaaatgctgtgtcatccgcatattattagactgtatcaggttatggagactgagaggatgatttatttggtgaccgaatatgccagtgggggagaaatattcgaccatcttgtggcccacggtcgcatggcagaaaaggaagccagaaggaaattcaaacagattgtgacagccgtctatttctgtcattgtcgcaacatcgttcaccgagatctgaaagcagaaaaccttctgctggatgccaacttgaacataaagattgccgactttgggttttctaacttgttcacaccgggacaactcttgaaaacttggtgcgggtcccctccatatgctgctccagagctgttcgagggtaaagaatatgacggtccaaaggtggacatttggagtctcggggttgtgctatacgtgttagtatgcggcgctctgcccttcgacggctccacacttcagaacctccgcgctcgggtcctttccgggaagttcaggatccccttttttatgagcactgagtgcgaacatttaatacgacacatgctggtgctggatcccaataaaagactatcaatggaacagatatgcaaacataaatggatgaaactcggcgacgctgacccgaattttgatcgactcatagccgagtgccaacagctgaaagaagagaggcaggtagaccccttgaacgaagacgtgttgctcgcaatggaagacatggggttggacaaggagcaaacgctgcagagtctgcggagcgatgcctatgatcactattccgccatctattctcttttgtgtgacaggcataagaggcacaagaccctgaggctcggggctcttcctagcatgcccagagcgctcgccttccaggctcccgtaaacatccaggccgaacaggcaggcaccgccatgaacatcagtgtgccccaagtccagctgataaaccccgagaaccagattgtcgaaccagatggaaccctgaacttggattccgacgagggagaagaaccctcaccagaagcgctcgtccgctatctgtcaatgcggagacatacggttggcgtggctgaccctaggacagaagtgatggaagatttacaaaaattactgcctggatttccgggagtcaatccgcaggcgccattcctgcaggtggccccaaacgtgaacttcatgcacaacctgttgcctatgcaaaatctacagccaaccggccagttggaatacaaggagcagagcctgctgcagccccctacgcttcagctccttaacgggatggggcctctggggagacgcgcatccgacggcggagccaatatccagctgcacgcacagcagctgttgaagagacctcgcggtcccagccccttagtgacgatgaccccagccgtcccagcggtcacccctgtggacgaggagagctccgatggagagcccgatcaggaggccgtgcagtctagtacctacaaggactctaatacactgcatctcccaacggagcgcttctcgccagttcggagattttcagacggggctgccagtatccaggcatttaaagctcaccttgaaaaaatgggaaataactccagcattaaacagctccagcaagagtgcgagcagctccaaaagatgtatggaggacagattgatgaacggacattagaaaaaacccaacagcagcacatgctctaccagcaggagcagcaccatcagatactgcagcagcaaatccaagacagtatctgtcctccacagccgagtcctccactccaggccgcttgcgaaaatcaacccgctctgctgacacatcaactacagcggctaagaatccagccatctagtccacccccaaaccatccaaataatcatttattcagacaaccctctaactcaccacctccgatgagctcggctatgattcagcctcatggggctgccagtagttcccaattccaggggttgcctagtcgatcagccatttttcagcagcagcctgagaactgttccagtcctcctaacgtggccctcacgtgtctcggcatgcaacagccagcacagtcccaacaagtcactatccaggtgcaagaaccagtggacatgctcagcaacatgccaggtactgcagctgggtcttccgggcgtgggatatctatctcaccctcagccggtcagatgcagatgcaacacagaaccaatcttatggcaaccctctcctatggccatagacccctaagcaaacaactctcagcggactctgcagaggcccatagtctgaatgttaataggttcagtcccgctaattatgaccaagctcatctgcatcctcatctgttttccgaccagagccgcggttctccctcttcatattccccttccaccggagttgggttctctcctacgcaagccctgaaggtgccacctctggatcagtttcctacttttcctccttctgctcaccaacagcctccccactacactactagcgccctgcaacaggctttactgtctcctactccccctgactatacccgacaccagcaggtgccccacattctgcagggactgctttcgccgagacactcattgacgggacactcagacatcagactgccacctactgagttcgcgcagctaattaagagacagcaacaacagaggcaacagcaacagcagcaacagcaacagcaggaataccaagagttgttccggcacatgaaccagggagatgcgggatctttggctccttccctcgggggacaaagcatgaccgagaggcaggctctgtcttaccagaatgccgactcttaccatcaccacacatcaccccagcacttgttgcagatcagggcccaagaatgcgtaagccaggctagcagccctacccctcctcacgggtacgcccaccagcctgcattgatgcacagtgagtcaatggaggaagactgctcatgtgaaggcgcaaaggacggattccaagactctaagtcttcttccacccttacaaagggatgccacgattcacccttgctgttgtctaccggtgggcctggcgaccctgaatcactcctgggaaccgtcagtcatgcacaagaattgggtatccacccttatggccatcagcccacagcagccttttctaaaaataaagtgcctagcagagaacccgtgattggcaattgtatggaccggtcaagccctggccaggccgtcgaactgcccgaccacaacggcctgggatatcccgcacgccctagtgtccacgagcatcaccgcccaagggctttgcaaagacaccataccatccagaacagcgatgatgcgtatgtgcaattggataatctgcccggaatgagcctggttgccggaaaggccctgagttcagcacgtatgagtgatgctgtgctgagccagagcagtctgatgggatcccagcagttccaggatggtgaaaacgaagaatgcggggctagtttaggaggacacgagcaccccgacttgagtgatggcagccagcatctgaactcttcatgctatccctcaacctgcatcacagatatcctgctgtcttataagcaccctgaagtcagcttctctatggagcaggccggtgtctag

SEQ ID NO: 218163 - DNA, 6067 bp, Artificial Sequence
  derived and/or modified sequence
cagccgcgtcccccagccccggcctcccgcggacccatgcccgcccgtatcggctactacgagatcgaccgcaccatcggcaagggcaacttcgcggtggtcaagcgggccacgcacctcgtcaccaaggccaaggttgctatcaagatcatagataagacccagctggatgaagaaaacttgaagaagattttccgggaagttcaaattatgaagatgctttgccacccccatatcatcaggctctaccaggttatggagacagaacggatgatttatctggtgacagaatatgctagtggaggggaaatatttgaccacctggtggcccatggtagaatggcagaaaaggaggcacgtcggaagttcaaacagatcgtcacagctgtctatttttgtcactgtcggaacattgttcatcgtgatttaaaagctgaaaatttacttctggatgccaatctgaatatcaaaatagcagattttggtttcagtaacctcttcactcctgggcagctgctgaagacctggtgtggcagccctccctatgctgcacctgaactctttgaaggaaaagaatatgatgggcccaaagtggacatctggagccttggagttgtcctctacgtgcttgtgtgcggtgccctgccatttgatggaagcacactgcagaatctgcgggcccgcgtgctgagtggaaagttccgcatcccattttttatgtccacagaatgtgagcatttgatccgccatatgttggtgttagatcccaataagcgcctctccatggagcagatctgcaagcacaagtggatgaagctaggggacgccgatcccaactttgacaggttaatagctgaatgccaacaactaaaggaagaaagacaggtggaccccctgaatgaggatgtcctcttggccatggaggacatgggactggacaaagaacagacactgcagtcattaagatcagatgcctatgatcactatagtgcaatctacagcctgctgtgtgatcgacataagagacataaaaccctgcgtctcggagcacttcctagcatgccccgagccctggcctttcaagcaccagtcaatatccaggcggagcaggcaggtactgctatgaacatcagcgttccccaggtgcagctgatcaacccagagaaccaaattgtggagccggatgggacactgaatttggacagtgatgagggtgaagagccttcccctgaagcattggtgcgctatttgtcaatgaggaggcacacagtgggtgtggctgacccacgcacggaagttatggaagatctgcagaagctcctacctggctttcctggagtcaacccccaggctccattcctgcaggtggcccctaatgtgaacttcatgcacaacctgttgcctatgcaaaacttgcaaccaaccgggcaacttgagtacaaggagcagtctctcctacagccgcccacgctacagctgttgaatggaatgggcccccttggccggagggcatcagatggaggagccaacatccaactgcatgcccagcagctgctgaagcgcccacggggaccctctccgcttgtcaccatgacaccagcagtgccagcagttacccctgtggacgaggagagctcagacggggagccagaccaggaagctgtgcagagctctacctacaaggactccaacactctgcacctccctacggagcgtttctcccctgtgcgccggttctcagatggggctgcgagcatccaggccttcaaagctcacctggaaaaaatgggcaacaacagcagcatcaaacagctgcagcaggagtgtgagcagctgcagaagatgtacggggggcagattgatgaaagaaccctggagaagacccagcagcagcatatgttataccagcaggagcagcaccatcaaattctccagcaacaaattcaagactctatctgtcctcctcagccatctccacctcttcaggctgcatgtgaaaatcagccagccctccttacccatcagctccagaggttaaggattcagccttcaagcccaccccccaaccaccccaacaaccatctcttcaggcagcccagtaatagtcctccccccatgagcagtgccatgatccagcctcacggggctgcatcttcttcccagtttcaaggcttaccttcccgcagtgcaatctttcagcagcaacctgagaactgttcctctcctcccaacgtggcactaacctgcttgggtatgcagcagcctgctcagtcacagcaggtcaccatccaagtccaagagcctgttgacatgctcagcaacatgccaggcacagctgcaggctccagtgggcgcggcatctccatcagccccagtgctggtcagatgcagatgcagcaccgtaccaacctgatggccaccctcagctatgggcaccgtcccttgtccaagcagctgagtgctgacagtgcagaggctcacagcttgaacgtgaatcggttctcccctgctaactacgaccaggcgcatttacacccccatctgttttcggaccagtcccggggttcccccagcagctacagcccttcaacaggagtggggttctctccaacccaagccctgaaagtccctccacttgaccaattccccaccttccctcccagtgcacatcagcagccgccacactataccacgtcggcactacagcaggccctgctgtctcccacgccgccagactatacaagacaccagcaggtaccccacatccttcaaggactgctttctccccggcattcgctcaccggccactcggacatccggctgcccccaacagagtttgcacagctcattaaaaggcagcagcaacaacggcagcagcagcagcaacagcagcaacagcaagaataccaggaactgttcaggcacatgaaccaaggggatgcggggagtctggctcccagccttgggggacagagcatgacagagcgccaggctttatcttatcaaaatgctgactcttatcaccatcacaccagcccccagcatctgctacaaatcagggcacaagaatgtgtctcacaggcttcctcacccaccccgccccacgggtatgctcaccagccggcactgatgcattcagagagcatggaggaggactgctcgtgtgagggggccaaggatggcttccaagacagtaagagttcaagtacattgaccaaaggttgccatgacagccctctgctcttgagtaccggtggacctggggaccctgaatctttgctaggaactgtgagtcatgcccaagaattggggatacatccctatggtcatcagccaactgctgcattcagtaaaaataaggtgcccagcagagagcctgtcatagggaactgcatggatagaagttctccaggacaagcagtggagctgccggatcacaatgggctcgggtacccagcacgcccctccgtccatgagcaccacaggccccgggccctccagagacaccacacgatccagaacagcgacgatgcttatgtacagctggataacttgccaggaatgagtctcgtggctgggaaagcacttagctctgcccggatgtcggatgcagttctcagtcagtcttcgctcatgggcagccagcagtttcaggatggggaaaatgaggaatgtggggcaagcctgggaggtcatgagcacccagacctgagtgatggcagccagcatttaaactcctcttgctatccatctacgtgtattacagacattctgctcagctacaagcaccccgaagtctccttcagcatggagcaggcaggcgtgtaacaagaaacagagagttttgtgtacagcttgggaatgaaaaggttgattgtaaacccacagtatctagcagcgttgtgccaaattgcccttgtgtttctctccacccaaaatatcacagctgctttcctcacatttggttcatccgtgtgctgttcttttgggttctgagagggttttgccatgtttgcttgtatgaccaagtcaccaaggaaataaacaggaaggaaatccatgttctccatcttttgtgaaagtatatttgagttggtggttttttgttttgtttgggggtttgtgttttgttttgtttttggtatgttttcttccagaggtgatatactttcttttttttcttcctttcttttttttctttcgttccttttttgaaacaggagagcaaagcagttagagttcagaggccagcggcctcagggccactccctccctagccttcatcagcagagcaccctccatccccctgcattgctcttctgtgaaagcaaatactaaaggatgccatcctctggaatcctaatggcaggcaaagggagagaggaagggtgacggcttctggcacttagaaaacaaaaagaacaaaaaaagagaaacccccaagcctggaacgcagagaggtctttactgctgggatccacggaaaacatgtctgtcctagccaagatcatatgaagagtttggcacggaggctgagaatgacctggcatagatggtttgccagttaggatgtctcaatttgagcctttgcttttggtggataactcagctcccctcttgtaacctggaaagttggttgcctttatcatcctgctggttttatccatggactgaacacccaacagcagtgcactatgctttctatggcatctttcattctcattttatattgtgctataaaaaggattgtttctccatatatatattatatatgtgtgtatatatataatataatatatgtgtatatatatattatatatataatatataatataatatattatatatatattatatatataatatatatataaaatatatatatatatgctctcctctttcagcctctttgtcacagggaagaagtgtaggaggttgccttgggccctgcctctctcctaacctcctcttccccactgggtaccctcagcccctatattttaattcttgatcatgtagaaattgtttttggtaaatgttgatattattgttattatcattattaataaataaagagaaaaggaatttttgtttaaatgagaaatgtttaaccagattctgttctatttgaattgtgacttgcaccttttgttcaaagtatttcctttaggcattgtaattgtgaacagctcttacttgtgccagtgacagatgcagtggtctcctttccccagttgaagcagtgcatacgcagtagctattatttgtgttatctttatttctcttcattgttagaaaccaaagtcttctctgctggctggggctgagagagggtctgggttatctccttctgatcttcaaaacaagagagagaccttgaatacactgactcttccaccctttttttttctgggaaaggagagcaagaggtcccgagtcccctcctagtctttcatcctgaatttgcacagaggaaagcgggtgcccggcatggccatcctgatgttgctggcgggatccccatgcaccttgtccttctccactgatactggcagctcggctcctggacccaagatcccttgagtggaattctgcagtgcaagagcccttcgtgggagctgtcccatgtttccatggtccccagtctcccctccacttggtggggtcaccaactactcaccagaagggggcttaccaagaaagccctaaaaagctgttgacttatctgcgcttgttccaactcttatgcccccaacctgccctaccaccaccacgcgctcagcctgatgtgtttacatggtactgtatgtatgggagagcagactgcaccctccagcaacaacagatgaaagccagtgagcctactaaccgtgccatcttgcaaactacactttaaaaaaaactcattgctttgtattgtagtaaccaatatgtgcagtatacgttgaatgtatatgaacatactttcctatttctgttctttgaaaatgtcagaaatatttttttctttctcattttatgttgaactaaaaaggattaaaaaaaaaatctccagactcaagttgct

SEQ ID NO: 218164 - DNA, 3792 bp, Artificial Sequence
  derived and/or modified sequence
atgcccgccagaatcggctactacgagatcgacagaaccatcggcaagggcaacttcgccgtggtgaagagagccacccacctggtgaccaaggccaaggtggccatcaagatcatcgacaagacccagctggacgaggagaacctgaagaagatcttcagagaggtgcagatcatgaagatgctgtgccacccccacatcatcagactgtaccaggtgatggagaccgagagaatgatctacctggtgaccgagtacgccagcggcggcgagatcttcgaccacctggtggcccacggcagaatggccgagaaggaggccagaagaaagttcaagcagatcgtgaccgccgtgtacttctgccactgcagaaacatcgtgcacagagacctgaaggccgagaacctgctgctggacgccaacctgaacatcaagatcgccgacttcggcttcagcaacctgttcacccccggccagctgctgaagacctggtgcggcagccccccctacgccgcccccgagctgttcgagggcaaggagtacgacggccccaaggtggacatctggagcctgggcgtggtgctgtacgtgctggtgtgcggcgccctgcccttcgacggcagcaccctgcagaacctgagagccagagtgctgagcggcaagttcagaatccccttcttcatgagcaccgagtgcgagcacctgatcagacacatgctggtgctggaccccaacaagagactgagcatggagcagatctgcaagcacaagtggatgaagctgggcgacgccgaccccaacttcgacagactgatcgccgagtgccagcagctgaaggaggagagacaggtggaccccctgaacgaggacgtgctgctggccatggaggacatgggcctggacaaggagcagaccctgcagagcctgagaagcgacgcctacgaccactacagcgccatctacagcctgctgtgcgacagacacaagagacacaagaccctgagactgggcgccctgcccagcatgcccagagccctggccttccaggcccccgtgaacatccaggccgagcaggccggcaccgccatgaacatcagcgtgccccaggtgcagctgatcaaccccgagaaccagatcgtggagcccgacggcaccctgaacctggacagcgacgagggcgaggagcccagccccgaggccctggtgagatacctgagcatgagaagacacaccgtgggcgtggccgaccccagaaccgaggtgatggaggacctgcagaagctgctgcccggcttccccggcgtgaacccccaggcccccttcctgcaggtggcccccaacgtgaacttcatgcacaacctgctgcccatgcagaacctgcagcccaccggccagctggagtacaaggagcagagcctgctgcagccccccaccctgcagctgctgaacggcatgggccccctgggcagaagagccagcgacggcggcgccaacatccagctgcacgcccagcagctgctgaagagacccagaggccccagccccctggtgaccatgacccccgccgtgcccgccgtgacccccgtggacgaggagagcagcgacggcgagcccgaccaggaggccgtgcagagcagcacctacaaggacagcaacaccctgcacctgcccaccgagagattcagccccgtgagaagattcagcgacggcgccgccagcatccaggccttcaaggcccacctggagaagatgggcaacaacagcagcatcaagcagctgcagcaggagtgcgagcagctgcagaagatgtacggcggccagatcgacgagagaaccctggagaagacccagcagcagcacatgctgtaccagcaggagcagcaccaccagatcctgcagcagcagatccaggacagcatctgccccccccagcccagcccccccctgcaggccgcctgcgagaaccagcccgccctgctgacccaccagctgcagagactgagaatccagcccagcagccccccccccaaccaccccaacaaccacctgttcagacagcccagcaacagccccccccccatgagcagcgccatgatccagccccacggcgccgccagcagcagccagttccagggcctgcccagcagaagcgccatcttccagcagcagcccgagaactgcagcagcccccccaacgtggccctgacctgcctgggcatgcagcagcccgcccagagccagcaggtgaccatccaggtgcaggagcccgtggacatgctgagcaacatgcccggcaccgccgccggcagcagcggcagaggcatcagcatcagccccagcgccggccagatgcagatgcagcacagaaccaacctgatggccaccctgagctacggccacagacccctgagcaagcagctgagcgccgacagcgccgaggcccacagcctgaacgtgaacagattcagccccgccaactacgaccaggcccacctgcacccccacctgttcagcgaccagagcagaggcagccccagcagctacagccccagcaccggcgtgggcttcagccccacccaggccctgaaggtgccccccctggaccagttccccaccttcccccccagcgcccaccagcagcccccccactacaccaccagcgccctgcagcaggccctgctgagccccaccccccccgactacaccagacaccagcaggtgccccacatcctgcagggcctgctgagccccagacacagcctgaccggccacagcgacatcagactgccccccaccgagttcgcccagctgatcaagagacagcagcagcagagacagcagcagcagcagcagcagcagcagcaggagtaccaggagctgttcagacacatgaaccagggcgacgccggcagcctggcccccagcctgggcggccagagcatgaccgagagacaggccctgagctaccagaacgccgacagctaccaccaccacaccagcccccagcacctgctgcagatcagagcccaggagtgcgtgagccaggccagcagccccacccccccccacggctacgcccaccagcccgccctgatgcacagcgagagcatggaggaggactgcagctgcgagggcgccaaggacggcttccaggacagcaagagcagcagcaccctgaccaagggctgccacgacagccccctgctgctgagcaccggcggccccggcgaccccgagagcctgctgggcaccgtgagccacgcccaggagctgggcatccacccctacggccaccagcccaccgccgccttcagcaagaacaaggtgcccagcagagagcccgtgatcggcaactgcatggacagaagcagccccggccaggccgtggagctgcccgaccacaacggcctgggctaccccgccagacccagcgtgcacgagcaccacagacccagagccctgcagagacaccacaccatccagaacagcgacgacgcctacgtgcagctggacaacctgcccggcatgagcctggtggccggcaaggccctgagcagcgccagaatgagcgacgccgtgctgagccagagcagcctgatgggcagccagcagttccaggacggcgagaacgaggagtgcggcgccagcctgggcggccacgagcaccccgacctgagcgacggcagccagcacctgaacagcagctgctaccccagcacctgcatcaccgacatcctgctgagctacaagcaccccgaggtgagcttcagcatggagcaggccggcgtgtag

SEQ ID NO: 218165 - protein, 1382 aa, Artificial Sequence
  derived and/or modified sequence
MDEEENHYVSQLREVYSSCDTTGTGFLDRQELTQLCLKLHLEQQLPVLLQTLLGNDHFARVNFEEFKEGFVAVLSSNAGVRPSDEDSSSLESAASSAIPPKYVNGSKWYGRRSRPELCDAATEARRVPEQQTQASLKSHLWRSASLESVESPKSDEEAESTKEAQNELFEAQGQLQTWDSEDFGSPQKSCSPSFDTPESQIRGVWEELGVGSSGHLSEQELAVVCQSVGLQGLEKEELEDLFNKLDQDGDGKVSLEEFQLGLFSHEPALLLESSTRVKPSKAWSHYQVPEESGCHTTTTSSLVSLCSSLRLFSSIDDGSGFAFPDQVLAMWTQEGIQNGREILQSLDFSVDEKVNLLELTWALDNELMTVDSAVQQAALACYHQELSYQQGQVEQLARERDKARQDLERAEKRNLEFVKEMDDCHSTLEQLTEKKIKHLEQGYRERLSLLRSEVEAERELFWEQAHRQRAALEWDVGRLQAEEAGLREKLTLALKENSRLQKEIVEVVEKLSDSERLALKLQKDLEFVLKDKLEPQSAELLAQEERFAAVLKEYELKCRDLQDRNDELQAELEGLWARLPKNRHSPSWSPDGRRRQLPGLGPAGISFLGNSAPVSIETELMMEQVKEHYQDLRTQLETKVNYYEREIAALKRNFEKERKDMEQARRREVSVLEGQKADLEELHEKSQEVIWGLQEQLQDTARGPEPEQMGLAPCCTQALCGLALRHHSHLQQIRREAEAELSGELSGLGALPARRDLTLELEEPPQGPLPRGSQRSEQLELERALKLQPCASEKRAQMCVSLALEEEELELARGKRVDGPSLEAEMQALPKDGLVAGSGQEGTRGLLPLRPGCGERPLAWLAPGDGRESEEAAGAGPRRRQAQDTEATQSPAPAPAPASHGPSERWSRMQPCGVDGDIVPKEPEPFGASAAGLEQPGARELPLLGTERDASQTQPRMWEPPLRPAASCRGQAERLQAIQEERARSWSRGTQEQASEQQARAEGALEPGCHKHSVEVARRGSLPSHLQLADPQGSWQEQLAAPEEGETKIALEREKDDMETKLLHLEDVVRALEKHVDLRENDRLEFHRLSEENTLLKNDLGRVRQELEAAESTHDAQRKEIEVLKKDKEKACSEMEVLNRQNQNYKDQLSQLNVRVLQLGQEASTHQAQNEEHRVTIQMLTQSLEEVVRSGQQQSDQIQKLRVELECLNQEHQSLQLPWSELTQTLEESQDQVQGAHLRLRQAQAQHLQEVRLVPQDRVAELHRLLSLQGEQARRRLDAQREEHEKQLKATEERVEEAEMILKNMEMLLQEKVDKLKEQFEKNTKSDLLLKELYVENAHLVRALQATEEKQRGAEKQSRLLEEKVRALNKLVSRIAPAALSV

SEQ ID NO: 218166 - DNA, 4149 bp, Artificial Sequence
  derived and/or modified sequence
atggatgaagaggagaatcactatgtcagtcagctgcgtgaggtctatagtagctgcgatactacgggcactggattcttagaccggcaggaactcacccagttgtgcctaaagctgcatcttgagcagcagctgccggtcctcctacaaactttgctgggcaatgaccacttcgcccgtgtgaacttcgaggagttcaaggagggtttcgtggctgtgctttcaagcaatgcaggcgtcaggcccagtgatgaagacagctcatccctggaatcagctgccagtagtgcgattccccccaagtatgtcaacgggtctaaatggtacggcaggcgctcaagaccggagttatgtgacgcagccaccgaggcccgaagagtgcccgaacagcaaactcaagcaagcctgaaaagtcacctgtggcgctccgcatccttggaatctgtggagagcccgaaaagtgacgaggaggcagagagcacaaaagaagcccagaatgagctgtttgaggcacaaggccagctgcagacttgggattctgaggacttcgggtccccccagaagagctgctcccccagcttcgacacccccgagagccagattcgaggagtgtgggaagagctaggcgtcggatcttcaggccacctgtccgaacaagagttagccgtggtctgccagagtgtgggcctgcaaggcctggaaaaggaggaattggaggacctgttcaataagctggaccaagatggggacgggaaggtaagcctggaggagtttcaattgggcctcttcagccacgaacctgccctgctgctcgagagctccactagggttaaacccagcaaagcttggtcccactatcaggtgcccgaggaatccggctgtcacactactactacaagcagcctggtgagtttgtgtagctctctgcgactttttagtagtattgacgatggtagcggcttcgcttttccagatcaggtgctcgccatgtggacccaggagggtatccagaatggcagagaaattttgcagtccctggatttctccgtagatgaaaaggtcaacctccttgaactgacctgggctttagataacgaactgatgactgttgacagcgccgtgcagcaggcagccctcgcttgctaccaccaggaactgagttaccaacagggacaagtcgagcagctggctcgagagcgtgacaaagcacgccaagatctcgagcgtgcggagaagcgtaacttggaattcgttaaagagatggacgactgtcacagcacattagaacagctgactgagaaaaagattaagcacctcgagcagggatatcgggaacgactcagcctgctacgatctgaagttgaagcagagagggaactcttttgggaacaagctcaccgccagagggcagctctggaatgggacgtcggcagattacaggccgaggaagcgggactccgtgaaaaactgactctggcattgaaggaaaactctcggctgcagaaagagatcgttgaggtggtcgagaagctcagcgacagcgagcggcttgctctgaaattgcaaaaagacctggaatttgtcctcaaggacaagctggaaccccagtccgccgagctgctggcccaggaggagcgctttgccgctgtcctgaaggagtacgagttaaaatgcagagacctgcaggacaggaatgatgaattgcaagcagaacttgaaggattgtgggcgcggttgccgaagaatcgccattctccatcttggagccccgatgggcgtcggcgccaactgcccggtcttggacctgcagggatttcttttctcgggaatagtgctcctgtgtccatagaaacagaattgatgatggagcaagtgaaagaacattatcaggacttgcgtacccagctcgagactaaagtcaattattacgaaagagagattgctgcactaaaacgcaacttcgaaaaagagcggaaggacatggagcaggcccgccgtagggaggtgagcgtgctagagggacagaaagcagatctcgaagagctccacgaaaagtcacaggaggtcatttggggcttgcaagaacagttacaagatacggctagaggacctgaaccagagcagatgggactggccccctgctgtacccaggcactgtgcggactggccctgcgccatcatagccatttgcagcagatccgccgcgaggccgaggccgaattaagcggtgaactctcaggcctaggcgctctgccagccaggcgcgacctcactctagaactggaggagccccctcagggcccattaccccgtggcagtcaacgatctgaacagctagagctggagagggcacttaagttacaaccatgtgcttcggagaaacgtgcacagatgtgcgtgtcccttgccctcgaggaagaggaattggaattggcacgggggaagagggttgacggaccctccttggaggccgagatgcaggcgctgccaaaagacggtttggtggccgggtctggccaggagggcactcgtggccttctgcccttgcgccctgggtgtggagagaggcctctagcttggcttgcccctggagacggtcgggagtctgaggaagccgccggtgccggccctaggagaaggcaagcccaggataccgaggctacccagtcacctgctccagcccccgcccccgctagtcatggccctagtgaacgttggtctcggatgcaaccctgtggggtcgacggtgacattgtgcctaaagaacctgagccatttggtgcatccgcggccggtctcgagcagccaggcgctcgcgaattacccctgctgggaacagaacgggacgcgtcccaaacgcagcctcggatgtgggaaccacccctcaggccggcggccagttgccgcgggcaggcagagaggctgcaagctattcaggaagagcgcgcaagaagttggtctcgtggtacccaggaacaggccagtgaacagcaagctagggcagaaggtgcccttgagccaggatgtcacaagcacagtgtggaggtagctcgacggggttctttaccctctcacctgcagctggcagatccgcagggaagttggcaggagcagctggccgcaccagaggagggggaaacgaaaattgctctcgagcgcgaaaaagacgatatggagaccaaactattgcatcttgaggacgtcgtgcgcgctctcgagaaacacgtcgatctgagagaaaacgaccgtcttgaattccacaggctctctgaggagaacactctgctcaagaatgatctgggccgtgtacgtcaggaacttgaggctgcggaatccacgcacgacgctcaacgtaaagagatcgaggtccttaagaaggacaaggagaaggcctgttcagagatggaggtgcttaaccgacagaaccagaattataaggaccaactgtcccaactcaatgtcagagtgctgcagctgggccaggaagcatctacacaccaagctcagaacgaggagcatcgggtcactatacaaatgctcactcagtcccttgaagaagtagtacgctccgggcagcagcaaagcgaccagatccagaagctgagggtcgaactggaatgcctcaatcaggaacaccagagcctgcaactgccatggagcgagttaactcaaaccctcgaagagagtcaggatcaggttcagggagctcacctacgcctccgccaagcacaagcacagcacctacaggaggtgcgcctagttccccaggatcgtgtggctgaactccaccgtctgctgtcccttcagggcgaacaggcgcggcggaggcttgacgctcaacgggaggagcatgaaaaacagctcaaagcaactgaagagagggtagaagaggcggaaatgatcctcaaaaatatggaaatgctgttgcaggaaaaggtggacaaactgaaggaacagtttgaaaaaaataccaagagcgacctgctgttgaaagaattgtatgtagagaacgcccatctcgtaagggccctgcaagccacagaggagaaacaaagaggggccgagaagcagtctcgcttattggaagagaaggtgcgggcactgaacaaactagtcagtagaattgcccctgcggcacttagtgtgtag

SEQ ID NO: 218167 - DNA, 4149 bp, Artificial Sequence
  derived and/or modified sequence
atggatgaggaggagaaccactacgtgtcccagctgcgggaggtgtacagcagctgtgacaccaccggcaccggcttcctggaccggcaggagctgacccagctgtgcctgaagctgcacctggagcagcagctgcctgtgctgctgcagaccctgctgggcaatgaccactttgcccgggtgaactttgaggagttcaaggagggctttgtggccgtgctgagcagcaatgctggggtgcggcccagtgatgaggacagcagcagcctggagagcgctgccagcagcgccatcccccccaagtatgtgaatggcagcaagtggtatggaagaagaagcaggcctgagctgtgtgatgctgccacagaggccaggagagtgcctgagcagcagacccaggccagcctgaagagccacctgtggaggtctgccagcctggagagcgtggagagccccaagagtgatgaggaggccgagagcaccaaggaggcccagaatgagctgtttgaggcccagggccagctgcagacctgggacagtgaagattttggcagcccccagaagagctgcagccccagctttgacaccccagagagccagatccggggcgtgtgggaggagctgggcgtgggcagcagcggccacctgtctgagcaggagctggccgtggtgtgccagagcgtgggcctgcagggcctggagaaggaggagctggaggacctcttcaacaagctggaccaggatggagatggcaaggtgtccctggaggagttccagctgggcctcttcagccatgagcccgccctgctgctggagagcagcaccagggtgaagcccagcaaggcctggagccactaccaggtgcctgaggagagcggctgccacaccaccaccaccagcagcctggtgtccctgtgcagcagcctgcggctcttcagcagcattgatgatggcagcggctttgccttcccagaccaggtgctggccatgtggacccaggagggcatccagaatggccgggagatcctgcagagcctggacttctctgtggatgagaaggtgaacctgctggagctgacctgggccctggacaatgagctgatgacagtggacagcgctgtgcagcaggccgccctggcctgctaccaccaggagctgagctaccagcagggccaggtggagcagctggcccgggagcgggacaaggcccggcaggacctggagcgggcagagaagaggaacctggagtttgtgaaggagatggatgactgccacagcaccctggagcagctgacagagaagaagatcaagcacctggagcagggctaccgggagcggctgagcctgctgcggtctgaggtggaggccgagcgggagctgttctgggagcaggcccaccggcagagagctgccctggagtgggatgtgggccgcctgcaggccgaggaggccggcctgcgggagaagctgaccctggccctgaaggagaacagccggctgcagaaggagatcgtggaggtggtggagaagctgagtgacagcgagcggctggccctgaagctgcagaaggacctggagtttgtgctgaaggacaagctggagccccagagcgctgagctgctggcccaggaggagagatttgctgctgtgctgaaggagtatgagctgaagtgccgggacctgcaggacagaaatgatgagctgcaggccgagctggagggcctgtgggcccggctgcccaagaacagacacagccccagctggagcccagatggaagaagacggcagctgcccggcctgggccctgctggcatctccttcctgggcaacagcgcccctgtgtccattgaaacagagctgatgatggagcaggtgaaggagcactaccaggacctgcggacccagctggagaccaaggtgaactactatgagcgggagattgctgccctgaagaggaactttgagaaggagaggaaggacatggagcaggcccggcggcgggaggtgtctgtgctggagggccagaaggctgacctggaggagctgcacgagaagagccaggaggtgatctggggcctgcaggagcagctgcaggacacagcccggggccctgagcctgagcagatgggcctggccccctgctgcacccaggccctgtgtggcctggccctgcggcaccacagccacctgcagcagatccggcgggaggccgaggccgagctgagcggggagctgagcggcctgggcgccctgcctgcccggcgggacctgaccctggagctggaggagcccccccagggccccctgccccggggcagccagaggtctgagcagctggagctggagcgggccctgaagctgcagccctgtgccagcgagaagagggcccagatgtgtgtgtccctggccctggaggaggaggagctggagctggcccggggcaagagggtggatggccccagcctggaggccgagatgcaggccctgcccaaggatggcctggtggccggcagcggccaggagggcacccggggcctgctgcccctgcggcccggctgtggggagcggcccctggcctggctggcccctggagatggccgggagagcgaggaggccgccggggccggcccccggcggcggcaggcccaggacacagaggccacccagagccctgccccagccccagccccagccagccacggccccagcgagcgctggagcaggatgcagccctgtggggtggatggagacatcgtgcccaaggagcctgagccctttggagccagcgctgctggcctggagcagcccggggcccgggagctgcccctgctgggcacagaaagagatgccagccagacccagcccaggatgtgggagccccccctgcggcctgctgccagctgccggggccaggccgagcggctgcaggccatccaggaggagcgggcccgctcctggagccggggcacccaggagcaggccagcgagcagcaggcccgggcagagggcgccctggagcccggctgccacaagcacagcgtggaggtggcccggcggggcagcctgcccagccacctgcagctggccgacccccagggctcctggcaggagcagctggccgcccctgaggagggggagaccaagatcgccctggagcgggagaaggatgacatggagaccaagctgctgcacctggaggatgtggtgcgggccctggagaagcacgtggacctgcgggagaatgaccggctggagttccaccggctgtctgaggagaacaccctgctgaagaatgacctgggccgggtgcggcaggagctggaggccgctgagagcacccatgatgcccagaggaaggagattgaggtgctgaagaaggacaaggagaaggcctgcagcgagatggaggtgctgaaccggcagaaccagaactacaaggaccagctgagccagctgaatgtgcgggtgctgcagctgggccaggaggccagcacccaccaggcccagaatgaggagcaccgggtgaccatccagatgctgacccagagcctggaggaggtggtgcgcagcggccagcagcagagcgaccagatccagaagctgcgggtggagctggagtgcctgaaccaggagcaccagagcctgcagctgccctggagcgagctgacccagaccctggaggagagccaggaccaggtgcagggcgcccacctgcggctgcggcaggcccaggcccagcacctgcaggaggtgcggctggtgccccaggacagagtggccgagctgcaccggctgctgagcctgcagggcgagcaggcccggcggcggctggatgcccagcgggaggagcacgagaagcagctgaaggccacagaggagcgggtggaggaggccgagatgatcctgaagaacatggagatgctgctgcaggagaaggtggacaagctgaaggagcagtttgagaagaacaccaagagtgacctgctgctgaaggagctgtatgtggagaatgcccacctggtgcgggccctgcaggccacagaggagaagcagagaggagctgagaagcagagccggctgctggaggagaaggtgcgggccctgaacaagctggtgtccagaattgccccagctgccctgtctgtgtag

SEQ ID NO: 218168 - DNA, 4149 bp, Artificial Sequence
  derived and/or modified sequence
atggacgaggaggagaaccactacgtgagccagctgcgggaggtgtatagctcatgtgacacaaccggcactggtttcctggacagacaggaacttacgcagctctgcctcaaacttcacctggagcagcagctgcccgttcttctccaaacactcctgggcaacgatcatttcgcgcgcgttaattttgaggagttcaaagagggctttgtggctgtactatcttcaaatgccggcgttcgacccagcgacgaggattcctctagcctggaatctgccgcgtcctccgcaatccccccaaaatacgtcaacggctccaaatggtatggcagaaggtcacggccagaattgtgcgacgccgcaaccgaagctcggcgcgtgccagaacaacagacacaggcttccctgaagtctcatctttggagatcggcaagccttgagtctgtcgagagccccaaatccgacgaggaggctgagagtactaaggaggcacagaacgagttatttgaggcacagggccagctccaaacctgggactccgaggattttgggtcaccccaaaaatcatgctcgcctagcttcgacacacctgagtctcagatccgcggtgtatgggaagaactgggcgttggttccagcgggcatctcagtgaacaagaactcgccgtggtgtgtcaaagtgtcggcctgcagggacttgagaaagaagagctcgaggatctgttcaataagctcgatcaagacggcgacggcaaagtaagcctggaggaattccaacttgggttgttttcacacgagcctgcgctcctacttgagtctagtacccgcgtaaaaccttcaaaagcctggtcacattaccaggtccctgaggaatccggctgccacactaccacgacatcctcactcgtgtccttgtgttcgtctctcaggctgttctcctcaatcgacgatgggtccggctttgcttttccggatcaagtgctggctatgtggacacaggaagggatccagaacggcagagaaattcttcagtccttggacttttcagtggacgaaaaggtgaaccttcttgaactgacctgggccctcgacaacgaattaatgaccgttgattccgcagtgcagcaggccgccttggcctgctatcaccaggaactgtcgtatcagcagggacaggtggaacaactcgctcgtgagagagataaagcccgccaggatctggagagagcagagaagcgcaacctcgagttcgtgaaggagatggacgactgtcatagcaccctcgagcagctgaccgaaaagaaaatcaagcacttggagcagggctacagagagcggctgtctctgttgcggtcagaagtggaggctgagcgggagctcttttgggagcaagctcaccgacagcgggccgcgttagaatgggacgtaggtcggctgcaggcggaggaagcagggttgcgagagaagctgacacttgcactgaaggaaaattcgcggctgcagaaggaaatcgttgaggtggtggagaaactctccgacagtgagcggctggccctgaaacttcagaaagacctcgagttcgtacttaaggacaaactggaaccacaatcagccgagttactggcacaggaggagagattcgctgccgttctcaaggagtatgagctgaaatgtcgggatctgcaagatcggaacgatgagcttcaagccgaattagaagggctgtgggctcggctgcctaagaacaggcacagtccaagttggtcacccgacggtcggaggagacagctgcccggactgggccctgccggaatatccttccttggcaactcggctcctgtgagtattgaaacagaacttatgatggagcaggtgaaggaacactaccaggatcttcggacccagttggaaactaaagtcaattactatgagagggagattgctgcactgaagcgcaactttgagaaggagcgaaaggatatggaacaagcccgtcggcgtgaggtatccgtgctggagggccagaaggccgatctggaggagctgcacgaaaaaagccaggaggtgatttggggcctgcaggaacagttacaggatacagcccgggggcccgagcctgaacaaatgggcctggctccatgttgtacacaggctctgtgtgggctcgccctgcgtcatcacagtcacctgcaacaaattcgacgcgaagccgaggccgagctctctggggagctgagcgggttaggggctctgcctgccaggagggacctgaccctggaactggaggaaccaccacagggacctctccccagggggtcccagaggagtgagcagctcgaacttgaaagggccttaaagcttcaaccatgcgcttccgagaagcgagcgcagatgtgtgtctctctggctctcgaagaagaggagctagaattagccagaggtaagagggtggacggaccctccctggaggccgaaatgcaagccctccctaaggatggtctggtggcaggctctggtcaggagggtactcgcgggctgttgccactgagaccaggttgcggcgagcgtccgttggcgtggttggcccccggcgatggcagagaaagtgaagaggcagccggtgcaggccccagacggagacaggcccaggacactgaagctacacagagccccgcccccgctcctgcgcccgccagccatggcccctctgaacgctggtcacggatgcagccttgtggggtagacggtgacattgtgcctaaggaacccgaaccatttggcgctagtgcggccggccttgaacagccaggcgcccgggagctgcccctgctgggcaccgaaagagacgcctcacagacccagccacggatgtgggagccgccattgcggcccgcagcctcatgccggggtcaggctgagaggctgcaagcaatccaggaggaacgcgcccgctcctggtcacggggcacccaggaacaggcctccgaacaacaagcccgcgcagagggtgcactggaacctggctgccacaaacactcagtggaggttgcccgcaggggaagtctgccctctcatcttcagctggccgaccctcagggttcatggcaggagcagttggcagcccccgaggagggagagacaaaaattgcgctggagcgggagaaagacgacatggagacaaagctgcttcaccttgaggacgtcgtgagagcactggagaagcatgtcgacctgcgagagaacgacaggctggagttccaccgactgtcagaggagaatacgctgctgaaaaatgatttgggaagagtgaggcaggagcttgaagcagcggaatccacacacgacgcacagcgcaaggaaattgaggtgctcaaaaaggataaagagaaggcatgtagtgaaatggaggttctcaaccgccagaatcagaattataaggaccagctgagccagctgaatgtgcgagttctccagcttggtcaggaagccagcacccaccaggctcagaacgaagagcacagagtaaccattcagatgctgacccagtctctagaggaggtcgtgcggtccggccaacagcaatccgaccagatacagaagttgcgcgtggagttggagtgcctcaaccaagaacatcagtctttgcaactgccttggtcagaactgactcagactctggaggagtctcaggatcaggtgcagggggcgcatctcaggcttcgtcaggcacaggctcagcatcttcaggaagtgaggcttgtgccacaagacagagttgccgagttgcaccggctcctcagcctccaaggagagcaggctagaagacggttggatgcacagagagaagagcatgaaaaacagctgaaagccaccgaggaacgagtggaggaagcagaaatgattcttaaaaacatggaaatgctgctccaagagaaggttgataagctgaaggaacaattcgagaagaatacgaaaagtgacctactgctcaaggaattgtatgtcgagaatgcccacctggtcagggccctgcaggctacggaagagaagcaacggggggctgagaagcagtctaggctgctcgaggagaaagtgagggcattgaataaactcgtttctagaattgctcctgccgctctcagcgtgtag

SEQ ID NO: 218169 - DNA, 4149 bp, Artificial Sequence
  derived and/or modified sequence
atggacgaagaagagaatcactatgtttctcagctgcgagaggtttattcaagctgcgataccacggggactggtttcctcgatcgccaagagctgactcagctatgcctcaagcttcacctcgagcagcagctgccagtgctccttcaaacgcttctcggcaacgaccacttcgcaagagtgaattttgaagagtttaaggagggcttcgtggcagtcctatctagcaatgccggagtgcgcccaagcgacgaagacagctcttcacttgaatcagctgcctcctcggcgattcctcccaagtatgtcaatggatctaaatggtatggacggagaagcaggcccgagctctgtgatgccgcaacagaggccaggcgggtccccgaacaacaaacccaggcatctcttaaatcgcatctctggcgatccgccagtctggagagtgtcgagtcaccgaagagcgacgaagaagctgagtcaaccaaggaggcccaaaatgagcttttcgaggcgcagggccagctgcagacttgggacagcgaggactttggctcacctcagaagtcttgttccccctcttttgatactcccgaatctcagattcgcggagtctgggaggagcttggtgttgggtccagcggacacttatccgagcaggagctggcagtggtatgtcagagtgttggcctgcagggactcgagaaagaggagctcgaagatctatttaacaaacttgatcaggatggggatggaaaagtgagtctggaagagtttcaactagggctcttctcacacgaaccagctcttctgttagaaagctctaccagggttaagccctccaaggcttggtctcattaccaggtgcctgaggagtccggatgtcacacaacgaccacctccagcctcgtgagcctgtgcagttcattgagactcttttcatcaatagacgatggaagcggattcgctttccctgatcaggtgcttgctatgtggacacaggaggggattcagaacggtagggagatcctgcagagccttgatttcagtgtggatgaaaaggtcaacctgctggagctgacctgggccctcgataatgagctgatgactgtggacagtgcggtgcagcaagctgcgcttgcctgttaccaccaagaactttcatatcagcagggccaagttgagcaactcgccagggaaagagataaggccagacaggatctggagagagcagaaaaaaggaacctggagttcgtgaaggagatggacgactgccactcaactcttgaacaactcactgaaaagaaaatcaaacatctcgaacaaggatacagggaaaggctgtccttgctccgcagcgaagtagaggctgagcgcgaactcttctgggagcaggctcacaggcaaagagctgccctagaatgggacgtgggcagactgcaggctgaggaggcgggactgagagaaaaacttacactcgctctgaaggagaacagtcgcctgcaaaaagaaatcgtggaggtggtagagaagctctcagactcagagcgtctcgctctgaagctgcaaaaggacctggagttcgttctcaaggacaagcttgaacctcaatccgcagagctactagcacaggaagaacggtttgctgcggttctgaaagagtacgaactgaagtgtagggacctccaagatcgcaatgatgagctccaagcagagctcgagggtctgtgggcaaggcttccaaagaaccgacacagcccttcttggtctcctgacggacgccgacgccaactccccggattgggtcctgctggaatttcttttctaggaaactcagccccagtttcaatcgaaacagaactcatgatggagcaagtgaaagaacactaccaggatctgcgtactcagttggagactaaggtgaactattatgagcgcgaaattgctgcactgaagagaaattttgaaaaagagcgcaaagatatggagcaggccaggaggcgagaagtttccgtgctggaaggacagaaagcagaccttgaggaacttcacgaaaaatctcaggaggttatatggggcctgcaggaacagttacaggacacggcacggggtcccgaacccgaacagatgggattagcaccttgttgtacccaggccctgtgcggcctcgccctcagacatcactctcatctgcagcaaatcaggagggaagctgaagccgaactgtcgggggaactctcgggactgggtgccctgcccgctagacgagacctgacgctggagttggaagaaccccctcaggggccactgcccagagggtctcaacgcagcgaacagctcgagctcgagagagcactgaagctgcagccatgcgccagcgagaaacgtgcgcagatgtgcgtgtctctcgcgctcgaagaggaggagctggagcttgcccgagggaagagagtcgatggcccatctctggaagcagagatgcaggccctgcccaaggacggccttgtggcgggatctggacaggaaggcactcgagggctgttgcctttgcggccagggtgcggggaaagacctctcgcctggttggccccaggagacggtcgggagtccgaggaagcagccggtgccggtcctcggaggagacaggctcaggacaccgaagcaacccagtcacctgccccagcccctgcacccgcttctcatgggccttcagaacgctggtcgagaatgcagccctgtggggtggacggcgatattgtgcccaaagaacccgagcccttcggagcctcagctgcaggccttgaacagcctggcgctagagaacttccactgttgggcaccgagagggacgcgtcccaaacccagccaaggatgtgggaaccgccactcaggccagccgcatcctgccgcggtcaggctgagagactgcaggccatccaggaggagcgggcacgatcatggagcagaggaactcaagagcaggcaagcgagcagcaagctcgtgctgaaggcgcactggaacctggctgccataagcattccgtggaggtggctcggaggggcagcctcccttcccacctgcagttagccgacccccagggtagctggcaagaacagctcgctgcgccagaggagggcgaaacaaagatagccttagagagggagaaagatgacatggaaacaaaactgctacaccttgaggatgtcgtcagggcactcgagaaacacgtcgacctgagagagaacgaccgactcgagtttcatcggctgtcggaagagaataccctccttaagaatgatctgggacgcgttaggcaggaattggaggctgcggaatcaacccatgatgcccagcggaaggaaatcgaggttctaaagaaggacaaagagaaggcatgttctgaaatggaagtgctcaatcgccagaaccaaaactataaggatcagctttcccaactaaacgtacgggtgctccagcttggacaggaagcatcaacccaccaggctcagaatgaggagcaccgtgtcactatccagatgctgacccagtccctggaggaggtcgtccggtctggacaacagcaatcagaccagatacaaaagcttcgtgtcgagttggaatgcctgaaccaggaacaccagtccctccagctgccatggtccgagcttactcagacactggaagagagccaggatcaagttcagggcgcacatctaaggctccgccaagctcaagcccagcacctgcaggaagtacgactcgtgccacaggaccgagtggccgagctccatcgcctgctgtcgctgcagggcgaacaagccaggcgacgcctggacgctcagagggaagaacacgaaaaacaactgaaggcgaccgaagaaagagtcgaagaggccgagatgatcctgaagaacatggagatgctgttacaggagaaagtggataagctcaaggagcagtttgagaaaaatactaagagtgatctcctgctgaaggaactctatgtggagaatgcccacctcgtgcgcgcactccaggccactgaggaaaagcagcgaggtgcagagaagcagagccggctcttggaagaaaaggtcagggcacttaacaagctggtgtccagaattgcacctgccgctttgtccgtgtag

SEQ ID NO: 218170 - DNA, 4969 bp, Artificial Sequence
  derived and/or modified sequence
gcggtacgggggtggtgccgcgctcctggccccgcgcgggcggacggcggaggcgcctcccagcctgctatgggatggatgaagaagagaaccactatgtctcgcagctcagggaagtctacagcagctgcgacaccacggggactggctttctggaccgccaggagctgacccagctctgccttaagcttcacctggagcagcagctgcccgtcctcctgcagacgcttctcggaaacgaccatttcgccagggttaactttgaggaatttaaggaaggttttgtggctgtgttgtcttcaaatgctggtgttcgcccctcagatgaagacagtagttctttggaatcagctgcctccagtgccatccctccaaagtatgtgaatggttctaagtggtatggccgtcggagccggcctgagctatgtgacgctgccacagaagccagacgcgtgccggagcagcaaacccaggccagcctgaaaagtcacctctggcgctcagcgtctctggagagcgtggagagtcccaagtcagatgaagaggccgagagcactaaagaagctcagaatgaattatttgaagcacaaggacagctgcagacctgggattctgaggactttgggagcccccagaagtcctgcagcccctcctttgacaccccagagagccagatccggggcgtgtgggaagagctgggggtgggcagcagcggacacctgagcgagcaggagctggctgtggtctgccagagcgtcgggctccagggactcgagaaagaggaactcgaagacctgtttaacaaactggatcaagacggagacggcaaagtgagtcttgaggaattccagcttggcctcttcagtcatgagcccgcgctacttctagagtcttccactcgggttaaaccgagcaaggcttggtctcattaccaggtcccagaggagagcggctgccacaccaccacaacctcatccctcgtgtccctgtgctccagcctgcgcctcttctccagcattgacgatggttctggcttcgcttttcctgatcaggtcctggccatgtggacccaggaggggattcagaatggcagggagatcttgcagagcctggacttcagcgtggacgagaaggtgaaccttctggagctgacctgggcccttgacaacgagctcatgacagtggacagtgccgtccagcaggcagccctggcctgctaccaccaggagctgagctaccagcaagggcaggtggagcagctggcaagggagcgtgacaaggcaaggcaggacctggagagggccgagaagaggaacctggagtttgtgaaagagatggacgactgccactccaccctggagcagctcacggagaagaaaatcaagcatctggagcaggggtaccgggaaaggctgagcctcctgcggtctgaggtggaggcggagcgagagctgttctgggagcaggcccacaggcagagggccgcgctggagtgggacgtggggcgcctgcaggctgaggaggctggcctccgcgagaagctgaccctggccctgaaggaaaacagtcgcctacagaaggagattgtggaagtggtggaaaagctttcggattcggagaggctggccctgaagctgcagaaggacctggagtttgtgctgaaggacaagctggagccacagagtgcagagctcctggcccaggaggagcggttcgcagcagtcctgaaggaatacgagctcaagtgccgggacctgcaggaccgcaacgatgagctgcaagctgagctggaaggcctgtgggcgcggctgcccaagaaccggcacagcccctcatggagcccggatgggcgcagacggcagctccctggactcggcccagcaggcatttcattcctgggtaattctgctccagtgagtatagaaacggagctgatgatggagcaggtaaaggagcattaccaagacctcaggacccagctggagaccaaggtaaattactacgaaagggaaattgcggcactgaaaaggaactttgagaaggagaggaaggacatggagcaggctcgcaggcgcgaggtcagcgtgctggagggtcagaaggccgacctggaggagctccacgagaagtctcaggaggtcatctggggcctgcaggagcagctgcaggacacagcccgcggccccgagcctgagcagatgggcctggcaccctgctgcacccaggcactgtgtggcctggccctgcggcatcacagccacctgcagcagatcaggagagaggctgaggcggagctgagtggagagctgtcggggctgggagccctgcccgctcgcagagacctgaccttggagctggaggagccgccgcagggacccctgccacgcgggagccagaggtcggagcagctggagctggagagggcactgaagctgcagccctgtgcgagcgagaagcgcgcccagatgtgcgtatcgttggccctcgaggaggaggagttggagcttgcccgcgggaagcgagtggacgggccctccctggaagcagagatgcaggccctgccgaaagatgggctggtggcaggaagtggccaggagggcacacgtggcctcctaccactgcgtccgggctgtggggagcggccactggcctggctggccccaggtgatggcagagagtctgaggaggcggcaggagccgggcctcgccgcaggcaagcccaggacacagaagctacgcagagcccggcccccgcccctgccccggcatcccacggcccctcagagaggtggtcacgcatgcagccctgtggagtggatggggatattgtcccaaaggagccagagcctttcggcgcgagcgcagcggggctggagcagcctggagcccgggagctgcctctgctgggaacagagagagacgcctcgcaaacccagccacggatgtgggagccacccctgaggccggccgcttcgtgcaggggacaggctgagaggctacaggccattcaggaagagcgagcacgaagctggagcaggggcacccaggagcaggcctcggagcagcaggcccgggccgagggcgccctggagcctgggtgtcacaagcacagtgtggaggttgccaggagagggtccttgccatcccacctccagctcgcagacccgcagggttcctggcaggagcagcttgctgccccagaagagggggagaccaaaatagcgctggagagagagaaggatgacatggaaaccaaacttctacatctggaagacgtcgtccgggctctggagaaacatgtagatttgagagagaacgacagactggagttccatagactttctgaagaaaacactttgttgaaaaacgatctgggaagggttcggcaagagcttgaagctgcagaaagtactcacgatgcacagaggaaggaaattgaggttttaaagaaagacaaggaaaaggcctgctctgagatggaggtgctcaacagacagaatcagaactacaaggatcaattatcccagctcaatgtcagggttcttcaactgggacaggaggcttctacccaccaggcccaaaacgaggagcatcgtgtgaccattcagatgttaacacagagcctggaggaggtggttcgcagtgggcagcagcagagtgaccaaatccaaaaacttagagttgaacttgaatgcctgaatcaggaacatcagagcctgcagctgccatggtcagagctgacccagacccttgaggaaagtcaagaccaggtgcagggagctcacctgaggctgaggcaggcccaggcccagcacttgcaggaggtccggctggtgccccaggaccgtgtggccgagctgcatcgcctgctcagccttcagggagagcaggccaggaggcgcctggatgcacagcgggaagaacatgagaaacagctgaaagccacagaagagcgggtggaagaggcggagatgattctgaagaatatggaaatgctcctccaagagaaagtggataagctgaaggagcagtttgaaaagaacacgaagtccgacctgctgctgaaggagctgtacgtggagaacgcccacctggtgagagcacttcaggccaccgaggagaagcagcgaggcgccgagaaacaaagccgcctcttggaagaaaaagttcgcgctctcaacaaactcgtcagtaggattgcccccgcagccctctctgtgtaaagacagattattttctaggattcattcgaaagcacatcttttaaattaagccactgtgctgccttagattccgtgggtcatgagccatgagtcctgggacatctgaggattgggattctttgttcaccccgcagatagttaatgaatggtctgccctgggcaagatggaggtgggggctgggggaatatgcatgttgcagaagccggcgtttttattagcggtcctgagtaatttcccttggcaaaattcccagttttgccactctctggagccagatcctgggagctgtcagcaaggagcaggtaagtgagcagttatggacagcactttccatgtggtgcttccgaccctggctgtcagagtgaaatgtaaagtcagggctctgtacagttttgccatttcactgttctgctttaagcttagcttattagaactcttggtggagggtgcgtacacacattccagaaaaggcttcactcgctgggaacgtcaacccagcgagaaaggaggggaagccccttctccggggaccttatctgtggactcaggaatgatggtgtttattgcaaatgcacaatctttttcccattgaaatgtcatcacactggaaattgtactatatgtaaaaaaaaaaaaaagtatagttttatatttgaaatgtatgcaaattatggccatatggctgattggaatgtactactgtaatataaaaagtcactgtatttgcaataaattcttttctatt

SEQ ID NO: 218171 - DNA, 4149 bp, Artificial Sequence
  derived and/or modified sequence
atggacgaggaggagaaccactacgtgagccagctgagagaggtgtacagcagctgcgacaccaccggcaccggcttcctggacagacaggagctgacccagctgtgcctgaagctgcacctggagcagcagctgcccgtgctgctgcagaccctgctgggcaacgaccacttcgccagagtgaacttcgaggagttcaaggagggcttcgtggccgtgctgagcagcaacgccggcgtgagacccagcgacgaggacagcagcagcctggagagcgccgccagcagcgccatcccccccaagtacgtgaacggcagcaagtggtacggcagaagaagcagacccgagctgtgcgacgccgccaccgaggccagaagagtgcccgagcagcagacccaggccagcctgaagagccacctgtggagaagcgccagcctggagagcgtggagagccccaagagcgacgaggaggccgagagcaccaaggaggcccagaacgagctgttcgaggcccagggccagctgcagacctgggacagcgaggacttcggcagcccccagaagagctgcagccccagcttcgacacccccgagagccagatcagaggcgtgtgggaggagctgggcgtgggcagcagcggccacctgagcgagcaggagctggccgtggtgtgccagagcgtgggcctgcagggcctggagaaggaggagctggaggacctgttcaacaagctggaccaggacggcgacggcaaggtgagcctggaggagttccagctgggcctgttcagccacgagcccgccctgctgctggagagcagcaccagagtgaagcccagcaaggcctggagccactaccaggtgcccgaggagagcggctgccacaccaccaccaccagcagcctggtgagcctgtgcagcagcctgagactgttcagcagcatcgacgacggcagcggcttcgccttccccgaccaggtgctggccatgtggacccaggagggcatccagaacggcagagagatcctgcagagcctggacttcagcgtggacgagaaggtgaacctgctggagctgacctgggccctggacaacgagctgatgaccgtggacagcgccgtgcagcaggccgccctggcctgctaccaccaggagctgagctaccagcagggccaggtggagcagctggccagagagagagacaaggccagacaggacctggagagagccgagaagagaaacctggagttcgtgaaggagatggacgactgccacagcaccctggagcagctgaccgagaagaagatcaagcacctggagcagggctacagagagagactgagcctgctgagaagcgaggtggaggccgagagagagctgttctgggagcaggcccacagacagagagccgccctggagtgggacgtgggcagactgcaggccgaggaggccggcctgagagagaagctgaccctggccctgaaggagaacagcagactgcagaaggagatcgtggaggtggtggagaagctgagcgacagcgagagactggccctgaagctgcagaaggacctggagttcgtgctgaaggacaagctggagccccagagcgccgagctgctggcccaggaggagagattcgccgccgtgctgaaggagtacgagctgaagtgcagagacctgcaggacagaaacgacgagctgcaggccgagctggagggcctgtgggccagactgcccaagaacagacacagccccagctggagccccgacggcagaagaagacagctgcccggcctgggccccgccggcatcagcttcctgggcaacagcgcccccgtgagcatcgagaccgagctgatgatggagcaggtgaaggagcactaccaggacctgagaacccagctggagaccaaggtgaactactacgagagagagatcgccgccctgaagagaaacttcgagaaggagagaaaggacatggagcaggccagaagaagagaggtgagcgtgctggagggccagaaggccgacctggaggagctgcacgagaagagccaggaggtgatctggggcctgcaggagcagctgcaggacaccgccagaggccccgagcccgagcagatgggcctggccccctgctgcacccaggccctgtgcggcctggccctgagacaccacagccacctgcagcagatcagaagagaggccgaggccgagctgagcggcgagctgagcggcctgggcgccctgcccgccagaagagacctgaccctggagctggaggagcccccccagggccccctgcccagaggcagccagagaagcgagcagctggagctggagagagccctgaagctgcagccctgcgccagcgagaagagagcccagatgtgcgtgagcctggccctggaggaggaggagctggagctggccagaggcaagagagtggacggccccagcctggaggccgagatgcaggccctgcccaaggacggcctggtggccggcagcggccaggagggcaccagaggcctgctgcccctgagacccggctgcggcgagagacccctggcctggctggcccccggcgacggcagagagagcgaggaggccgccggcgccggccccagaagaagacaggcccaggacaccgaggccacccagagccccgcccccgcccccgcccccgccagccacggccccagcgagagatggagcagaatgcagccctgcggcgtggacggcgacatcgtgcccaaggagcccgagcccttcggcgccagcgccgccggcctggagcagcccggcgccagagagctgcccctgctgggcaccgagagagacgccagccagacccagcccagaatgtgggagccccccctgagacccgccgccagctgcagaggccaggccgagagactgcaggccatccaggaggagagagccagaagctggagcagaggcacccaggagcaggccagcgagcagcaggccagagccgagggcgccctggagcccggctgccacaagcacagcgtggaggtggccagaagaggcagcctgcccagccacctgcagctggccgacccccagggcagctggcaggagcagctggccgcccccgaggagggcgagaccaagatcgccctggagagagagaaggacgacatggagaccaagctgctgcacctggaggacgtggtgagagccctggagaagcacgtggacctgagagagaacgacagactggagttccacagactgagcgaggagaacaccctgctgaagaacgacctgggcagagtgagacaggagctggaggccgccgagagcacccacgacgcccagagaaaggagatcgaggtgctgaagaaggacaaggagaaggcctgcagcgagatggaggtgctgaacagacagaaccagaactacaaggaccagctgagccagctgaacgtgagagtgctgcagctgggccaggaggccagcacccaccaggcccagaacgaggagcacagagtgaccatccagatgctgacccagagcctggaggaggtggtgagaagcggccagcagcagagcgaccagatccagaagctgagagtggagctggagtgcctgaaccaggagcaccagagcctgcagctgccctggagcgagctgacccagaccctggaggagagccaggaccaggtgcagggcgcccacctgagactgagacaggcccaggcccagcacctgcaggaggtgagactggtgccccaggacagagtggccgagctgcacagactgctgagcctgcagggcgagcaggccagaagaagactggacgcccagagagaggagcacgagaagcagctgaaggccaccgaggagagagtggaggaggccgagatgatcctgaagaacatggagatgctgctgcaggagaaggtggacaagctgaaggagcagttcgagaagaacaccaagagcgacctgctgctgaaggagctgtacgtggagaacgcccacctggtgagagccctgcaggccaccgaggagaagcagagaggcgccgagaagcagagcagactgctggaggagaaggtgagagccctgaacaagctggtgagcagaatcgcccccgccgccctgagcgtgtag

SEQ ID NO: 218172 - protein, 1894 aa, Artificial Sequence
  derived and/or modified sequence
MEQRRPWPRALEVDSRSVVLLSVVWVLLAPPAAGMPQFSTFHSENRDWTFNHLTVHQGTGAVYVGAINRVYKLTGNLTIQVAHKTGPEEDNKSCYPPLIVQPCSEVLTLTNNVNKLLIIDYSENRLLACGSLYQGVCKLLRLDDLFILVEPSHKKEHYLSSVNKTGTMYGVIVRSEGEDGKLFIGTAVDGKQDYFPTLSSRKLPRDPESSAMLDYELHSDFVSSLIKIPSDTLALVSHFDIFYIYGFASGGFVYFLTVQPETPEGVAINSAGDLFYTSRIVRLCKDDPKFHSYVSLPFGCTRAGVEYRLLQAAYLAKPGDSLAQAFNITSQDDVLFAIFSKGQKQYHHPPDDSALCAFPIRAINLQIKERLQSCYQGEGNLELNWLLGKDVQCTKAPVPIDDNFCGLDINQPLGGSTPVEGLTLYTTSRDRMTSVASYVYNGYSVVFVGTKSGKLKKIRADGPPHGGVQYEMVSVLKDGSPILRDMAFSIDQRYLYVMSERQVTRVPVESCEQYTTCGECLSSGDPHCGWCALHNMCSRRDKCQQAWEPNRFAASISQCVSLAVHPSSISVSEHSRLLSLVVSDAPDLSAGIACAFGNLTEVEGQVSGSQVICISPGPKDVPVIPLDQDWFGLELQLRSKETGKIFVSTEFKFYNCSAHQLCLSCVNSAFRCHWCKYRNLCTHDPTTCSFQEGRINISEDCPQLVPTEEILIPVGEVKPITLKARNLPQPQSGQRGYECVLNIQGAIHRVPALRFNSSSVQCQNSSYQYDGMDISNLAVDFAVVWNGNFIIDNPQDLKVHLYKCAAQRESCGLCLKADRKFECGWCSGERRCTLHQHCTSPSSPWLDWSSHNVKCSNPQITEILTVSGPPEGGTRVTIHGVNLGLDFSEIAHHVQVAGVPCTPLPGEYIIAEQIVCEMGHALVGTTSGPVRLCIGECKPEFMTKSHQQYTFVNPSVLSLNPIRGPESGGTMVTITGHYLGAGSSVAVYLGNQTCEFYGRSMSEIVCVSPPSSNGLGPVPVSVSVDRAHVDSNLQFEYIDDPRVQRIEPEWSIASGHTPLTITGFNLDVIQEPRIRVKFNGKESVNVCKVVNTTTLTCLAPSLTTDYRPGLDTVERPDEFGFVFNNVQSLLIYNDTKFIYYPNPTFELLSPTGVLDQKPGSPIILKGKNLCPPASGGAKLNYTVLIGETPCAVTVSETQLLCEPPNLTGQHKVMVHVGGMVFSPGSVSVISDSLLTLPAIVSIAAGGSLLLIIVIIVLIAYKRKSRENDLTLKRLQMQMDNLESRVALECKEAFAELQTDINELTSDLDRSGIPYLDYRTYAMRVLFPGIEDHPVLRELEVQGNGQQHVEKALKLFAQLINNKVFLLTFIRTLELQRSFSMRDRGNVASLIMTGLQGRLEYATDVLKQLLSDLIDKNLENKNHPKLLLRRTESVAEKMLTNWFAFLLHKFLKECAGEPLFMLYCAIKQQMEKGPIDAITGEARYSLSEDKLIRQQIEYKTLILNCVNPDNENSPEIPVKVLNCDTITQVKEKILDAVYKNVPYSQRPRAVDMDLEWRQGRIARVVLQDEDITTKIEGDWKRLNTLMHYQVSDRSVVALVPKQTSSYNIPASASISRTSISRYDSSFRYTGSPDSLRSRAPMITPDLESGVKVWHLVKNHDHGDQKEGDRGSKMVSEIYLTRLLATKGTLQKFVDDLFETLFSTVHRGSALPLAIKYMFDFLDEQADRHSIHDTDVRHTWKSNCLPLRFWVNVIKNPQFVFDIHKGSITDACLSVVAQTFMDSCSTSEHRLGKDSPSNKLLYAKDIPSYKSWVERYYADIAKLPAISDQDMNAYLAEQSRLHAVEFNMLSALNEIYSYVSKYSEELIGALEQDEQARRQRLAYKVEQLINAMSIES

SEQ ID NO: 218173 - DNA, 5685 bp, Artificial Sequence
  derived and/or modified sequence
atggagcagagacgcccatggcctcgggccctggaagtggactctcgcagcgtcgtcctcctatccgtagtttgggtgctgttggcacctccagctgccggtatgccgcagttttccacatttcactccgaaaatcgtgactggacattcaaccacctaacagtgcatcagggaaccggggctgtgtacgtgggcgccattaatcgagtatacaagctgacggggaacctgaccattcaggtggcacacaagaccggacccgaagaagataataaatcgtgctatccacccctcattgtccagccctgttcagaggttctgaccctcactaataatgtaaataagctcttgatcatcgattactccgaaaacaggttattggcttgtggttcgctgtatcaaggggtgtgcaagctgcttaggctagatgacctgttcattctcgtggagccatcacacaagaaggaacattatctcagctccgtaaataaaaccggcaccatgtacggggtgattgtacggtccgaaggcgaagacgggaagctgttcatcgggacagccgtcgacgggaagcaggactatttcccgactctctcttcaagaaagctgcctcgggaccccgagtcatctgccatgctcgattacgaactgcactctgacttcgtctcctctctaataaagatcccgtcagatactctggctttggtgtcacacttcgacatattctacatctacggctttgcctcgggtggtttcgtctatttcctcacagttcagcccgaaacgccagaaggggtggccatcaacagcgccggcgatctgttttacacatcacggatcgtgagactctgcaaggatgacccgaaattccacagctacgtgagcctgcctttcggctgtactcgagcaggggttgagtatcggctgcttcaggccgcttatctggccaagccgggcgatagcttggctcaggcttttaacatcacgtcacaggacgatgtgttgttcgctattttcagcaaggggcagaaacagtatcaccatccccctgatgattctgctttatgtgctttcccaattagagcgattaatcttcaaatcaaggagaggctgcaatcctgttatcaaggagaaggaaatcttgagctgaattggctgttagggaaggacgtacagtgcactaaagctcccgttcccatcgatgacaatttttgtggtttggacataaaccagccactgggagggagtacccctgtggagggattaaccctctataccacctctcgggaccgcatgacgtctgtggcttcatacgtctataacggctacagcgtggtgtttgtcggcactaaaagtggaaagttgaaaaagattagggccgatgggccaccacacggcggggtccagtacgaaatggtatctgttttaaaggatggatctccaatcttacgagacatggctttcagtatcgaccagagatacctgtatgtgatgtcagagagacaggtgacgcgcgttcccgttgaatcctgcgaacagtacactacatgcggagaatgcttatccagcggggacccacattgtggatggtgcgctttacataacatgtgctcccgcagggataagtgtcagcaggcgtgggaaccaaatcgcttcgcagcttccatatcccagtgtgtcagtctagccgtgcaccccagttccatcagcgtgagcgaacacagccgtttgctcagccttgtcgttagtgacgcccctgacctgtcagccgggatcgcctgcgccttcggaaaccttactgaggtcgaaggccaggtaagtggctcccaggtaatatgcatatccccaggtcctaaggacgtgcctgtgattccgctggaccaagattggttcggcctcgagcttcagctgagatccaaggagaccggaaaaattttcgtcagcaccgagttcaagttttataattgctctgcccaccagctgtgtctgagttgtgtgaattccgcattcaggtgtcattggtgcaagtacaggaatctgtgcacgcacgatccaactacctgcagctttcaggagggccgaatcaatatttccgaggattgcccacagctcgtaccaactgaggaaatcttaattcccgtgggagaggtcaaaccaatcaccttaaaggctaggaaccttcctcaacctcagagcgggcagcgaggttatgagtgtgtgctgaatatccagggcgccattcaccgggtaccggcccttcgttttaattctagtagtgtgcagtgccagaattccagttaccagtatgatggtatggacattagcaatcttgctgttgacttcgccgtggtgtggaacgggaatttcataattgataacccccaagacctcaaagtgcacttgtacaagtgcgcggcacaacgggagagctgtgggctgtgcctgaaagccgaccggaagttcgaatgtggatggtgctctggggaacgcaggtgtactctccaccaacattgcacctccccttcatcaccatggttagactggtccagccacaacgtgaaatgcagcaacccacagatcaccgagatcctcacggtgtcgggtccaccagagggcgggacccgcgtgacgattcatggcgttaatcttggactcgacttttctgagatcgcacatcacgtccaagtggccggtgtgccatgcacgcccctgccaggggagtacatcatcgccgagcaaatcgtttgtgagatgggacatgccttagtgggtactaccagtggacctgtgagactctgcataggcgagtgtaaacccgaattcatgaccaagtctcaccagcagtacaccttcgtcaatcccagtgtgctctccttgaatcccatccgggggccggagtctggcgggaccatggtaaccatcaccggtcattatctgggcgctggctccagtgtcgcggtctatctgggcaatcagacctgtgagttctacgggagatctatgagtgagatcgtgtgtgtgtccccaccctcctccaacggtcttggccctgtgccggtatccgtgtctgtggatagagcacacgtagattcaaatctacagttcgaatatattgatgatccgagggtgcagaggattgagcccgagtggtctatcgcgtctggccacactcccctgaccatcaccggctttaatctggacgtaattcaggagcctaggatccgggtcaaatttaatggtaaagagtctgtcaacgtctgtaaagttgtcaacaccacaactttgacctgtctggcaccatcgttaaccacggactatagaccaggattggatacggtcgaacgcccagatgagttcggattcgttttcaataatgtccagagtcttctgatctacaacgacacgaagttcatttactatcccaaccccacattcgagctgctgtccccaaccggcgttctcgaccagaagcctgggagccctatcatcctcaaagggaaaaacctgtgcccccctgccagtgggggggccaagctcaattacactgtccttattggggagaccccttgtgcagtgactgtatctgagacacagcttttatgcgagccacctaacctaactggtcaacacaaagttatggtacatgtggggggaatggtgttcagtcccggttcagtgtcagtgatcagcgatagtctgttaaccctgcccgcaatcgtgtctatagccgctggaggttccttgctgttgattattgtcattatcgtgttgatcgcatataaacgcaaatcccgcgagaatgacctcactcttaaaagattacagatgcagatggataacttagagtctcgcgtagcgcttgaatgcaaagaggcctttgctgagttacaaacagatatcaatgaactaacctccgatctagaccgatccgggatcccatacctggattacagaacttacgctatgagagtgctgtttccggggatagaggaccaccccgtgttacgcgagctcgaagtacaaggtaacggacaacaacacgtggaaaaagcccttaaactttttgcccagctgatcaataacaaagtgtttcttctgaccttcattcgaaccttggagctccagcggtctttttctatgagagacagagggaatgtggcctctctcattatgaccggcttgcaaggcaggctggaatatgctaccgacgtcctgaagcagctcttgagcgacctgatcgacaagaacctggaaaacaagaaccaccccaaactgttacttcgcaggacagaatcagtcgctgagaagatgcttacaaactggtttgccttccttctgcataaattccttaaggagtgcgccggagagccactgtttatgttgtattgtgctatcaaacagcaaatggaaaaggggcccattgacgcaatcaccggggaagctaggtacagcttgagtgaagacaaactgattcgccagcagatcgagtacaaaactctgattttgaactgtgtgaaccccgacaatgagaactctcccgagatccctgtaaaagtcttgaactgcgacaccatcacccaggttaaggagaagattctcgatgccgtctataagaatgtgccgtatagtcagagaccacgggccgtagatatggatttggagtggaggcaaggcaggatcgctcgcgtggtgctgcaggatgaagatatcactactaaaattgaaggggattggaaaagactcaataccctaatgcattaccaagtgtcagaccgaagtgtggtggcgctggtgccaaaacagacgtcttcatataatatccccgcatcggccagcattagcagaacaagcatctcgcgctacgactccagctttcgctacacaggctcacctgacagcttgaggtcccgcgccccaatgataaccccagacttagagagcggagtgaaggtttggcatttagtgaaaaatcacgatcatggggaccagaaagaaggcgataggggctccaagatggtgagcgagatctacctgacacggcttctggcaacaaagggtaccctacagaaattcgtcgatgacttattcgaaaccctgtttagcaccgtgcaccgcggctccgccctgccccttgccatcaaatacatgtttgattttctggacgaacaagcggatagacactccattcacgataccgatgtaaggcacacctggaaatccaactgcctgcctttaaggttctgggttaacgtgattaaaaatccacagtttgtcttcgacatacacaagggatcaatcacagatgcctgtctatccgttgtggcccagacatttatggacagttgtagcacgtccgaacatcggctcggcaaggacagccccagtaataaactgctgtatgccaaggacatccccagttataaatcctgggtagagaggtattacgctgatatcgccaaactgccagccattagtgaccaggacatgaatgcttatcttgctgagcagagtcgactacacgccgttgagttcaacatgttgagtgcccttaatgaaatttacagctatgtgtcgaagtattccgaggagttgatcggggctctagagcaggacgaacaagcccgccggcagagacttgcctacaaggtggagcagctcatcaatgccatgagcattgagagttag

SEQ ID NO: 218174 - DNA, 5685 bp, Artificial Sequence
  derived and/or modified sequence
atggagcagaggcggccctggccccgggccctggaggtggacagccgctctgtggtgctgctgtctgtggtgtgggtgctgctggcccccccagctgctggcatgccccagttcagcaccttccacagcgagaacagagactggaccttcaaccacctgactgtgcaccagggcactggagctgtgtatgtgggcgccatcaacagagtgtacaagctgaccggcaacctgaccatccaggtggcccacaagacaggccctgaggaggacaacaagagctgctacccacccctgattgtgcagccctgcagcgaggtgctgaccctgaccaacaacgtgaacaagctgctgatcatcgactacagtgaaaatcggctgctggcctgtggcagcctgtaccagggcgtgtgcaagctgctgcggctggatgacctcttcatcctggtggagcccagccacaagaaggagcactacctgagctctgtgaacaagacaggcaccatgtatggagtcatcgtgcgctctgagggggaggatggcaagctgttcatcggcacagctgtggatggcaagcaggactacttccccaccctgagcagcaggaagctgccccgggaccctgagagcagcgccatgctggactatgagctgcacagcgactttgtgagcagcctcatcaagatccccagcgacaccctggccctggtgagccactttgacatcttctacatctacggctttgccagcggcggctttgtgtacttcctgactgtgcagcctgagaccccagagggcgtggccatcaacagcgctggggacctcttctacaccagccgcatcgtgcggctgtgcaaggatgaccccaagttccacagctatgtgtccctgcccttcggctgcaccagggctggggtggagtaccgcctgctgcaggccgcctacctggccaagccaggggacagcctggcccaggccttcaacatcaccagccaggatgatgtgctgtttgccatcttcagcaagggccagaagcagtaccaccaccccccagatgattctgccctgtgtgccttccccatccgggccatcaacctgcagatcaaggagcggctgcagagctgctaccagggcgagggcaacctggagctgaactggctgctgggcaaggatgtgcagtgcaccaaggcccctgtgcccattgatgacaacttctgtggcctggacatcaaccagcccctgggcggcagcacccctgtggagggcctgaccctgtacaccaccagccgggacaggatgacctctgtggccagctatgtgtacaacggctacagcgtggtgtttgtgggcaccaagagcggcaagctgaagaagatccgggcagatggcccccctcatggaggagtgcagtatgagatggtgtctgtgctgaaggatggcagccccatcctgcgggacatggccttcagcattgaccagcgctacctgtatgtgatgtctgagcggcaggtgaccagggtgcctgtggagagctgtgagcagtacaccacctgtggagaatgtctgagcagcggggacccccactgcggctggtgtgccctgcacaacatgtgcagcagaagagacaagtgccagcaggcctgggagcccaacagatttgctgccagcatcagccagtgtgtgtccctggccgtgcaccccagcagcatctctgtgtctgagcacagccggctgctgagcctggtggtgtctgatgccccagacctgtctgctggcatcgcctgtgccttcggcaacctgacagaggtggagggccaggtgtctggcagccaggtgatctgcatcagccctggccccaaggatgtgcctgtgatccccctggaccaggactggtttggcctggagctgcagctgcggagcaaggagaccgggaagatctttgtgtccacagagttcaagttctacaactgcagcgcccaccagctgtgcctgagctgtgtgaacagcgccttccgctgccactggtgcaagtacagaaacctgtgcacccatgaccccaccacctgcagcttccaggagggccgcatcaacatcagcgaggactgcccccagctggtgcccacagaggagatcctgatccctgtgggggaggtgaagcccatcaccctgaaggccaggaacctgccccagccccagagcggccagaggggctatgaatgtgtgctgaacatccagggcgccatccaccgggtgcctgccctgcgcttcaacagcagctctgtgcagtgccagaacagcagctaccagtatgatggcatggacatcagcaacctggccgtggactttgctgtggtgtggaatggaaacttcatcatcgacaacccccaggacctgaaggtgcacctgtacaagtgtgccgcccagcgggagagctgtggcctgtgcctgaaggctgacaggaagtttgaatgtggctggtgcagcggggagcggcgctgcaccctgcaccagcactgcaccagccccagcagcccctggctggactggagcagccacaacgtgaagtgcagcaacccccagatcacagagatcctgactgtgtctggccccccagagggcggcaccagggtgaccatccatggagtgaacctgggcctggacttcagcgagatcgcccaccacgtgcaggtggccggcgtgccctgcacccccctgcctggagagtacatcatcgccgagcagatcgtgtgtgagatgggccacgccctggtgggcaccaccagcggccctgtgcggctgtgcatcggggagtgcaagccagagttcatgaccaagagccaccagcagtacacctttgtgaaccccagcgtgctgagcctgaaccccatccggggccctgagagcggcggcaccatggtgaccatcaccggccactacctgggcgccggcagctctgtggccgtgtacctgggcaaccagacctgtgagttctacggccgctccatgtctgagatcgtgtgtgtgtccccacccagcagcaatggcctgggccctgtgcctgtgtctgtgtctgtggaccgggcccacgtggacagcaacctgcagtttgagtacattgatgacccccgggtgcagagaattgagcctgagtggagcatcgccagcggccacacccccctgaccatcaccggcttcaacctggatgtgatccaggagccccgcatccgggtgaagttcaacgggaaggagagcgtgaatgtgtgcaaggtggtgaacaccaccaccctgacctgcctggcccccagcctgaccacagactaccggcccggcctggacacagtggagaggccagatgaatttggatttgtgttcaacaacgtgcagagcctgctgatctacaatgacaccaagttcatctactaccccaaccccacctttgagctgctgagccccactggagtgctggaccagaagccaggcagccccatcatcctgaagggcaagaacctgtgccccccagccagcggcggggccaagctgaactacacagtgctgattggagagaccccctgtgctgtgacagtgtctgagacccagctgctgtgtgagccccccaacctgaccggccagcacaaggtgatggtgcacgtgggcggcatggtgttcagccctggctctgtgtctgtcatcagtgacagcctgctgaccctgcctgccatcgtgtccattgctgctgggggcagcctgctgctgatcatcgtcatcatcgtgctgattgcctacaagaggaagagccgggagaatgacctgaccctgaagaggctgcagatgcagatggacaacctggagagccgggtggccctggagtgcaaggaggcctttgctgagctgcagacagacatcaatgagctgaccagtgacctggacaggagcggcatcccctacctggactaccgcacctacgccatgagggtgctcttccctggcatcgaggaccaccctgtgctgcgggagctggaggtgcagggcaatggccagcagcacgtggagaaggccctgaagctgtttgcccagctgatcaacaacaaggtgttcctgctgaccttcatccgcaccctggagctgcagaggagcttctccatgagggacagaggaaatgtggccagcctcatcatgacaggcctgcagggccgcctggagtatgccacagatgtgctgaagcagctgctgagtgacctgattgacaagaacctggagaacaagaaccaccccaagctgctgctgcggaggacagagagcgtggccgagaagatgctgaccaactggtttgccttcctgctgcacaagttcctgaaggaatgtgccggggagcccctcttcatgctgtactgtgccatcaagcagcagatggagaagggccccattgatgccatcaccggggaggcccgctacagcctgtctgaggacaagctgatccggcagcagatcgagtacaagaccctcatcctgaactgtgtgaacccagacaatgaaaacagccctgagatccctgtgaaggtgctgaactgtgacaccatcacccaggtgaaggagaagatcctggatgctgtgtacaagaatgtgccctacagccagaggcccagggctgtggacatggacctggagtggaggcagggccgcatcgcccgggtggtgctgcaggatgaggacatcaccaccaagattgaaggagactggaagaggctgaacaccctgatgcactaccaggtgtctgacagatctgtggtggccctggtgcccaagcagaccagcagctacaacatcccagccagcgccagcatcagcaggaccagcatcagccgctatgacagcagcttccgctacacaggcagcccagacagcctgcggagccgggcccccatgatcaccccagacctggagagcggcgtgaaggtgtggcacctggtgaagaaccacgaccacggggaccagaaggagggggaccggggcagcaagatggtgtctgagatctacctgacccggctgctggccaccaagggcaccctgcagaagtttgtggatgacctgtttgagaccctcttcagcacagtgcaccggggcagcgccctgcccctggccatcaagtacatgtttgacttcctggatgagcaggccgacagacacagcatccatgacacagatgtgcgccacacctggaagagcaactgcctgcccctgcgcttctgggtgaatgtcatcaagaacccccagtttgtgtttgacatccacaagggcagcatcacagatgcctgcctgtctgtggtggcccagaccttcatggacagctgcagcaccagcgagcaccggctgggcaaggacagccccagcaacaagctgctgtatgccaaggacatccccagctacaagtcctgggtggagcgctactatgctgacatcgccaagctgcctgccatcagtgaccaggacatgaatgcctacctggccgagcagagccggctgcatgctgtggagttcaacatgctgagcgccctgaatgagatctacagctatgtgtccaagtacagcgaggagctgattggagccctggagcaggatgagcaggcccggcggcagaggctggcctacaaggtggagcagctgatcaatgccatgagcattgagagctag

SEQ ID NO: 218175 - DNA, 5685 bp, Artificial Sequence
  derived and/or modified sequence
atggagcagcggcggccctggccccgggccctggaggtggacagccggagtgttgtactgctatctgtagtgtgggtcctcttagccccacccgctgctggaatgccccagttctccaccttccacagcgaaaatagagactggactttcaaccaccttacagtgcaccaaggaaccggtgctgtatacgttggtgcgattaatcgtgtatataagcttaccgggaaccttactatccaggtggcccacaagaccggtcccgaggaagacaacaagagttgttatcctccactaattgtgcaaccatgttctgaggtgttgactcttaccaataacgtcaacaaactgctgattatcgactattccgagaaccgattgcttgcctgcggatccctgtatcagggtgtgtgcaagcttttgagattggatgaccttttcatactggttgagccttcccacaagaaggaacactatcttagttccgttaataaaactggcacaatgtacggagtgatcgtgcgttccgagggagaggatggaaagctgtttatcggcacagccgtcgatggtaagcaagattactttcctactctcagcagcaggaagctcccccgcgaccccgagtcaagcgctatgcttgattatgagctgcactccgattttgttagctctttaatcaaaattccaagcgacacgctggctctcgtgtcccatttcgatatcttttacatttatggctttgcatccgggggctttgtgtactttctgacagtgcaaccagaaacccctgagggcgtcgctattaatagcgccggcgacttattctatacaagtaggattgttcgcctctgtaaggacgaccccaaattccatagctacgtgtctctgccttttggatgtacacgagctggagtggaatatcggttgttgcaggccgcttatctagccaaacccggagactctctggcccaggccttcaacattacctcgcaggacgacgtcctgttcgccatctttagtaagggccagaaacaatatcatcaccccccagacgactcagcactgtgcgccttcccaattagagctatcaacctgcaaatcaaggagaggctgcagagctgctaccagggcgagggcaacctcgagctgaactggctcctcggaaaagatgtccagtgcacgaaggctcccgtcccaatcgacgacaatttctgcgggctggatattaatcaaccccttggcgggagcacccccgtagaaggtcttacactgtacacaactagtcgcgacaggatgacgtctgtggcctcatatgtttataatggctatagtgttgtgttcgtgggaaccaagtccggcaagctaaagaagattcgagccgacggcccaccacacgggggcgtccagtatgagatggtgtctgtgcttaaggacgggagcccaatactgcgggacatggcgtttagtatcgaccagagatacttgtacgtcatgagtgaacgccaagttactagagtgccggttgaaagctgcgaacagtataccacttgcggggagtgtctgtcgtccggagatccccactgtggctggtgcgcccttcacaatatgtgttcaaggagagataaatgccagcaagcatgggagccaaacagattcgccgcctctatctcccaatgtgtttctctcgcagtgcatcctagttctatcagcgttagcgagcatagccgcctcctgtccttagttgtctccgatgcccccgatctgtctgccggcatcgcatgcgcatttggcaacctgacagaggtggagggccaggtgagcgggagtcaagtgatatgcatttctcctgggcctaaagacgtcccagtcattcccctcgatcaggattggttcggtctcgagctgcagctgagaagtaaggagactggaaaaatctttgtgtctactgagttcaagttctacaactgttccgctcaccaattgtgcttaagttgtgttaactccgcctttagatgccattggtgcaagtatagaaacctgtgcacacacgaccccacaacctgtagcttccaggagggacgaatcaatatttcggaggactgcccccaactcgtcccgaccgaggaaattttaattcccgttggcgaggttaagcctatcaccctgaaagcccggaacctgccgcagccccagagcggacaaaggggatacgagtgcgtgctgaatatacagggagccattcaccgcgtgccggcgcttcggtttaattcctccagcgtgcagtgccagaacagttcctaccagtatgatggaatggatatttcaaacctggctgtggatttcgctgtggtctggaacgggaatttcattattgataatccgcaggatttgaaagtccatctgtacaaatgcgccgcgcagagggagagttgtgggctctgcctcaaagccgaccgtaagttcgagtgtgggtggtgctccggcgaaagacgctgcacattgcatcagcactgcactagccctagttcaccctggctggactggagctctcataacgtgaaatgttccaacccgcagatcactgaaatcttaacagttagcggccctccagagggagggacgcgggtgactatacacggcgtgaaccttgggttagattttagtgagatcgcgcaccacgtgcaagttgccggcgtgccatgcacccccctgcctggggaatatataatcgccgagcagattgtgtgtgagatggggcatgccctggtcggaaccacttccgggcccgtgaggctgtgcattggcgaatgcaagccagaattcatgactaagagccatcagcagtatactttcgtgaatccatctgtcttgtctttgaatccaatccgagggccagagagtggaggcaccatggtgaccataacaggtcactacttgggagcagggtcctccgtggcagtttatttggggaatcagacttgtgagttctatgggcgctctatgtccgaaattgtatgcgtgagccctccatcctcaaatggcctgggcccggttcccgtcagcgtgtccgtggaccgcgcccacgtagactcgaatctgcagtttgagtacatcgacgatcctagagtacaaaggattgagccagaatggtctatcgcctcaggccacacccctcttacaattacaggtttcaatctggatgttatccaggagccccgaattcgagtcaaatttaatgggaaggagagcgtcaacgtctgcaaagttgtgaatactaccacgttgacatgccttgcgccttctctgacaaccgactacaggccaggactcgatacagttgaacggcccgatgagtttggttttgtgttcaacaacgtgcagtctctgctgatctacaacgataccaaattcatttattaccccaatcctacatttgagttgttatcgcccaccggagtgcttgatcagaagccagggtccccgatcattctcaaaggaaagaatctctgccctccagcatccggaggagcgaaactgaattatactgttctgataggtgagactccctgcgctgtaaccgtgtcggagacccagctgctttgcgaacctccaaaccttacaggccagcataaagtcatggtgcatgtggggggcatggtgttctcgccagggtcagtttcagtgattagcgactcattactgactctgccagccatagtcagcattgcagccggcggcagtttgctgctgatcattgttattatcgtactgatagcttataagagaaaaagtagagagaatgatcttactctgaagagactgcagatgcagatggacaatctagaatctcgggttgcattagaatgcaaggaggcattcgctgagctgcagacagatattaacgaattgacctcagaccttgaccgttccgggatcccatacctggattaccgcacctacgcaatgcgcgtgctcttcccgggaatcgaagaccatcctgtcctccgggagttggaggttcagggcaacggtcagcagcatgtggagaaagcactgaagctatttgcgcagctcatcaacaataaggtgtttctgctcacatttatccggacccttgaactgcagcgaagtttcagcatgcgagacaggggcaatgtcgcttcattgataatgactggtttgcaaggcagactggaatatgccactgacgtgctgaaacaactgctgtccgacctgatcgacaaaaacctcgaaaataagaaccacccaaaactgctgctgagacgaacagaaagcgtggcggagaagatgctgaccaattggtttgcttttctgctgcacaagttcttgaaggagtgcgctggagagcccctctttatgttgtactgtgcaatcaagcaacagatggagaaggggccaatcgatgccatcaccggagaagctcggtacagtctgagtgaagacaagcttatcaggcagcaaatcgaatacaagacattaatcctgaactgtgtcaaccctgataatgagaacagtccagaaattccggtgaaagtgctcaactgcgatacaatcactcaggttaaggaaaaaatcctcgatgccgtctataaaaatgtgccatactcccagaggccaagagcagtggacatggacttggagtggaggcaggggaggattgcacgcgtggtgctccaggacgaagatattaccactaagattgaaggtgactggaaaaggctcaatacgctgatgcactaccaggtgagtgacaggagtgtggttgcgctggtaccaaaacagacctctagttacaatattcccgcgagcgcctctatatcccgaacatctatttctcggtacgattcctcattccgctatacgggaagccccgatagcctgaggagccgtgctcctatgatcacacctgatctcgaatccggtgtgaaggtgtggcatctggtgaaaaatcacgaccacggagaccagaaggagggggatcgtggcagtaagatggtgagcgaaatataccttacccgactgctggctaccaagggaaccctgcagaaatttgttgatgatctgttcgagacccttttcagcaccgtacaccgtgggagtgccctgccacttgccatcaaatacatgtttgacttcctggatgaacaagctgaccgccattctattcatgacactgacgtgagacacacctggaaatcaaactgtcttcccctgcgattttgggtgaatgttataaaaaacccacagtttgtgtttgacatccataaggggagcataacggatgcatgccttagcgtggtggcccaaaccttcatggattcatgctcaaccagtgagcacagactgggtaaagactcaccctccaataagctgctttacgccaaggatatcccttcttataagtcctgggttgaaagatattacgctgatatcgccaaacttcccgccattagtgatcaggatatgaatgcgtacctcgcagaacagagtagactgcatgcagtcgaatttaacatgttgtcagctcttaacgaaatctattcttacgtgtccaagtactccgaggagttaatcggtgcccttgaacaggacgagcaagcacggcgccagcggttggcgtacaaagtggagcagctgatcaatgccatgtcaatcgaatcttag

SEQ ID NO: 218176 - DNA, 11444 bp, Artificial Sequence
  derived and/or modified sequence
cgccgccgccgccgccaccgcgggagccagagctgccgggaggagcggcatccgcgccagactggagcgggagggcggcggagggcagttgctgggaatttttcagccgagagggcgagcgatccggagagagaccccgagagcttgggagcggtagggcgtgcgagcgccgcagccagcggagcaaacctcgaaatagatctggaaagccaggctcccggaggaaatgggactgtgaacgaaccggagagcaagaagggaaggaagcgccgggattgctgatgtcagaggagcccggaaagtcgcgctggaaaaatctgaagacagccggggctctgcttcttcctcaggagagacaccgccggccgcccccacacgccccctcggcgcctccgggtgccccctgagagccggcgacagcgcccagccgggctgctgcggggcgacggaggactgaggggcgcgcggagcggagaccgaggagcgacttcaggaatacagataagtgtctggtggcttgacgtggattttaatgaatttggactccatgtggatttggtcgtctccctgattccgagctgcgggcagggagaggggcctcgcgccgccctcagcagccggcggcggccgaggtagaccgagcggggacggaaggacagaccgacgtcgccgagctggaatcatgtgagggccaaccggggaaggtggagcagatgagcacacacaggagccgtctcctcaccgccgcccctctcagcatggaacagaggcggccctggccccgggccctggaggtggacagccgctctgtggtcctgctctcagtggtctgggtgctgctggcccccccagcagccggcatgcctcagttcagcaccttccactctgagaatcgtgactggaccttcaaccacttgaccgtccaccaagggacgggggccgtctatgtgggggccatcaaccgggtctataagctgacaggcaacctgaccatccaggtggctcataagacagggccagaagaggacaacaagtcttgttacccgcccctcatcgtgcagccctgcagcgaagtgctcaccctcaccaacaatgtcaacaagctgctcatcattgactactctgagaaccgcctgctggcctgtgggagcctctaccagggggtctgcaagctgctgcggctggatgacctcttcatcctggtggagccatcccacaagaaggagcactacctgtccagtgtcaacaagacgggcaccatgtacggggtgattgtgcgctctgagggtgaggatggcaagctcttcatcggcacggctgtggatgggaagcaggattacttcccgaccctgtccagccggaagctgccccgagaccctgagtcctcagccatgctcgactatgagctacacagcgattttgtctcctctctcatcaagatcccttcagacaccctggccctggtctcccactttgacatcttctacatctacggctttgctagtgggggctttgtctactttctcactgtccagcccgagacccctgagggtgtggccatcaactccgctggagacctcttctacacctcacgcatcgtgcggctctgcaaggatgaccccaagttccactcatacgtgtccctgcccttcggctgcacccgggccggggtggaataccgcctcctgcaggctgcttacctggccaagcctggggactcactggcccaggccttcaatatcaccagccaggacgatgtactctttgccatcttctccaaagggcagaagcagtatcaccacccgcccgatgactctgccctgtgtgccttccctatccgggccatcaacttgcagatcaaggagcgcctgcagtcctgctaccagggcgagggcaacctggagctcaactggctgctggggaaggacgtccagtgcaccaaggcgcctgtccccatcgatgataacttctgtggactggacatcaaccagcccctgggaggctcaactccagtggagggcctgaccctgtacaccaccagcagggaccgcatgacctctgtggcctcctacgtttacaacggctacagcgtggtttttgtggggactaagagtggcaagctgaaaaagattcgggccgacggtcccccccatggtggggtccagtacgagatggtctctgtgctcaaggacggaagccccatcctccgggacatggccttctccattgatcagcgctacctgtacgtcatgtctgagagacaggtcaccagggtccccgtggagtcatgtgagcagtatacgacttgtggggagtgcctgagctctggggaccctcactgtggctggtgtgccctgcacaacatgtgctcccgcagggacaaatgccaacaggcctgggaacctaatcgatttgctgccagcatcagccagtgtgtgagccttgcagtgcatcccagcagcatctcagtatctgagcacagccggttgcttagcctggtagtgagtgatgctcctgatctatctgcgggtatcgcctgtgcctttgggaacctgacagaggtggaggggcaggtgtccgggagccaggtcatctgcatctcacctgggcccaaggatgtccctgtcatcccgctggatcaagactggtttgggctggagctacagctgaggtccaaggagacagggaagatatttgtcagcaccgagttcaagttttacaactgcagtgcccaccaactgtgcctgtcctgtgtcaacagcgccttccgctgccattggtgcaagtaccgcaacctctgcactcatgaccccaccacctgctccttccaggagggccggatcaatatttcagaggactgtccccagctggtgcccacagaggagatcttgattccagtcggggaggtaaagccaatcacccttaaggcgcgaaatctgccccagccgcagtccggccagcgaggctatgagtgtgtcctcaacatacaaggagccatccaccgggtccccgctctgcgcttcaacagctccagcgttcagtgtcagaacagctcgtaccagtatgatggcatggacatcagcaatctggccgtggatttcgctgtggtgtggaacggcaatttcatcattgacaaccctcaggacctgaaagtccatctctacaagtgtgcagcccagcgggagagctgcggcctctgcctcaaggccgaccggaagtttgagtgtggctggtgcagcggcgagcgcaggtgcaccctccaccagcactgtaccagcccttccagcccctggctcgactggtccagccacaatgtcaagtgctccaaccctcaaatcaccgagattttgacggtgtctggaccgccggaaggagggacgcgagtgaccatccatggcgtgaacctgggtctggacttctccgagatcgcccaccatgtgcaggtggctggggtgccctgcacgcccctcccaggggaatacatcatcgctgagcagattgtctgtgagatgggccatgccctcgtgggaaccacctccgggccagtacgcctgtgtattggcgagtgtaagccagagttcatgacgaagtcccatcagcagtacaccttcgtgaacccttctgtgctgtcactcaacccaatccgaggtcccgagtcaggaggcactatggtgaccattaccggccattaccttggggctgggagcagcgtggcagtctacctgggcaaccagacctgcgagttctacgggaggtcaatgagtgagatcgtgtgtgtctcacccccatcatccaatggccttggcccggtccctgtttctgtgagtgtcgaccgagcccatgtggatagcaacctgcagtttgagtacatagatgaccctcgggtccagcgcatcgagccagagtggagcattgccagtggccacacacccctgaccatcacaggcttcaacctggatgtcattcaggagccaaggatccgagtcaaattcaatggcaaagaatctgtcaatgtgtgtaaagttgtgaacacaaccaccctcacctgcctggcaccctctctgaccacggactaccgccctggcctggacactgtggaacgcccagatgagtttggatttgtctttaacaatgtccaatccttgctaatttacaacgacaccaagtttatctactaccccaacccgacctttgaactgcttagccctactggagtcttggatcaaaagccaggatcgcccatcattctgaagggcaaaaacctctgccctcctgcctctggaggggccaaactcaactacactgtgctcatcggagagaccccttgtgctgtcaccgtatctgagacccagcttctctgcgagcctcccaacctcaccgggcagcacaaggtcatggttcacgtgggcgggatggtgttctcgcctggctcggtgagtgtcatctcagacagcttgctgaccctgccagccatcgtcagcatcgcggccggcggcagcctcctcctcatcatcgtcatcatcgtcctcattgcctacaagcgcaagtctcgagaaaatgacctcactctcaagcggctgcaaatgcagatggacaatctggagtcccgtgtggccttggagtgcaaggaagcttttgctgagctccagacggatatcaatgagttgaccagtgacctggaccgctcaggaatcccttacctggactatcgtacctacgctatgcgagtcctgttcccgggcatcgaggaccaccccgtcctgcgggagctggaggtacaaggaaacgggcagcagcacgtggagaaggccctgaagctctttgcccagctcatcaacaacaaggtgttcctgctgaccttcatccgcaccctggagctgcagcgcagtttctccatgcgcgaccggggcaacgtggcttcgctcatcatgaccggcctgcagggccgcctggaatatgccactgatgtcctcaagcagctgctctctgacctcatcgataagaacctggagaacaagaaccaccccaagctgctactccggaggacagagtctgtggctgaaaagatgctgaccaattggttcgccttcctcctgcacaagttcctaaaggagtgcgcaggggagccactcttcatgctatactgtgccatcaagcagcagatggagaagggccccattgatgccatcacgggcgaggcccgctactccctgagcgaggacaagctcatccggcagcagatcgagtacaagaccctgatcctgaactgcgtcaaccctgacaacgagaacagtccagagatcccagtgaaggtgttaaactgtgacaccatcacacaggtcaaggagaagattcttgatgccgtgtataagaatgtgccctattcccagcggccgagggcagtggacatggacttggagtggcgccaaggccggatcgcccgggtcgtgctgcaagatgaggacatcaccaccaagattgagggtgactggaagcggctcaacacactgatgcattatcaggtgtcagacaggtcggtggtggctctggtccccaaacagacctcctcctacaacatccctgcctctgccagcatctcccggacgtccatcagcagatacgactcctccttcaggtatacgggcagccccgacagcctgcggtcccgggccccgatgatcaccccagacctggaaagtggggtcaaggtgtggcatctggtgaagaaccatgaccacggtgaccagaaggagggtgaccggggcagcaagatggtgtccgagatctacctgacccggctactggccaccaagggcaccctgcagaagtttgtggacgacttgtttgagaccttgttcagcactgtgcaccggggcagcgctctccccctggccatcaagtacatgtttgatttcctagatgagcaggcagacaggcacagcatccatgacacagatgtgcggcacacctggaaaagcaactgcctccctctgcgcttctgggtgaacgtgattaagaacccccagttcgtgtttgacatccacaagggcagcatcacggacgcctgcctctctgtggtggcccagaccttcatggactcttgttcaacgtcagagcaccggctgggcaaggactccccctccaacaagctgctctatgccaaggacatccccagctacaagagctgggtggagagatactacgcagacatcgccaagctcccagccatcagtgaccaggacatgaatgcctacctcgccgagcagtcccgcctgcacgccgtggagttcaacatgctgagtgccctcaatgagatctactcctatgtcagcaagtatagtgaggagctcatcggggccctagagcaggatgagcaggcacggcggcagcggctggcttataaggtggagcagctcattaatgccatgtccattgagagctgagaggaggagcctcgcattcctgggaagagggacctgtccaagctgtcacactgggagtctcagatggaaggacaagtgatggggatcaggccccagagcttgctgtcccctgagaccccatcctggggagaggggaggactcctctccctacgccagccaagtttcgtcatagccagttccagctgggagagacagtgggcgtcgtccatcctcagtgagaacaccagagaacccggggccgggagaaggtggttcttcaagccgagaggcacgagctggggacagttctgcctctgtgactgctgctttgcatgaaaactcatttgatgtatattggggaaataatgagaactttatttaatttttttaagaaaaagggaaaaaaacagaaataaaacaaaaagccgccctgttaatcccgtccaacttttgtttaattctgatttctgtctcccttccatcttttctcccattcctccttctttatataatgcctatttccaaatgccagagaaagcagagatgctgagagacattggagagaaaatgactgtctccttttccttgaaattaaaaaaaaaaaaaaaaagagaaagaggagaagaagaatgatgagcacaagtatgcaccaaacacttcgcaaaaacagaggccagtaaaacctggaattatcccggcagccagaggagtatggaacttccagaactttgcacaaattgcaaagccatcaagagctcaccctggctgactggaaactgagctttatctaccacacacctgtatattctcatcttttgagaggagatgtgtacctagatagtaccaatgctttttgctactgttttttgttttgttttatttaatcctaaacctcaacaaatgaggagctggtctttgatatgtttcctttcaatttccctaaagttactatgagaagtggggtgaggtgggcctctcccagaccagacacctggcagccctgcctcatatcaatccctgtcataaaccaggcaccctggggaaacggcctggaggtgtgtgggccaggcctccacgaggttccatttgaaagttgatttggagacataggtgtttgactttggagttcactccaatcatccagtggtccctggcaattaaaaagaaaacaaaaatcaaacactgtttacagcaagcaatacttgaagagcataggttacagaagctgcagtatttattattatgctttctttctttcattctctcgtgcctggagaggggagaccacccttcgctcatatacggaagctcctgaccatctgggcctacagcacttcctcagtagaaatgactgtggcatgcccacgttactaccttctgcctctctttctgcctctcacggacttgtgagtgtgaaggacaagtggatgacttctcactggactttccttctctgtctcttctgatgatgcctaaaactatggataaccaattctcctgagtgtagattccaaacaaagagaccaaagctccatgcccaggtccaaaggccccatagaagccagtgggagtcatcgagaggaaaggcgctctgtgagtgtcaggaccttggtggccaggatagccatcagagtgtccaggcctcccacattaccttggatccgagcagccagctccaactgttctgcaagcagcactggagtcagggggtaggaggacaagtggaagcaaaggtgtgggactggggaagacaaagaggaacaagctgcccttcctcacttttcaaagggtcaggaatcctaggctatgatgctgggaagctagaccagctcctccaagagagactagaccagggtcattttctctgttattaactctgggctccagcttctccgtgccctgctttacctccaagtggttccaatttccaaaggccctgctgaccacatgtgattcccaggagagggctgggggaggggagcgcagaggtctggcttccatccttggcgtgtagctttggatcgctgtctaaccacacagcagacgttgcccggtctccccagctctagtttcttgcctgaatgcggctgacaaatgggaagagaaaagcattcagcaaaatactcaggaaacttgctgttttcattataattcacaaccagccatgccaaggccactttcttttgaaaatccacttctttaaagtttctcaggccctattagtagcctgaaggaaatactaatgactggccttccgcactaagccaaagtgtttgctcttcatagcactcaaagcttatcagcgcagagcccataatttatggagataaaaggaaaggagatataggtaagaagagtgtgaccaggagaccttatgctacctgtaaaaaagttcagcccaccccatctaacttctgagctctgtttgggtgaagattttctggccgcatggctgctcagactggcatccaggctttgctccaccaagaagttaaaggcagtcggacatctcagtagcatctctaccagcccttaactcaatgcatctacctggcatctcccagcagttacttttggagacgattcactgcccctggggcgtttccttgaaggtttgtggagagcgtggagaatgatggggcaatggccaattggagggtggagagtgaagagccggagctggctgtgagtggtttggccacatttctcaggattccatgagagacttggggaacttgggctgacaaaggaagtagcctggggcatccttaaggaaggaattaagaaaagggaaaaagctggactcaagccacgccatgagggtgaaaggttataaggccctgccccctttccagctgcccacctgttcctcctccacacctcttcgctttgggccaccaagaaccaatgaagtccacaccctttggatgagaaaaagagggagttggttggcctctcttctccctgttatccaatttgaggatattttgaccttgggtaaggatgaagtgttaaagccacagctcctctccacaagaagccattcatcttgggggaggcagagagggaagtctctctccaaagtctatccagcttcgcttcgtttcattgatctgcacaagagacaatgctctggaaaaggaagaggaccccagaagggtgcttggcaagacagaggatgctaatgggcaatggagagcactccctccagctggcccctgctgctgcctcccgtcctctgcatggggtcaggtgcttctgtgcttgctgtcctacctctctccacagcagggctctcaaaaccattttgatcccccattggcagagggttcccctctttacagagttcagtcattaaaagcatggatcagctgttaatctcattggaggagggaactgtttcctgcattcattcatctgggaaccttcttgagtagccactgtctgccagccactgctctagagatgggaaaacagcacggaacaaaaccaaggtctttcttccagcgaatttatatccttcaggaagctggttcctgccaccaacttagcaggcaacagttctcctcccctagtggcacagggtaccagttttgtaggaaaagtggtccagcaaaggaagaaagcagaccaacccagctgccttaccttattctggggccattcccccagcgatgagagctgctcttgtttctactgccaccatctcttctggctgcacttcacctgctgcttgagcttctgaccttccttcagttccaccaaatgaggacaggaaatagcagtcaagacccctggccctgctgagcgtgaaacagaagcaatggatgagtgctggacgaagaatggcctgggcagaacaaatagggagcatttgaaagcttctggctgataaatctccaggtgcatcccggttgccacgcctgcccccattaacctgctcctggtaaatactgatccagcagctgctccaggagaggccgtctttttttcccagccacgctgtgtcttgcatgagactcctggggcctgggcacagagagaaaagaattgagactcaggaggctcagtgggtgagaaaatgcaaagtggcttcacagacacagggctgtgggagcagatcgacggggaacttgggagatgaacttcagggccttccgacgccttgtctcaggaacatgctttgagaaaaatggtagcatcctttccataactcagtctctcttccctagtttccctgaagtgtgacgttttagtatctggagctcagtgatccccatgaatgagggataaagtttcactcttggtattttctaactagtgctagggaaagtcctgagacacgatcacagccactgcttggcatacagggcctccacccaataagcaaactggagattcctcagcctctcgtggacacccacatctcattcttctcacagcagagaagctctcccttcagcctgagctgtcttctttctgctgcagtgcagcctgctccctcctaccctggcctcaaggaaggtaggaaacatcttctgcatttcaaagtcctcactttgacttatttggccttcatcttggcatggaaggtggcaggcagaatggaaatactccccccaaacagaacagatattcttgcgtgtgtaagggcagaagggacaagctctctatcccatgagactaggggccggagcccacctgcctttccccacaacttttcctgctcaaacccactcctcttgacacactggaatctgtattatatatatttttaagaaaatacaatgatggttgtctggttttgttgtttttacaggtgttgtggaataaaaactgtaagaaaattaagtatttaaaatgttccaataaagtggggttttttgttattctaatatattattgtgtacctattgtaaatatgaaacactcctattttgcaagctgaggacacaatttgtactgttgttatatataaataaagtttactgaattaaaaaaaccttaaatctttaaataaa

SEQ ID NO: 218177 - DNA, 5684 bp, Artificial Sequence
  derived and/or modified sequence
atggaacaacgaagaccatggccaagagctctggaagtagacagccggtcggtagtgctgctatcagtggtatgggtgcttctcgcccctcctgccgcagggatgcctcaattctctacatttcactccgagaacagagactggacatttaaccaccttaccgtccaccagggaaccggcgctgtctatgttggtgcgattaatagggtatataagctcacaggtaaccttacgatccaagtcgctcataagacaggtccagaagaggataacaagagctgctatccacctctgattgtccagccatgttccgaggtactgacactgacaaataacgtgaataaactgttgataatcgattattcggagaaccgccttttggcttgcggatcgttatatcagggggtctgtaagctgcttcggcttgatgacctttttattctggtggagccatcccacaagaaagaacattatctgagcagtgtgaacaaaaccggcacaatgtatggtgttatcgtgagaagcgaaggagaggacggaaagctgttcataggtaccgccgtcgacgggaaacaggactactttccaactttatctagccggaagctacccagagaccccgaaagcagcgcaatgctggactacgaactgcatagtgactttgttagctctctaataaaaattcctagcgacacattagccctcgtgtctcattttgatatcttctatatatatggattcgcctcaggtggattcgtttattttcttacagtccagcctgagactccagagggcgtcgcaatcaattccgccggagatctgttttatacctctagaatagtcaggctgtgcaaggatgacccaaaatttcatagctacgtaagcctaccttttggctgcacgagagcgggtgtggaatacagactgttacaggcggcttaccttgccaaaccgggtgactcgctagctcaggcgttcaatattacgagccaggatgacgtcctttttgctattttctccaagggccagaagcagtatcaccaccctccagacgattctgcgttatgcgcctttcctataagggccatcaacctgcaaatcaaagagaggctgcagagctgctatcagggcgagggaaatcttgaattaaactggctgctgggcaaagacgttcaatgtacaaaggcgccagttcctattgatgataacttctgcggcctggatattaaccagcccctgggcggttcaaccccggtagagggtcttactctatataccacaagccgagatcgtatgacctctgtggcttcttatgtatacaacggatatagtgtcgtgttcgtggggaccaaaagcggaaagctcaaaaaaatcagggcggatggcccaccccacggaggcgtgcagtacgagatggtatccgtgctcaaagacggaagcccgatactgagagatatggcatttagtatagatcagcggtacctctatgtcatgagcgaacgacaagttacacgggttcccgtcgagagctgcgagcagtacacaacctgcggcgaatgccttagttccggtgacccacattgcggatggtgtgctctgcataatatgtgcagcagacgagacaaatgccagcaggcttgggagcccaatagatttgccgcatctatttctcaatgtgtgtcactggcagtgcaccccagtagcatctctgtctcggagcactcgagattactttctctagtggtgtctgatgccccagacctgtctgcaggcatcgcttgcgcttttggaaacctgacagaggtcgaagggcaagtgtcaggaagccaggtgatctgcatcagcccgggtcctaaggacgttccagtgatcccgctggaccaggactggttcgggctcgagctgcaactgcggtccaaggaaactggcaagattttcgttagtacagaattcaagttctacaactgttcagcccaccagctgtgtctcagctgcgtcaactccgccttccgctgccactggtgcaaatacaggaacctgtgtacacatgatcctactacctgcagctttcaggagggtagaattaacatctccgaggactgcccacagcttgtgcccacggaggagatcctcatccccgtgggagaggtgaagccaattacgctcaaggccaggaatcttcctcaaccgcagtctggacagagaggctacgagtgcgtcctgaacatccaaggggcaatccatcgtgtccctgcactccggttcaacagctccagcgtacagtgccaaaattcatcctatcagtacgatggaatggacatctcaaacctggctgtggatttcgcggtggtgtggaatggcaacttcatcatcgacaacccccaagatctgaaggtacacctgtacaagtgcgccgcacagagagagagttgcggactctgtcttaaggctgacagaaaatttgagtgtgggtggtgctccggcgaaaggcgctgcacactccatcagcattgcacctccccctcctcaccttggttggattggagcagccacaatgtgaagtgctcaaacccacagataactgagatacttacggtttccgggcctccagaaggaggtacccgcgttacgattcatggggttaacctcggactcgattttagcgagatcgcccatcatgtgcaagtggctggcgtgccctgcacccctttacccggtgaatatatcatcgctgagcagattgtgtgcgagatgggccacgcacttgtcggaactacctcaggccctgtccgcctttgtattggcgagtgtaaacctgaatttatgacaaagtctcaccaacaatacacgtttgtgaatccctcagttctctccctgaaccctattcggggtcccgagagtgggggaacgatggtgacaataactggacattacctcggcgcaggatcgtccgtcgctgtttacctagggaatcagacttgtgaattctacggacgatcaatgagcgagatcgtgtgcgtcagtcccccttcatctaacgggctcggaccagttcctgtctccgtgtccgttgatcgcgctcatgtggatagcaatctgcagtttgaatacatcgacgatccgagagttcagcggatcgagcctgagtggagtatcgccagcggacatacccctttgaccatcaccggctttaacctggatgttatccaagagccaagaattcgcgtgaagttcaatggcaaagagtccgtcaacgtttgcaaggtcgtgaatactacaacactcacgtgcctggcacctagtctgactaccgattaccggcctggcctcgacacagtggagcggccagatgagttcggctttgtctttaacaatgtccagtctttactgatctataacgacactaagtttatatactaccccaaccccacctttgagctcctgtcccccaccggcgtactggatcagaaacctggcagccctataattctcaaagggaagaatctgtgtccaccagcctccggtggggcaaagctaaactacacagttcttattggtgagaccccgtgcgcggtgacagtgagcgagacgcagttgttatgcgagcctcccaatctgactgggcagcataaggttatggtccatgtaggaggcatggtctttagccccggttccgtcagcgtgatttccgattctctgcttacgctcccagccatcgtgagcattgcagccggtgggagcctgctcttgatcatagtgatcatagtgttaatagcttataagagaaaaagccgagaaaatgatcttaccttaaaacgtctgcagatgcagatggacaatctcgaaagccgagtcgctcttgaatgtaaggaagcgttcgctgagctccagaccgatattaacgaactgaccagcgatctggaccggagcggaatcccgtacctggattaccggacttatgccatgagggttttgttccccggaattgaggaccaccccgttctcagggaactggaagttcagggtaacggccaacagcacgtcgagaaagcacttaagctgttcgctcaacttattaacaacaaggtattcttgctgacattcatacgaacccttgagctgcaaagaagctttagtatgcgcgataggggaaacgtagctagcttaatcatgactggcctccagggacggctcgagtacgccacagacgtcctcaagcagttgctttcagacctcattgacaaaaatctagagaacaaaaatcatcccaagctgctcctgcgtcgcacagagagcgttgcagaaaagatgcttaccaactggttcgccttcctgcttcacaaattcctaaaagagtgtgcgggagaacctctgtttatgctctactgtgccattaaacagcaaatggagaagggacctatagacgctatcacgggtgaggccagatattccttgagcgaagacaaacttattcggcagcagatcgaatacaaaacactcattctgaactgtgtaaatcctgataatgaaaatagtccagaaatcccagtgaaagtgctgaactgtgacacaataacccaggtaaaggagaaaatcctcgatgccgtctacaaaaacgtgccctatagtcagcgcccaagagctgtcgacatggaccttgagtggaggcagggaagaattgcgagggtggtcttgcaagatgaggacattacaactaaaatcgagggcgactggaagcgattgaatactctgatgcactatcaagtgtccgacaggtcagttgtggccctagtccctaagcagacatcgtcatacaacattcccgcatccgcatctatatctaggaccagcatcagccgctatgatagtagctttcgctacacaggttccccagactcactgaggagtagggctccgatgattacgccggacctggaaagcggcgtaaaggtgtggcatctcgttaaaaaccacgaccatggcgatcaaaaagaaggtgacagaggatccaaaatggtctccgagatatatcttacacgtcttctcgccaccaaagggaccctacagaagttcgtcgacgacctcttcgagacactattcagcacagttcatcgcggttctgcgcttccattggccattaagtacatgttcgacttcctggacgagcaggcagacagacactcaattcacgacactgacgtcaggcacacatggaagagcaactgtctgcccctgcggttttgggtgaacgttataaaaaacccccagttcgtgtttgacattcataaaggcagcattacggacgcttgtctgtccgtggtagcacagacattcatggacagctgtagcacatctgaacatcgcctgggaaaggatagtcctagcaacaagttgctctacgccaaggacatccctagctataaatcctgggtggaaagatattacgcagatattgccaagttacctgccatttccgaccaggatatgaatgcttatctggctgagcagagccgactccatgctgtggagttcaatatgctaagtgccctgaatgaaatttattcttacgtgtctaagtattccgaggagttgatcggcgcactggagcaggatgagcaagcgcgtagacagcggttggcatataaggtggaacaactgattaatgcaatgagtattgagtccta

SEQ ID NO: 218178 - DNA, 5685 bp, Artificial Sequence
  derived and/or modified sequence
atggagcagagaagaccctggcccagagccctggaggtggacagcagaagcgtggtgctgctgagcgtggtgtgggtgctgctggccccccccgccgccggcatgccccagttcagcaccttccacagcgagaacagagactggaccttcaaccacctgaccgtgcaccagggcaccggcgccgtgtacgtgggcgccatcaacagagtgtacaagctgaccggcaacctgaccatccaggtggcccacaagaccggccccgaggaggacaacaagagctgctacccccccctgatcgtgcagccctgcagcgaggtgctgaccctgaccaacaacgtgaacaagctgctgatcatcgactacagcgagaacagactgctggcctgcggcagcctgtaccagggcgtgtgcaagctgctgagactggacgacctgttcatcctggtggagcccagccacaagaaggagcactacctgagcagcgtgaacaagaccggcaccatgtacggcgtgatcgtgagaagcgagggcgaggacggcaagctgttcatcggcaccgccgtggacggcaagcaggactacttccccaccctgagcagcagaaagctgcccagagaccccgagagcagcgccatgctggactacgagctgcacagcgacttcgtgagcagcctgatcaagatccccagcgacaccctggccctggtgagccacttcgacatcttctacatctacggcttcgccagcggcggcttcgtgtacttcctgaccgtgcagcccgagacccccgagggcgtggccatcaacagcgccggcgacctgttctacaccagcagaatcgtgagactgtgcaaggacgaccccaagttccacagctacgtgagcctgcccttcggctgcaccagagccggcgtggagtacagactgctgcaggccgcctacctggccaagcccggcgacagcctggcccaggccttcaacatcaccagccaggacgacgtgctgttcgccatcttcagcaagggccagaagcagtaccaccacccccccgacgacagcgccctgtgcgccttccccatcagagccatcaacctgcagatcaaggagagactgcagagctgctaccagggcgagggcaacctggagctgaactggctgctgggcaaggacgtgcagtgcaccaaggcccccgtgcccatcgacgacaacttctgcggcctggacatcaaccagcccctgggcggcagcacccccgtggagggcctgaccctgtacaccaccagcagagacagaatgaccagcgtggccagctacgtgtacaacggctacagcgtggtgttcgtgggcaccaagagcggcaagctgaagaagatcagagccgacggccccccccacggcggcgtgcagtacgagatggtgagcgtgctgaaggacggcagccccatcctgagagacatggccttcagcatcgaccagagatacctgtacgtgatgagcgagagacaggtgaccagagtgcccgtggagagctgcgagcagtacaccacctgcggcgagtgcctgagcagcggcgacccccactgcggctggtgcgccctgcacaacatgtgcagcagaagagacaagtgccagcaggcctgggagcccaacagattcgccgccagcatcagccagtgcgtgagcctggccgtgcaccccagcagcatcagcgtgagcgagcacagcagactgctgagcctggtggtgagcgacgcccccgacctgagcgccggcatcgcctgcgccttcggcaacctgaccgaggtggagggccaggtgagcggcagccaggtgatctgcatcagccccggccccaaggacgtgcccgtgatccccctggaccaggactggttcggcctggagctgcagctgagaagcaaggagaccggcaagatcttcgtgagcaccgagttcaagttctacaactgcagcgcccaccagctgtgcctgagctgcgtgaacagcgccttcagatgccactggtgcaagtacagaaacctgtgcacccacgaccccaccacctgcagcttccaggagggcagaatcaacatcagcgaggactgcccccagctggtgcccaccgaggagatcctgatccccgtgggcgaggtgaagcccatcaccctgaaggccagaaacctgccccagccccagagcggccagagaggctacgagtgcgtgctgaacatccagggcgccatccacagagtgcccgccctgagattcaacagcagcagcgtgcagtgccagaacagcagctaccagtacgacggcatggacatcagcaacctggccgtggacttcgccgtggtgtggaacggcaacttcatcatcgacaacccccaggacctgaaggtgcacctgtacaagtgcgccgcccagagagagagctgcggcctgtgcctgaaggccgacagaaagttcgagtgcggctggtgcagcggcgagagaagatgcaccctgcaccagcactgcaccagccccagcagcccctggctggactggagcagccacaacgtgaagtgcagcaacccccagatcaccgagatcctgaccgtgagcggcccccccgagggcggcaccagagtgaccatccacggcgtgaacctgggcctggacttcagcgagatcgcccaccacgtgcaggtggccggcgtgccctgcacccccctgcccggcgagtacatcatcgccgagcagatcgtgtgcgagatgggccacgccctggtgggcaccaccagcggccccgtgagactgtgcatcggcgagtgcaagcccgagttcatgaccaagagccaccagcagtacaccttcgtgaaccccagcgtgctgagcctgaaccccatcagaggccccgagagcggcggcaccatggtgaccatcaccggccactacctgggcgccggcagcagcgtggccgtgtacctgggcaaccagacctgcgagttctacggcagaagcatgagcgagatcgtgtgcgtgagcccccccagcagcaacggcctgggccccgtgcccgtgagcgtgagcgtggacagagcccacgtggacagcaacctgcagttcgagtacatcgacgaccccagagtgcagagaatcgagcccgagtggagcatcgccagcggccacacccccctgaccatcaccggcttcaacctggacgtgatccaggagcccagaatcagagtgaagttcaacggcaaggagagcgtgaacgtgtgcaaggtggtgaacaccaccaccctgacctgcctggcccccagcctgaccaccgactacagacccggcctggacaccgtggagagacccgacgagttcggcttcgtgttcaacaacgtgcagagcctgctgatctacaacgacaccaagttcatctactaccccaaccccaccttcgagctgctgagccccaccggcgtgctggaccagaagcccggcagccccatcatcctgaagggcaagaacctgtgcccccccgccagcggcggcgccaagctgaactacaccgtgctgatcggcgagaccccctgcgccgtgaccgtgagcgagacccagctgctgtgcgagccccccaacctgaccggccagcacaaggtgatggtgcacgtgggcggcatggtgttcagccccggcagcgtgagcgtgatcagcgacagcctgctgaccctgcccgccatcgtgagcatcgccgccggcggcagcctgctgctgatcatcgtgatcatcgtgctgatcgcctacaagagaaagagcagagagaacgacctgaccctgaagagactgcagatgcagatggacaacctggagagcagagtggccctggagtgcaaggaggccttcgccgagctgcagaccgacatcaacgagctgaccagcgacctggacagaagcggcatcccctacctggactacagaacctacgccatgagagtgctgttccccggcatcgaggaccaccccgtgctgagagagctggaggtgcagggcaacggccagcagcacgtggagaaggccctgaagctgttcgcccagctgatcaacaacaaggtgttcctgctgaccttcatcagaaccctggagctgcagagaagcttcagcatgagagacagaggcaacgtggccagcctgatcatgaccggcctgcagggcagactggagtacgccaccgacgtgctgaagcagctgctgagcgacctgatcgacaagaacctggagaacaagaaccaccccaagctgctgctgagaagaaccgagagcgtggccgagaagatgctgaccaactggttcgccttcctgctgcacaagttcctgaaggagtgcgccggcgagcccctgttcatgctgtactgcgccatcaagcagcagatggagaagggccccatcgacgccatcaccggcgaggccagatacagcctgagcgaggacaagctgatcagacagcagatcgagtacaagaccctgatcctgaactgcgtgaaccccgacaacgagaacagccccgagatccccgtgaaggtgctgaactgcgacaccatcacccaggtgaaggagaagatcctggacgccgtgtacaagaacgtgccctacagccagagacccagagccgtggacatggacctggagtggagacagggcagaatcgccagagtggtgctgcaggacgaggacatcaccaccaagatcgagggcgactggaagagactgaacaccctgatgcactaccaggtgagcgacagaagcgtggtggccctggtgcccaagcagaccagcagctacaacatccccgccagcgccagcatcagcagaaccagcatcagcagatacgacagcagcttcagatacaccggcagccccgacagcctgagaagcagagcccccatgatcacccccgacctggagagcggcgtgaaggtgtggcacctggtgaagaaccacgaccacggcgaccagaaggagggcgacagaggcagcaagatggtgagcgagatctacctgaccagactgctggccaccaagggcaccctgcagaagttcgtggacgacctgttcgagaccctgttcagcaccgtgcacagaggcagcgccctgcccctggccatcaagtacatgttcgacttcctggacgagcaggccgacagacacagcatccacgacaccgacgtgagacacacctggaagagcaactgcctgcccctgagattctgggtgaacgtgatcaagaacccccagttcgtgttcgacatccacaagggcagcatcaccgacgcctgcctgagcgtggtggcccagaccttcatggacagctgcagcaccagcgagcacagactgggcaaggacagccccagcaacaagctgctgtacgccaaggacatccccagctacaagagctgggtggagagatactacgccgacatcgccaagctgcccgccatcagcgaccaggacatgaacgcctacctggccgagcagagcagactgcacgccgtggagttcaacatgctgagcgccctgaacgagatctacagctacgtgagcaagtacagcgaggagctgatcggcgccctggagcaggacgagcaggccagaagacagagactggcctacaaggtggagcagctgatcaacgccatgagcatcgagagctag

SEQ ID NO: 218179 - protein, 749 aa, Artificial Sequence
  derived and/or modified sequence
MALPLLPGNSFNRNVGKEKFHKSQHWGFCNNVMMLVSDEKPGIGGEPLLGQKIKPKCSIYPKGDGSDVPSWVAFDKQVLSFDAYLEEEVLDKSQTNYRIRYYKIYFYPEDDTIQVNEPEVKNSGLLQGTSIRRHRITLPPPDEDQFYTVYHFNVGTEVVFYGRTFKIYDCDAFTRNFLRKIGVKVNPPVQCPEDPYMKIRREVVEHVEPLRPYESLDTLKQFLQYHGKILCFFCLWDDSVSMFGDRRELILHYFLCDDTIEIKELLPHSSGRDALKMFLRRSKLPKNCPPRVYQPGQITDRAVLNSYGDFIKNQADGYLFDRYKLGKVDQEFYKDSDLSLGVTINVWGRKVLLYDCDEFTKSYYKSKYGIENFTSVSCKPPSPPPKIERKFPPYNGFGSEEDSLRNCIDLKPTPHRRNFKKFMEKDSYGSKSNILRFFAKLVTDKCVDLDRMFVISYYLGDDTISVFEPIERNSGIAGGMFLKRSRVKKPGQEVFKSELSEYIKAEELYIGVTVNVNGYLFRLLNADEYTLNYMEQNTDKYPFSNLKLALQKLKQEEGKSRELKQVFKAADSKHTNMVDYNTFRDILMSLTVGNLAEQEFVTIARHYRVPEGTCSDMDFLIALAHEKFKKNMFENFDTFIYSCVYEDREKKNVLPTKDIKRLCKSSRLPLSDDLLESLLSRFEDSEKQIDYKSFFSALNWRKNPVPELQPASYLKERCEDVWLGMPSPIPAKYIDYWTFLKDAFGLEEE

SEQ ID NO: 218180 - protein, 777 aa, Artificial Sequence
  derived and/or modified sequence
GGQTTRPGGAAACRALSSGTLDFRTLSAMALPLLPGNSFNRNVGKEKFHKSQHWGFCNNVMMLVSDEKPGIGGEPLLGQKIKPKCSIYPKGDGSDVPSWVAFDKQVLSFDAYLEEEVLDKSQTNYRIRYYKIYFYPEDDTIQVNEPEVKNSGLLQGTSIRRHRITLPPPDEDQFYTVYHFNVGTEVVFYGRTFKIYDCDAFTRNFLRKIGVKVNPPVQCPEDPYMKIRREVVEHVEPLRPYESLDTLKQFLQYHGKILCFFCLWDDSVSMFGDRRELILHYFLCDDTIEIKELLPHSSGRDALKMFLRRSKLPKNCPPRVYQPGQITDRAVLNSYGDFIKNQADGYLFDRYKLGKVDQEFYKDSDLSLGVTINVWGRKVLLYDCDEFTKSYYKSKYGIENFTSVSCKPPSPPPKIERKFPPYNGFGSEEDSLRNCIDLKPTPHRRNFKKFMEKDSYGSKSNILRFFAKLVTDKCVDLDRMFVISYYLGDDTISVFEPIERNSGIAGGMFLKRSRVKKPGQEVFKSELSEYIKAEELYIGVTVNVNGYLFRLLNADEYTLNYMEQNTDKYPFSNLKLALQKLKQEEGKSRELKQVFKAADSKHTNMVDYNTFRDILMSLTVGNLAEQEFVTIARHYRVPEGTCSDMDFLIALAHEKFKKNMFENFDTFIYSCVYEDREKKNVLPTKDIKRLCKSSRLPLSDDLLESLLSRFEDSEKQIDYKSFFSALNWRKNPVPELQPASYLKERCEDVWLGMPSPIPAKYIDYWTFLKDAFGLEEE

SEQ ID NO: 218181 - protein, 730 aa, Artificial Sequence
  derived and/or modified sequence
  misc_feature (1)..(1): Xaa can be any naturally occurring amino acid
XNNTAGRRRCLPGPLFWDPGFSDTERHGPASAAGQQLQPQREKGDGSDVPSWVAFDKQVLSFDAYLEEEVLDKSQTNYRIRYYKIYFYPEDDTIQVNEPEVKNSGLLQGTSIRRHRITLPPPDEDQFYTVYHFNVGTEVVFYGRTFKIYDCDAFTRNFLRKIGVKVNPPVQCPEDPYMKIRREVVEHVEPLRPYESLDTLKQFLQYHGKILCFFCLWDDSVSMFGDRRELILHYFLCDDTIEIKELLPHSSGRDALKMFLRRSKLPKNCPPRVYQPGQITDRAVLNSYGDFIKNQADGYLFDRYKLGKVDQEFYKDSDLSLGVTINVWGRKVLLYDCDEFTKSYYKSKYGIENFTSVSCKPPSPPPKIERKFPPYNGFGSEEDSLRNCIDLKPTPHRRNFKKFMEKDSYGSKSNILRFFAKLVTDKCVDLDRMFVISYYLGDDTISVFEPIERNSGIAGGMFLKRSRVKKPGQEVFKSELSEYIKAEELYIGVTVNVNGYLFRLLNADEYTLNYMEQNTDKYPFSNLKLALQKLKQEEGKSRELKQVFKAADSKHTNMVDYNTFRDILMSLTVGNLAEQEFVTIARHYRVPEGTCSDMDFLIALAHEKFKKNMFENFDTFIYSCVYEDREKKNVLPTKDIKRLCKSSRLPLSDDLLESLLSRFEDSEKQIDYKSFFSALNWRKNPVPELQPASYLKERCEDVWLGMPSPIPAKYIDYWTFLKDAFGLEEE

SEQ ID NO: 218182 - DNA, 2250 bp, Artificial Sequence
  derived and/or modified sequence
atggccctgccactgttacccgggaactctttcaacaggaatgtcggcaaagagaagttccacaagagtcagcactggggcttttgcaataacgttatgatgctggtatcagatgagaaaccggggatcggaggagagcctctcctgggccagaaaatcaagccaaagtgctctatatatcccaagggcgacggatctgatgtcccgtcatgggtggctttcgataaacaggttctgtcgtttgacgcttacttggaggaagaggttctagacaagagccaaacaaactaccggatcagatactacaaaatctacttctatcccgaagacgatacgatacaggtaaatgagcctgaagtgaagaacagcggcctattgcaaggaacatctatccgccgacatcgcatcacgctgccacctcctgacgaggaccagttctacactgtgtaccatttcaatgtcgggacggaggtggttttctatggcagaacatttaagatatacgactgtgacgcattcacacgcaactttctcagaaaaattggagtgaaggtcaaccctcccgttcagtgcccagaggacccatatatgaagataagacgtgaagtggtggaacacgttgaacccctgcgcccttatgaatccctggataccctgaagcagttcctccagtatcacggcaagattctctgttttttttgcttgtgggacgattcggttagcatgtttggcgaccgacgcgagcttatcttacactactttctctgcgatgatacaatcgaaatcaaggaactactgccgcattcgtccggacgagacgccttgaaaatgttcctgcgacgatctaagttgccaaaaaattgtccaccacgtgtgtaccagccaggacagattactgatagagccgtgctgaattcttatggcgacttcatcaagaaccaggcagatggctacctttttgatagatataagctgggaaaagtggatcaggaattctataaggattctgatctttccctgggcgtcacaattaacgtgtggggaaggaaggtgcttctgtatgattgcgacgagttcacgaaaagctactataagagtaaatacggaatcgaaaactttacctccgtgtcatgtaaaccgccatcccccccccccaagatcgagcggaagttccctccttataatggcttcggcagtgaagaggactccttacggaactgcattgatctcaaacccacaccccatcggcgtaactttaaaaagttcatggaaaaagattcatatggtagtaaaagcaacatcctgcgcttttttgctaagctcgtcactgacaaatgtgtggacctggacaggatgtttgtcattagctattatctcggtgacgacacaatttcagtgttcgaaccgatcgagcgaaactcagggatcgctggcggaatgtttctcaagagaagtagagttaaaaaacctggccaagaggtgttcaaatccgagctgtctgagtacattaaagccgaggaactttacatcggcgttacagtgaatgtcaacggttatttgttccgcctgctcaacgccgacgagtatactcttaattatatggagcaaaacactgataagtaccctttctcaaatctgaagctggcactccagaagctgaagcaggaggaaggaaagagtcgggagcttaagcaggtgttcaaagctgctgactcgaaacatacaaatatggtggactacaatacctttcgggacattttaatgtcgctgaccgttgggaaccttgctgagcaggaattcgtgactatcgcccggcactaccgcgtgcctgagggaacctgcagcgacatggatttcctaatcgccctggcacacgaaaagtttaagaaaaatatgttcgaaaacttcgacaccttcatttacagctgtgtctatgaagatcgagaaaagaaaaatgtactgccaacaaaggacatcaagcgactgtgtaagagctctcggctccccttgagcgatgatcttcttgagagcctcctgtccagattcgaagatagtgagaagcagattgactacaagagttttttctctgcattgaactggagaaaaaaccctgtgccggagctccagccagcatcctatctgaaggagcgctgtgaagacgtttggctcggtatgccttccccaatccctgccaagtacatcgactattggacctttctgaaggatgcctttgggcttgaagaagagtag

SEQ ID NO: 218183 - DNA, 2334 bp, Artificial Sequence
  derived and/or modified sequence
ggcggccagacaacacgaccaggcggggctgcggcctgcagggctctgtcctctggcacactggacttcaggacattgtccgccatggccctcccactgctacccggcaactccttcaatagaaacgttggcaaagagaaattccacaaaagtcaacactggggcttttgcaacaatgtcatgatgctggtgagcgatgaaaagcccggaatagggggagagccgcttctgggccagaaaatcaaaccaaagtgttctatctatcccaagggcgatggctccgacgttcctagctgggtggccttcgacaagcaggtgctctctttcgatgcatacttggaggaggaagtactggataaaagtcaaaccaactataggatacgctattataagatctacttctatcctgaggacgatactatccaggtgaatgaacctgaggtaaagaattctggccttctgcagggaacatctattaggcgccatcgcattacgctgccgcctccggacgaggatcaattctacaccgtttatcactttaacgttggcacagaagtggtgttttatggccgcacctttaaaatttacgactgtgacgcgtttacacgaaatttcctaaggaagatcggcgttaaggtcaacccgccggtgcaatgcccagaagatccctatatgaaaatcaggagagaggtagtggaacacgtagagcctctacggccgtatgagtcactcgatacactgaagcagttcctgcagtaccatggcaaaatactatgtttcttctgtctctgggacgatagtgttagcatgttcggggataggcgcgagctcatcctgcattacttcctctgtgatgacaccatagagatcaaggagctcctgccgcattcctccggcagagacgccctgaaaatgtttttacgtagatccaagctacccaaaaattgtcctcctcgggtgtatcagcccggccaaatcactgaccgagccgtactgaactcctatggcgattttatcaagaaccaggcagacggttatctttttgatcgctacaaactgggtaaagttgaccaggagttctacaaagactccgatctcagcctgggcgtcacaatcaacgtatggggccggaaagtcctcttatacgactgcgacgagtttacaaagtcttactataaaagcaagtacggcatcgaaaattttactagcgtgtcatgtaaaccgccctctcctccgcctaaaatcgaaaggaaatttccaccatacaatggattcggctccgaggaggactctctgcgtaattgtatagacctgaagcccaccccccacaggagaaactttaaaaaattcatggagaaggattcgtacggcagtaagagcaatatcctaagatttttcgcgaaattggtcactgataagtgcgtcgatctggatcgaatgttcgtgatctcgtactatttgggagacgatacaatctccgtctttgagccaatcgaaagaaattcaggtatagccggcgggatgttcttaaagcgtagtagggtgaaaaagccagggcaagaggtgtttaagtccgagctctccgagtacatcaaagcagaagagctgtatatcggagtgaccgttaatgtaaatgggtatttgtttagactcctcaatgccgatgagtacactctgaattacatggaacagaataccgataaatatcccttttctaaccttaagctggcccttcagaagctgaagcaggaggaaggcaagtctagagagctgaaacaggtgtttaaggccgccgattctaaacatactaacatggtcgactataatacattccgcgacatattaatgagcctgactgtggggaacctggccgagcaagaattcgttaccatcgcccgccattatcgtgtgcccgaggggacctgtagtgacatggacttcctcatagctctagcccacgaaaaatttaaaaaaaatatgtttgagaatttcgacacgtttatctactcatgtgtgtacgaagatcgtgaaaagaagaacgtgctcccaaccaaagatataaaacggctgtgcaagagctctcgtctgccactttctgacgatcttcttgaaagcctgctcagtcggtttgaagattcagagaaacagattgactataaaagcttcttcagcgccctgaactggcgtaagaaccccgtgccggagttacagccggcgagttatctgaaggagagatgcgaagatgtctggttgggcatgccctctcccatcccagccaagtacatcgattattggacctttctgaaagacgcattcgggcttgaagaggagtag

SEQ ID NO: 218184 - DNA, 2193 bp, Artificial Sequence
  derived and/or modified sequence
tgaaataatacagcaggccgacggcggtgcttacccggtccgctcttctgggatccaggcttttcagacactgagcggcatggacctgcctctgccgcaggccagcaacttcaacctcagcgggagaaaggcgacgggagtgatgtgcccagttgggttgcatttgacaaacaagtgctctctttcgacgcctacttagaagaggaggtcctcgataaaagtcagacgaattaccgtattcgctactataaaatttacttttaccctgaagacgataccatacaggtgaatgagcccgaagtgaaaaacagcggattgttgcaagggacctccatacgccggcaccggatcaccctgccgcctcccgatgaagatcagttttacaccgtttatcactttaacgtcggaacagaagtggtattttacgggcgtaccttcaagatttatgattgtgatgccttcacacgaaactttctcaggaagattggggtaaaagtgaaccctcccgtgcagtgccctgaagatccgtacatgaaaataagaagggaggtggttgaacatgtggaacctttgagaccctatgaatcgcttgacaccctaaagcagttcttacaataccatggcaagattctgtgctttttttgcctgtgggatgattctgtatcgatgttcggagaccgacgagaactaatcttgcactattttctttgcgacgatacaatcgagattaaggagttactgcctcacagttctggcagggatgccctgaaaatgtttctgcggagatccaagctgccgaagaactgtccgccacgagtttatcaaccaggacagataaccgatcgggccgtacttaactcttacggggacttcattaagaaccaggccgatggctacctcttcgataggtacaagctcggtaaagtcgatcaagagttctataaagacagtgatctgtcactgggcgttacgatcaatgtctggggtcggaaggtgttgctgtacgactgtgatgaattcaccaagtcttactacaaatctaagtatgggattgaaaattttacctctgtttcctgtaagcccccgtcgcccccaccaaagatcgagagaaaattcccaccatataatggcttcggaagtgaggaggacagtctccgtaattgtattgacctgaaaccaacccctcatcggagaaatttcaagaaatttatggagaaggactcgtacggtagcaagagcaacattctcagatttttcgctaagcttgtgaccgataaatgtgtagatcttgaccgcatgtttgtaatatcttactacctgggggacgacaccatttcagtgtttgaacccattgaacggaatagcggcattgcaggaggaatgtttctgaaaaggtctcgcgtaaaaaaacctggccaagaagtttttaagtctgaattgtccgaatacattaaagcggaagaattgtatattggcgtgaccgtcaacgtcaatggctatctgttcagattgctgaacgccgacgagtacacccttaattacatggaacagaacaccgacaagtatcccttctcaaacctaaagctggcactgcagaagctcaaacaggaggagggtaaatcaagggagctgaaacaagttttcaaggccgccgactcaaaacatacaaacatggtggactacaacaccttcagggacatcctgatgtctttgacggtgggaaatctggctgaacaggagttcgtaactatcgcccgacactatcgcgttcccgagggaacgtgttcagatatggattttctgatagctctcgcgcatgagaagttcaaaaagaacatgtttgaaaatttcgacacctttatctatagctgcgtctatgaggaccgcgagaaaaagaacgttcttccaaccaaagacatcaaaaggttgtgtaagagttcccgtctacctctgtctgacgacctattggaatctttgctgtcaagattcgaagattctgaaaagcagatcgattataagtctttcttctccgccctgaactggagaaagaatccggtgcccgaactgcagcctgcctcctacctcaaggagagatgtgaggacgtgtggcttgggatgccgtctccaattccagcaaaatacattgactactggaccttcttgaaggacgcgtttggactggaagaagaatag

SEQ ID NO: 218185 - DNA, 2250 bp, Artificial Sequence
  derived and/or modified sequence
atggccctgcccctgctgcccggcaacagcttcaacagaaatgtgggcaaggagaagttccacaagagccagcactggggcttctgcaacaacgtgatgatgctggtgtctgatgagaagccaggcattggaggagagcccctgctgggccagaagatcaagcccaagtgcagcatctaccccaagggagatggcagtgatgtgcccagctgggtggcctttgacaagcaggtgctgagctttgatgcctacctggaggaggaggtgctggacaagagccagaccaactaccgcatccgctactacaagatctacttctacccagaagatgacaccatccaggtgaatgaacctgaggtgaagaacagcggcctgctgcagggcaccagcatccgccgccaccgcatcaccctgcccccaccagatgaggaccagttctacacagtgtaccacttcaacgtgggcacagaggtggtgttctacggccgcaccttcaagatctatgactgtgatgccttcaccaggaacttcctgaggaagattggagtgaaggtgaacccccctgtgcagtgcccagaggacccctacatgaagatccggcgggaggtggtggagcacgtggagcccctgcggccctatgagagcctggacaccctgaagcagttcctgcagtaccacggcaagatcctgtgcttcttctgcctgtgggatgattctgtgtccatgtttggagaccggcgggagctgatcctgcactacttcctgtgtgatgacaccatcgagatcaaggagctgctgccccacagcagcggcagagatgccctgaagatgttcctgcggcgcagcaagctgcccaagaactgccccccccgggtgtaccagcccggccagatcacagacagagctgtgctgaacagctatggagacttcatcaagaaccaggctgatggctacctgtttgaccgctacaagctgggcaaggtggaccaggagttctacaaggacagcgacctgagcctgggcgtgaccatcaacgtgtggggcaggaaggtgctgctgtatgactgtgatgagttcaccaagagctactacaagagcaaatatggaattgagaacttcacctctgtgtcctgcaagccacccagccccccacccaagattgaaaggaagttccccccctacaatggatttggaagtgaggaggacagcctgaggaactgcatcgacctgaagcccaccccccacagaagaaacttcaagaagttcatggagaaggacagctatggcagcaagagcaacatcctgcgcttctttgccaagctggtgacagacaagtgtgtggacctggacaggatgtttgtgatctcctactacctgggagatgacaccatctctgtgtttgagcccatcgagaggaacagcggcattgctgggggcatgttcctgaagaggagccgggtgaagaagccaggccaggaggtgttcaagtctgagctgtctgagtacatcaaggccgaggagctgtacatcggcgtgacagtgaatgtgaatggctacctgttccggctgctgaatgctgatgagtacaccctgaactacatggagcagaacacagacaagtaccccttcagcaacctgaagctggccctgcagaagctgaagcaggaggagggcaagagccgggagctgaagcaggtgttcaaggctgctgacagcaagcacaccaacatggtggactacaacaccttccgggacatcctgatgagcctgactgtgggcaacctggccgagcaggagtttgtgaccatcgcccggcactacagagtgcctgagggcacctgcagcgacatggacttcctgattgccctggcccacgagaagttcaagaagaacatgtttgagaactttgacaccttcatctacagctgtgtgtatgaggaccgggagaagaagaatgtgctgcccaccaaggacatcaagaggctgtgcaagagcagccggctgcccctgagtgatgacctgctggagagcctgctgagcagatttgaagattctgagaagcagattgactacaagagcttcttcagcgccctgaactggaggaagaaccctgtgcctgagctgcagcctgccagctacctgaaggagcgctgtgaagatgtgtggctgggcatgcccagccccatcccagccaagtacatcgactactggaccttcctgaaggatgccttcggcctggaggaggagtag

SEQ ID NO: 218186 - DNA, 2334 bp, Artificial Sequence
  derived and/or modified sequence
gggggccagaccaccaggcctggaggagctgctgcctgccgggccctgagcagcggcaccctggacttccgcaccctgagcgccatggccctgcccctgctgcccggcaacagcttcaacagaaatgtgggcaaggagaagttccacaagagccagcactggggcttctgcaacaacgtgatgatgctggtgtctgatgagaagccaggcattggaggagagcccctgctgggccagaagatcaagcccaagtgcagcatctaccccaagggagatggcagtgatgtgcccagctgggtggcctttgacaagcaggtgctgagctttgatgcctacctggaggaggaggtgctggacaagagccagaccaactaccgcatccgctactacaagatctacttctacccagaagatgacaccatccaggtgaatgaacctgaggtgaagaacagcggcctgctgcagggcaccagcatccgccgccaccgcatcaccctgcccccaccagatgaggaccagttctacacagtgtaccacttcaacgtgggcacagaggtggtgttctacggccgcaccttcaagatctatgactgtgatgccttcaccaggaacttcctgaggaagattggagtgaaggtgaacccccctgtgcagtgcccagaggacccctacatgaagatccggcgggaggtggtggagcacgtggagcccctgcggccctatgagagcctggacaccctgaagcagttcctgcagtaccacggcaagatcctgtgcttcttctgcctgtgggatgattctgtgtccatgtttggagaccggcgggagctgatcctgcactacttcctgtgtgatgacaccatcgagatcaaggagctgctgccccacagcagcggcagagatgccctgaagatgttcctgcggcgcagcaagctgcccaagaactgccccccccgggtgtaccagcccggccagatcacagacagagctgtgctgaacagctatggagacttcatcaagaaccaggctgatggctacctgtttgaccgctacaagctgggcaaggtggaccaggagttctacaaggacagcgacctgagcctgggcgtgaccatcaacgtgtggggcaggaaggtgctgctgtatgactgtgatgagttcaccaagagctactacaagagcaaatatggaattgagaacttcacctctgtgtcctgcaagccacccagccccccacccaagattgaaaggaagttccccccctacaatggatttggaagtgaggaggacagcctgaggaactgcatcgacctgaagcccaccccccacagaagaaacttcaagaagttcatggagaaggacagctatggcagcaagagcaacatcctgcgcttctttgccaagctggtgacagacaagtgtgtggacctggacaggatgtttgtgatctcctactacctgggagatgacaccatctctgtgtttgagcccatcgagaggaacagcggcattgctgggggcatgttcctgaagaggagccgggtgaagaagccaggccaggaggtgttcaagtctgagctgtctgagtacatcaaggccgaggagctgtacatcggcgtgacagtgaatgtgaatggctacctgttccggctgctgaatgctgatgagtacaccctgaactacatggagcagaacacagacaagtaccccttcagcaacctgaagctggccctgcagaagctgaagcaggaggagggcaagagccgggagctgaagcaggtgttcaaggctgctgacagcaagcacaccaacatggtggactacaacaccttccgggacatcctgatgagcctgactgtgggcaacctggccgagcaggagtttgtgaccatcgcccggcactacagagtgcctgagggcacctgcagcgacatggacttcctgattgccctggcccacgagaagttcaagaagaacatgtttgagaactttgacaccttcatctacagctgtgtgtatgaggaccgggagaagaagaatgtgctgcccaccaaggacatcaagaggctgtgcaagagcagccggctgcccctgagtgatgacctgctggagagcctgctgagcagatttgaagattctgagaagcagattgactacaagagcttcttcagcgccctgaactggaggaagaaccctgtgcctgagctgcagcctgccagctacctgaaggagcgctgtgaagatgtgtggctgggcatgcccagccccatcccagccaagtacatcgactactggaccttcctgaaggatgccttcggcctggaggaggagtag

SEQ ID NO: 218187 - DNA, 2193 bp, Artificial Sequence
  derived and/or modified sequence
tgaaacaacacagctggaagaagacgctgcctgcccggccccctcttctgggaccccggcttcagtgacacagaaagacatggccctgccagcgctgctggccagcagctgcagccccagcgggagaagggagatggcagtgatgtgcccagctgggtggcctttgacaagcaggtgctgagctttgatgcctacctggaggaggaggtgctggacaagagccagaccaactaccgcatccgctactacaagatctacttctacccagaagatgacaccatccaggtgaatgaacctgaggtgaagaacagcggcctgctgcagggcaccagcatcagaagacaccgcatcaccctgcccccaccagatgaggaccagttctacacagtgtaccacttcaacgtgggcacagaggtggtgttctacggccgcaccttcaagatctatgactgtgatgccttcaccaggaacttcctgaggaagattggagtgaaggtgaacccccctgtgcagtgcccagaggacccctacatgaagatcagaagagaggtggtggagcacgtggagcccctgcggccctatgagagcctggacaccctgaagcagttcctgcagtaccacggcaagatcctgtgcttcttctgcctgtgggatgacagcgtgtccatgtttggagacagaagagagctgatcctgcactacttcctgtgtgatgacaccatcgagatcaaggagctgctgccccacagcagcggcagagatgccctgaagatgttcctgcggcgcagcaagctgcccaagaactgccccccccgggtgtaccagcccggccagatcacagacagagctgtgctgaacagctatggagacttcatcaagaaccaggctgatggctacctgtttgaccgctacaagctgggcaaggtggaccaggagttctacaaggacagcgacctgagcctgggcgtgaccatcaacgtgtggggcaggaaggtgctgctgtatgactgtgatgagttcaccaagagctactacaagagcaaatatggaattgagaacttcacctctgtgtcctgcaagccacccagccccccacccaagattgaaaggaagtttcctccctacaacggcttcggcagcgaggaggacagcctgaggaactgcatcgacctgaagcccaccccccacagaagaaacttcaagaagttcatggagaaggacagctatggcagcaagagcaacatcctgcgcttctttgccaagctggtgacagacaagtgtgtggacctggacaggatgtttgtgatctcctactacctgggagatgacaccatctctgtgtttgagcccattgaaagaaattctggaattgctgggggcatgttcctgaagaggagccgggtgaagaagccaggccaggaggtgttcaagtctgagctgtctgagtacatcaaggccgaggagctgtacatcggcgtgacagtgaatgtgaatggctacctgttccggctgctgaatgctgatgagtacaccctgaactacatggagcagaacacagacaagtaccccttcagcaacctgaagctggccctgcagaagctgaagcaggaggagggcaagagccgggagctgaagcaggtgttcaaggctgctgacagcaagcacaccaacatggtggactacaacaccttccgggacatcctgatgagcctgactgtgggcaacctggccgagcaggagtttgtgaccatcgcccggcactacagagtgcctgagggcacctgcagcgacatggacttcctgattgccctggcccacgagaagttcaagaagaacatgtttgaaaattttgacaccttcatctacagctgtgtgtatgaagatcgggagaagaagaatgtgctgcccaccaaggacatcaagaggctgtgcaagagcagccggctgcccctgagtgatgacctgctggagagcctgctgagcagatttgaggacagcgagaagcagattgactacaagagcttcttcagcgccctgaactggaggaagaaccctgtgcctgagctgcagcctgccagctacctgaaggagcgctgtgaagatgtgtggctgggcatgcccagccccatcccagccaagtacatcgactactggaccttcctgaaggatgccttcggcctggaggaggagtag

SEQ ID NO: 218188 - DNA, 2250 bp, Artificial Sequence
  derived and/or modified sequence
atggccctgcccctgctgcccggcaacagcttcaaccggaacgtggggaaagagaagtttcataagagccagcactgggggttctgtaataatgtgatgatgctcgtttcagatgaaaagccaggaatcgggggtgagccacttctcggtcagaagattaaaccgaagtgctccatctatcccaaaggggatggaagcgatgtacctagctgggtggcctttgacaaacaggtgctgtctttcgacgcctatctggaagaggaagtgttagataagagtcaaaccaactatcgcatccgctactataaaatctatttttatcctgaagacgataccatacaagtgaatgagccagaggttaaaaactcgggattgcttcaaggaacgtccatccggagacacaggatcacacttccgccacctgatgaggaccagttttatacagtataccacttcaacgtcggtaccgaggtcgttttctacgggcgtacctttaagatctacgattgtgacgcctttactcgtaattttctccggaaaattggcgtcaaagtgaatccccccgtgcagtgccccgaagatccatatatgaagatacggagggaggtagttgagcacgtagaacctctgagaccctatgaatcactggatacgctcaaacagtttttgcaatatcatggaaaaatactttgctttttttgcttgtgggatgacagcgtctcgatgtttggagacaggcgggaactcatcctgcattactttctgtgtgatgacacgatcgagatcaaagagttgctcccgcactctagtggccgggatgctctcaagatgttcttgcgccggtcaaagttaccgaagaattgcccacccagggtgtatcagcctggtcagattaccgaccgcgccgtcctgaattcatatggggacttcattaagaatcaagccgatggatatctctttgacaggtataaactcggaaaggtggatcaagaattttacaaagacagtgacttgtccctgggcgtgaccattaacgtgtggggccgcaaggtcctcctatacgactgtgacgagtttacaaagagctattacaagtcaaagtacggtattgaaaatttcaccagcgtttcctgtaaacccccatctccccctccaaaaatagagcggaagtttccaccctataatggatttggatcggaagaggactcattgagaaactgcatcgatttaaaacccactcctcacagacgcaacttcaaaaaattcatggagaaggatagttatggatcgaaatctaatattcttcgcttctttgccaagctcgtgacggataaatgcgttgacttagaccgcatgttcgtgatttcttactacctcggggatgatacaatctccgtgttcgagccaattgaacgaaactccggtattgccggcggcatgtttctcaaacggtccagagttaagaagccaggacaggaggttttcaaaagcgagctgtctgaatacataaaggcagaagagctgtacattggagtcaccgtgaacgtgaatggatatcttttccggctgctgaatgcggacgagtatacacttaattatatggagcaaaacaccgataagtacccattcagtaatcttaagttggcattacagaaattaaagcaggaagaggggaaatcccgcgagctgaagcaggtttttaaagctgcagattcaaagcacacaaatatggtggattataacacctttcgcgacattctgatgagtttgacggtcggcaatctcgccgagcaggagtttgtcaccatcgctaggcactaccgtgtgcccgagggtacctgctccgatatggacttcctgatagctctagcccacgaaaaattcaagaagaatatgttcgagaacttcgacacttttatctactcttgtgtgtacgaggacagagagaagaaaaatgtgctgccgacaaaggatataaaacggttatgcaagtcctcaagactccctttatccgatgacctcctggagagcctgctaagtaggttcgaggacagcgagaaacagattgactacaagagcttcttttccgcgttgaactggcgcaaaaaccccgttccggaactgcaacccgcctcatatctaaaggagagatgtgaagatgtttggctcggcatgcctagtcccattccagcaaaatacatcgattactggactttcctcaaggacgcattcggcctcgaagaggagtag

SEQ ID NO: 218189 - DNA, 2334 bp, Artificial Sequence
  derived and/or modified sequence
ggcggccagaccacccggcccggcggcgccgccgcctgccgggccctctcaagtggcacacttgattttcggacactgtccgcaatggcactgccactgctgccaggtaatagctttaatagaaatgtgggtaaagagaaattccataagtctcagcactggggattctgcaacaacgtgatgatgctagtgagcgatgaaaaacctgggatcggtggcgagcccctgctgggccaaaaaattaaacctaaatgttccatataccctaagggagacggtagtgatgttccatcttgggtggcattcgacaaacaggtcctgagtttcgacgcttatctggaggaggaggttcttgacaaaagtcagaccaactaccggatccgctattataaaatttatttctatccggaggatgataccattcaggtgaacgaacccgaggtcaagaatagcggcttgctgcagggcacctctatccgccggcatagaatcaccctgcctccaccagatgaggatcaattctatacagtctatcattttaacgttggcacagaggtagttttctatgggcggacattcaagatatacgattgcgacgcctttacgcggaacttcctgagaaagattggtgtgaaagtgaaccctcctgtgcagtgtccggaagatccctatatgaagattcggcgggaggtggtggagcacgtcgaaccgttacggccatatgaaagtctagataccttgaagcagtttctgcagtaccacggaaagattctgtgctttttttgcttgtgggacgattccgtctcgatgttcggagatcggagagaattgatcctacactacttcctgtgtgatgacacaatagagatcaaagagctccttccgcactccagcgggcgcgatgctttgaagatgttcctcagacgaagcaaacttccaaagaattgccctcctcgagtgtatcagccaggtcagataactgacagggctgtcctgaattcatacggcgactttatcaagaaccaggccgatggatatcttttcgacagatacaaattgggcaaggtagaccaagagttttacaaggattccgacctgtctctgggtgtcaccatcaacgtttggggaaggaaagtactgctctatgactgcgacgagtttaccaaatcatactataaatcaaaatacggcatagaaaacttcacaagtgtgtcgtgcaaaccaccatcccctccacccaaaattgagcgaaaattcccaccctacaacggattcggcagtgaagaggactccctgagaaactgcatcgatttgaaacctaccccccataggcggaactttaaaaaatttatggagaaagacagctatggctctaaatcaaacattcttagattctttgccaaattggtaacagacaagtgtgtggatctcgaccgcatgttcgtgatttcatactatttaggcgatgataccatttcagtatttgagcccattgagcggaactctggcatcgcaggaggtatgtttctgaagagatcaagggtgaaaaagccgggacaggaggtcttcaaatccgagctgtcagagtatattaaggctgaggaactctatatcggggttactgtaaatgtgaatggttatctgtttaggctgctcaacgctgacgagtacacccttaattacatggaacaaaacaccgataaataccctttcagtaacctgaagctcgctctccaaaaactgaaacaggaagaggggaaatccagagagctcaaacaagtgttcaaggctgccgatagcaagcacaccaacatggtcgattacaacacattcagagacattcttatgagcctgactgtcggtaaccttgcagagcaagagtttgttaccattgcgcgccactatcgagtgccggagggcacatgttcagatatggactttctgattgccctggctcacgagaagttcaaaaagaatatgttcgagaatttcgacactttcatatattcttgcgtgtacgaggacagagaaaagaagaacgtactgcccaccaaggacatcaagcggctgtgcaaatcctctagattgccactgtctgacgacttgctcgaatcactgctgtcacgcttcgaggattcagaaaagcagatagattacaagagcttcttctcggccttgaactggcgtaagaaccctgtccctgagctgcagcctgccagctacctcaaggaacgttgcgaagacgtatggctcggcatgccaagcccgatacctgccaagtatatagattactggacattcttgaaagatgcctttggactcgaggaggagtag

SEQ ID NO: 218190 - DNA, 2193 bp, Artificial Sequence
  derived and/or modified sequence
tgaaacaacaccgccggccggcggcggtgcctgcccggccccctgttttgggatcccgggttttctgatacagagcgacacgggccggcatctgccgctgggcagcaacttcagccacagagggagaaaggcgatgggtctgatgtaccctcatgggtagcctttgataagcaagtgttgtccttcgatgcgtacttagaagaagaggtcctcgacaagtcccagacaaattaccgaattcgctactacaagatctacttctaccccgaggacgacacgatccaggtgaacgaacccgaggttaagaacagtggcctcctgcaagggaccagcattaggcgccacagaattacgctcccaccccccgacgaggatcagttttacactgtgtaccactttaatgtggggactgaggtggtcttttatggccgcacctttaagatctatgactgcgacgcatttacacgaaactttctgcggaaaatcggagtgaaagtgaaccctccagtgcagtgcccggaggatccctacatgaagatccgcagggaagtggtggaacacgtcgagcctcttcggccttatgagtccctcgacactttaaaacaatttctgcagtatcatggcaaaattctgtgcttcttctgcctctgggatgatagcgtctcaatgtttggcgaccggcgggaactgatactgcattacttcctgtgcgatgacactattgagattaaagagttgctgccacactcctccggccgggatgccttaaagatgttccttcgacgatctaagttaccaaaaaattgccctcctcgtgtatatcaacccggacagatcactgacagagcggtgcttaattcttatggggactttattaagaatcaagccgatggctacctttttgatcgctataaactgggaaaggttgatcaggaattctacaaggatagcgaccttagtctgggcgtaaccatcaacgtgtggggacgtaaagtcctcctatacgattgcgacgagtttacgaagagctactacaagtctaaatacggaatcgagaacttcacaagtgtttcctgcaagcctccctcaccaccacccaagatcgagcggaaatttccaccatacaacgggtttggcagcgaggaagacagcctcaggaactgcatagacctcaagcccacccctcatagacgtaatttcaagaagtttatggagaaagactcttatggctctaaaagtaatatactgagattctttgctaagctcgtcactgacaagtgtgtcgatctggatcgaatgttcgtcatcagctactatctgggtgatgataccatcagcgtgtttgaacctatcgagcggaactctggcatcgcaggaggcatgttccttaagcgtagcagagtgaaaaagcctggtcaagaggtatttaagagcgagttgagtgagtatatcaaggccgaagagctgtatatcggcgtgacagtgaatgtaaacggctatctgttccgacttcttaacgcagacgagtacacgctcaattatatggaacagaacacagataagtacccattctctaatctgaaacttgccctgcagaaactaaagcaagaggaaggaaagagccgagaattgaaacaagttttcaaagctgctgattcaaagcacaccaatatggtggattataatacctttagggatatcctgatgtctctcacggtgggcaatttggccgagcaggagtttgtgaccatagcccgccactatagagttccagaaggaacttgctccgacatggactttctcatcgccctggcgcatgagaagttcaaaaagaatatgtttgagaattttgatacattcatttacagttgtgtctacgaggacagagagaaaaaaaatgtgttacccactaaggatattaaacgattgtgtaaaagttcccgcctgccccttagcgacgatctgttggaaagcttgctgagccgatttgaagactctgagaaacaaatcgactataagagtttcttctcagcactgaactggcgcaagaatccagtcccagagctccaaccagcttcttacctaaaggagagatgcgaagatgtctggttggggatgccctctcctatccccgccaagtacatagactattggacatttttgaaagacgcatttggactggaagaagagtag

SEQ ID NO: 218191 - DNA, 2250 bp, Artificial Sequence
  derived and/or modified sequence
atggcccttcctctgctaccgggtaattctttcaatagaaacgttgggaaggagaagttccacaagagccaacactgggggttttgtaataacgtaatgatgctggtgtccgatgagaagccagggattggaggggaaccgcttttgggtcagaaaatcaaacccaaatgtagcatatatcctaaaggtgacggctctgatgtccccagttgggtcgccttcgataagcaggtgctctcttttgacgcctatctcgaagaggaagtgcttgataagtcacagacaaactatagaatcaggtactataaaatttatttctaccccgaagacgataccatacaggtgaacgagcccgaagttaagaactctggcttgctgcaaggaacgtctatacgcagacaccgcattaccttgcctcctcccgatgaagaccagttctataccgtttaccacttcaacgtggggaccgaggtcgtgttctacggcagaacatttaaaatttacgattgcgacgctttcacccgcaattttctgcggaaaattggcgtgaaggtaaatcctcccgtccagtgcccagaggatccttatatgaaaattcgtagggaggtagtagagcatgtcgagccgctccgaccttatgagagcctggacaccctcaagcagtttctgcaataccatggcaagattctatgcttcttttgcttatgggatgacagcgttagcatgttcggggataggagggagcttatcctccattatttcctgtgcgacgacaccatagagatcaaggagcttctgcctcattccagcggtcgggatgctctgaagatgtttttgaggcgttcaaagctgcctaaaaactgcccaccaagagtgtaccagcctggacagatcacggatagggcagtcctgaattcgtacggcgacttcattaaaaaccaggccgacgggtacctgttcgacagatataaactaggtaaggtggatcaggaattctacaaagactctgatttatccttaggcgttactattaatgtctggggaaggaaggtgttgttatacgactgcgacgagttcactaagagttactacaagagcaagtatgggatcgaaaacttcacttccgtgagctgcaagccccctagtcccccaccaaaaatcgagcggaagttccctccgtataatggatttggctccgaagaagacagcctgcgcaactgcatcgatttaaagccaaccccacatcggaggaactttaagaaatttatggagaaagatagctacggctcgaaaagtaacatactcagattttttgccaaactggtgaccgataaatgtgttgatctggacagaatgttcgtaatttcttactatctaggagacgatacaatttcggtatttgaaccaattgaacgcaatagcggtattgctggcggtatgttccttaagcgatcgagagtgaagaagccaggtcaggaggtgttcaaatctgagctgagtgagtacatcaaggccgaggaattgtatattggagttaccgtaaatgttaacggatacctcttccggctactgaacgccgatgagtatacactgaattacatggagcagaataccgataaatacccattttctaatttgaagctcgctttacaaaaactaaaacaggaggaaggcaagagtcgagagctaaagcaggtctttaaagcggcagattctaagcatacaaacatggtggactacaacacattccgagacatcctgatgagtcttaccgtcggtaaccttgctgagcaggagttcgtgactatcgctcgccactatagagtacctgaggggacttgttctgatatggacttcctgattgctttggctcacgaaaagtttaagaagaacatgtttgagaactttgacacatttatttatagctgtgtgtatgaggatcgcgaaaaaaagaatgtcctccccaccaaggatatcaaacggctgtgcaagtccagcagattgcctttaagcgacgatttgttggaatccctgctgtctcgatttgaggattcggagaaacagattgactacaaatccttcttttcagctcttaactggagaaagaatccagttcctgaactgcagccagcctcttacctgaaggagcgctgcgaagacgtgtggctcggcatgccaagccctatccctgcaaaatacatagactactggacatttctcaaggatgcttttgggttggaggaggagtag

SEQ ID NO: 218192 - DNA, 2334 bp, Artificial Sequence
  derived and/or modified sequence
ggcggtcagactacccgaccaggcggagcagccgcatgccgcgcactctcctcgggaaccctggactttcgcaccctgtctgctatggcactccccctgctccctggcaatagtttcaatagaaacgtagggaaggagaagttccataagagtcagcattgggggttttgcaacaatgtgatgatgctcgtgtctgacgaaaagccagggattggcggtgaacccctactgggccagaagatcaaaccaaaatgcagtatttatccgaaaggggatggaagcgatgttccatcatgggtggctttcgataagcaggtactgagttttgacgcctatctggaggaagaagtacttgacaaaagtcagacaaattatcgcatcaggtactacaagatttacttttatccagaggacgatacaatccaggtgaatgagcctgaagtcaagaatagcggtctcctgcagggtacctcaatccggcgacacaggatcaccctgcctccaccagatgaggatcagttctacactgtgtatcactttaacgtgggtacagaggtggttttttatggcagaacctttaagatctacgattgcgatgctttcacccgaaactttcttcgtaaaatcggggtaaaagtgaatcctcctgttcaatgcccggaggacccctatatgaagatccgacgcgaagttgttgagcacgtggagccactgcgaccatacgagagcttagacactttgaagcagttccttcaatatcatggcaaaattctgtgttttttctgtttgtgggatgactcggtctcgatgtttggggaccgcagggagctgatcctgcactactttctctgcgatgacacgatagagattaaagagctattgccacacagttctgggagggacgcgctgaaaatgtttctgcgaaggagtaaactccccaagaactgcccaccaagagtataccagccaggtcagattactgatagagccgtgctgaactcttatggcgatttcattaaaaatcaggccgacggctatctctttgatcgctataagctcggaaaggtggaccaggaattttataaagattccgatctatcacttggcgtcacaatcaacgtttggggtcgaaaagtgctgctgtatgactgtgacgaattcacaaagtcatactacaaatcgaagtacggaattgaaaattttacaagcgtctcttgtaagcctccctcccctccccctaagatagagaggaagtttcccccttacaatgggttcggttcagaagaggattctttgcgaaattgcatcgacctgaagcccaccccacaccggaggaattttaaaaagttcatggaaaaagactcctacggtagtaagagtaacattctgcggttcttcgcgaagcttgtcactgacaaatgtgttgatctggatagaatgttcgtcatttcctattatctcggcgacgatactatctcagtgtttgagccaatcgaacggaactctggtatcgcgggtggtatgtttctgaaaaggtcaagggtgaagaaacctggtcaagaagtgtttaagagtgaactatccgagtacatcaaagctgaagagctgtatatcggagtgacggtaaatgtcaatgggtacttatttcgattgctgaacgcagacgagtatacactgaactacatggagcagaacactgataagtatccatttagtaacctgaaactggccctgcagaagttgaaacaggaggagggtaagtcgagggagctgaaacaggtgtttaaagccgctgacagcaagcatactaatatggtggactacaacacatttcgcgacatacttatgagtcttacggtggggaacctagccgagcaggagtttgtgactatcgccagacattacagagtccccgagggcacatgtagtgatatggacttcctaatcgccctggctcatgagaagtttaagaagaatatgttcgagaatttcgataccttcatttactcttgcgtatacgaggatcgcgaaaaaaagaacgttctgccaacaaaggacatcaaaagactgtgcaagtcatctaggctacctctaagtgatgatttactcgagagcttattgtcaagatttgaagatagtgaaaagcagattgactataagtcgtttttttccgctctcaattggcggaagaatcccgtgcccgagctccaacctgcatcttacttgaaagagaggtgcgaagacgtgtggctaggaatgccctcgccgattcccgctaaatacatcgactattggacatttcttaaggatgcttttggactcgaggaggagtag

SEQ ID NO: 218193 - DNA, 2193 bp, Artificial Sequence
  derived and/or modified sequence
tgaaacaacaccgccggtcgtagacggtgcctgccgggacccctattttgggatcctggcttttccgacaccgagaggcatggaccggctagcgctgccggacaacagctacaacctcaacgggagaaaggagacggttctgacgttcccagttgggtggccttcgacaagcaggtattgtcgtttgacgcctacttggaggaagaggtcctggacaaaagccaaacaaactacagaattaggtactataagatctatttttatcccgaagatgatacaatacaggtgaacgaaccggaggtaaagaattctgggcttttgcagggcacttctattcgtcgccatcgaattacgctaccccctcccgacgaagaccagttttacactgtgtaccattttaatgttgggacagaggtagtcttttatggaagaacatttaaaatatacgactgcgacgcttttactcgcaatttcttacgcaaaattggcgtaaaggtgaaccctcccgttcagtgtccagaggatccctacatgaaaatccgcagggaggtcgttgagcatgtcgaacctttgcgcccatatgaatcactggacaccttaaagcaattcttgcagtaccacggaaagattctgtgcttcttctgcctgtgggatgacagcgtgtctatgttcggggatagaagagagcttatcctgcattattttctctgcgatgacacgattgagataaaggaacttctaccccacagttccggaagggacgccctcaaaatgttcctcaggcggagtaagctgccaaagaattgcccccctcgagtctaccagcccggacagatcaccgatagggcagtcctcaacagttacggagattttataaaaaatcaggccgatgggtatttgtttgaccgttataagttgggaaaggtagatcaggagttttacaaggattcagacctgagtctaggggtgacaattaatgtctgggggagaaaagtgctcttgtatgattgtgacgagtttaccaagtcttactacaagtctaagtacgggatcgaaaatttcacatcggttagctgtaaaccaccaagcccccctccgaagatcgagcggaaatttcccccatataacgggtttggaagtgaagaagacagcttacgaaattgtatcgacctgaaaccaacaccacataggcgcaattttaagaagttcatggagaaggactcttatggtagcaaaagtaacatactgcggtttttcgctaagctcgtgactgacaaatgcgtcgatttggaccgcatgttcgtcatctcatactaccttggtgatgataccatatctgtctttgaacccatcgagcgcaactctggcatcgctgggggtatgtttttaaaacgttctagagttaagaagccaggccaggaggtcttcaaaagcgagctcagtgaatatatcaaagcggaagaactttacattggagtaaccgtgaacgtgaacgggtacttgttccgcctcctgaatgccgatgaatatacattgaattatatggaacagaataccgataagtatcctttctccaacttgaagctcgccctgcagaagctcaagcaggaagaggggaagtcgagagaactcaagcaagtttttaaggcggctgattccaagcataccaatatggtcgattacaacacatttcgggacatcctcatgtcactgactgtaggaaatttggccgagcaagagtttgtgaccatcgcacggcattatcgcgtgcccgaagggacctgcagtgatatggattttctgatcgccctggcacatgaaaaattcaagaagaacatgttcgagaatttcgatacatttatttatagctgcgtctacgaagatcgcgaaaaaaaaaacgtgctgcctaccaaggatataaagaggctgtgcaaatccagccgtctgccactgtctgatgaccttctggaatctctgctgagccgcttcgaggattccgaaaagcagatcgattataaaagtttcttcagcgccctgaattggcgcaagaatcccgtgcctgagctgcaaccagctagctacttaaaagaacggtgcgaggacgtgtggctggggatgccctctccaatcccagccaaatatatcgattactggacctttctgaaggacgccttcggcctcgaggaggagtag

SEQ ID NO: 218194 - DNA, 2250 bp, Artificial Sequence
  derived and/or modified sequence
atggccctgcccctgctgcccggcaacagcttcaacagaaacgtgggcaaggagaagttccacaagagccagcactggggcttctgcaacaacgtgatgatgctggtgagcgacgagaagcccggcatcggcggcgagcccctgctgggccagaagatcaagcccaagtgcagcatctaccccaagggcgacggcagcgacgtgcccagctgggtggccttcgacaagcaggtgctgagcttcgacgcctacctggaggaggaggtgctggacaagagccagaccaactacagaatcagatactacaagatctacttctaccccgaggacgacaccatccaggtgaacgagcccgaggtgaagaacagcggcctgctgcagggcaccagcatcagaagacacagaatcaccctgcccccccccgacgaggaccagttctacaccgtgtaccacttcaacgtgggcaccgaggtggtgttctacggcagaaccttcaagatctacgactgcgacgccttcaccagaaacttcctgagaaagatcggcgtgaaggtgaacccccccgtgcagtgccccgaggacccctacatgaagatcagaagagaggtggtggagcacgtggagcccctgagaccctacgagagcctggacaccctgaagcagttcctgcagtaccacggcaagatcctgtgcttcttctgcctgtgggacgacagcgtgagcatgttcggcgacagaagagagctgatcctgcactacttcctgtgcgacgacaccatcgagatcaaggagctgctgccccacagcagcggcagagacgccctgaagatgttcctgagaagaagcaagctgcccaagaactgcccccccagagtgtaccagcccggccagatcaccgacagagccgtgctgaacagctacggcgacttcatcaagaaccaggccgacggctacctgttcgacagatacaagctgggcaaggtggaccaggagttctacaaggacagcgacctgagcctgggcgtgaccatcaacgtgtggggcagaaaggtgctgctgtacgactgcgacgagttcaccaagagctactacaagagcaagtacggcatcgagaacttcaccagcgtgagctgcaagccccccagccccccccccaagatcgagagaaagttccccccctacaacggcttcggcagcgaggaggacagcctgagaaactgcatcgacctgaagcccaccccccacagaagaaacttcaagaagttcatggagaaggacagctacggcagcaagagcaacatcctgagattcttcgccaagctggtgaccgacaagtgcgtggacctggacagaatgttcgtgatcagctactacctgggcgacgacaccatcagcgtgttcgagcccatcgagagaaacagcggcatcgccggcggcatgttcctgaagagaagcagagtgaagaagcccggccaggaggtgttcaagagcgagctgagcgagtacatcaaggccgaggagctgtacatcggcgtgaccgtgaacgtgaacggctacctgttcagactgctgaacgccgacgagtacaccctgaactacatggagcagaacaccgacaagtaccccttcagcaacctgaagctggccctgcagaagctgaagcaggaggagggcaagagcagagagctgaagcaggtgttcaaggccgccgacagcaagcacaccaacatggtggactacaacaccttcagagacatcctgatgagcctgaccgtgggcaacctggccgagcaggagttcgtgaccatcgccagacactacagagtgcccgagggcacctgcagcgacatggacttcctgatcgccctggcccacgagaagttcaagaagaacatgttcgagaacttcgacaccttcatctacagctgcgtgtacgaggacagagagaagaagaacgtgctgcccaccaaggacatcaagagactgtgcaagagcagcagactgcccctgagcgacgacctgctggagagcctgctgagcagattcgaggacagcgagaagcagatcgactacaagagcttcttcagcgccctgaactggagaaagaaccccgtgcccgagctgcagcccgccagctacctgaaggagagatgcgaggacgtgtggctgggcatgcccagccccatccccgccaagtacatcgactactggaccttcctgaaggacgccttcggcctggaggaggagtag

SEQ ID NO: 218195 - DNA, 2334 bp, Artificial Sequence
  derived and/or modified sequence
ggcggccagaccaccagacccggcggcgccgccgcctgcagagccctgagcagcggcaccctggacttcagaaccctgagcgccatggccctgcccctgctgcccggcaacagcttcaacagaaacgtgggcaaggagaagttccacaagagccagcactggggcttctgcaacaacgtgatgatgctggtgagcgacgagaagcccggcatcggcggcgagcccctgctgggccagaagatcaagcccaagtgcagcatctaccccaagggcgacggcagcgacgtgcccagctgggtggccttcgacaagcaggtgctgagcttcgacgcctacctggaggaggaggtgctggacaagagccagaccaactacagaatcagatactacaagatctacttctaccccgaggacgacaccatccaggtgaacgagcccgaggtgaagaacagcggcctgctgcagggcaccagcatcagaagacacagaatcaccctgcccccccccgacgaggaccagttctacaccgtgtaccacttcaacgtgggcaccgaggtggtgttctacggcagaaccttcaagatctacgactgcgacgccttcaccagaaacttcctgagaaagatcggcgtgaaggtgaacccccccgtgcagtgccccgaggacccctacatgaagatcagaagagaggtggtggagcacgtggagcccctgagaccctacgagagcctggacaccctgaagcagttcctgcagtaccacggcaagatcctgtgcttcttctgcctgtgggacgacagcgtgagcatgttcggcgacagaagagagctgatcctgcactacttcctgtgcgacgacaccatcgagatcaaggagctgctgccccacagcagcggcagagacgccctgaagatgttcctgagaagaagcaagctgcccaagaactgcccccccagagtgtaccagcccggccagatcaccgacagagccgtgctgaacagctacggcgacttcatcaagaaccaggccgacggctacctgttcgacagatacaagctgggcaaggtggaccaggagttctacaaggacagcgacctgagcctgggcgtgaccatcaacgtgtggggcagaaaggtgctgctgtacgactgcgacgagttcaccaagagctactacaagagcaagtacggcatcgagaacttcaccagcgtgagctgcaagccccccagccccccccccaagatcgagagaaagttccccccctacaacggcttcggcagcgaggaggacagcctgagaaactgcatcgacctgaagcccaccccccacagaagaaacttcaagaagttcatggagaaggacagctacggcagcaagagcaacatcctgagattcttcgccaagctggtgaccgacaagtgcgtggacctggacagaatgttcgtgatcagctactacctgggcgacgacaccatcagcgtgttcgagcccatcgagagaaacagcggcatcgccggcggcatgttcctgaagagaagcagagtgaagaagcccggccaggaggtgttcaagagcgagctgagcgagtacatcaaggccgaggagctgtacatcggcgtgaccgtgaacgtgaacggctacctgttcagactgctgaacgccgacgagtacaccctgaactacatggagcagaacaccgacaagtaccccttcagcaacctgaagctggccctgcagaagctgaagcaggaggagggcaagagcagagagctgaagcaggtgttcaaggccgccgacagcaagcacaccaacatggtggactacaacaccttcagagacatcctgatgagcctgaccgtgggcaacctggccgagcaggagttcgtgaccatcgccagacactacagagtgcccgagggcacctgcagcgacatggacttcctgatcgccctggcccacgagaagttcaagaagaacatgttcgagaacttcgacaccttcatctacagctgcgtgtacgaggacagagagaagaagaacgtgctgcccaccaaggacatcaagagactgtgcaagagcagcagactgcccctgagcgacgacctgctggagagcctgctgagcagattcgaggacagcgagaagcagatcgactacaagagcttcttcagcgccctgaactggagaaagaaccccgtgcccgagctgcagcccgccagctacctgaaggagagatgcgaggacgtgtggctgggcatgcccagccccatccccgccaagtacatcgactactggaccttcctgaaggacgccttcggcctggaggaggagtag

SEQ ID NO: 218196 - DNA, 2193 bp, Artificial Sequence
  derived and/or modified sequence
tgaaacaacaccgccggcagaagaagatgcctgcccggccccctgttctgggaccccggcttcagcgacaccgagagacacggccccgccagcgccgccggccagcagctgcagccccagagagagaagggcgacggcagcgacgtgcccagctgggtggccttcgacaagcaggtgctgagcttcgacgcctacctggaggaggaggtgctggacaagagccagaccaactacagaatcagatactacaagatctacttctaccccgaggacgacaccatccaggtgaacgagcccgaggtgaagaacagcggcctgctgcagggcaccagcatcagaagacacagaatcaccctgcccccccccgacgaggaccagttctacaccgtgtaccacttcaacgtgggcaccgaggtggtgttctacggcagaaccttcaagatctacgactgcgacgccttcaccagaaacttcctgagaaagatcggcgtgaaggtgaacccccccgtgcagtgccccgaggacccctacatgaagatcagaagagaggtggtggagcacgtggagcccctgagaccctacgagagcctggacaccctgaagcagttcctgcagtaccacggcaagatcctgtgcttcttctgcctgtgggacgacagcgtgagcatgttcggcgacagaagagagctgatcctgcactacttcctgtgcgacgacaccatcgagatcaaggagctgctgccccacagcagcggcagagacgccctgaagatgttcctgagaagaagcaagctgcccaagaactgcccccccagagtgtaccagcccggccagatcaccgacagagccgtgctgaacagctacggcgacttcatcaagaaccaggccgacggctacctgttcgacagatacaagctgggcaaggtggaccaggagttctacaaggacagcgacctgagcctgggcgtgaccatcaacgtgtggggcagaaaggtgctgctgtacgactgcgacgagttcaccaagagctactacaagagcaagtacggcatcgagaacttcaccagcgtgagctgcaagccccccagccccccccccaagatcgagagaaagttccccccctacaacggcttcggcagcgaggaggacagcctgagaaactgcatcgacctgaagcccaccccccacagaagaaacttcaagaagttcatggagaaggacagctacggcagcaagagcaacatcctgagattcttcgccaagctggtgaccgacaagtgcgtggacctggacagaatgttcgtgatcagctactacctgggcgacgacaccatcagcgtgttcgagcccatcgagagaaacagcggcatcgccggcggcatgttcctgaagagaagcagagtgaagaagcccggccaggaggtgttcaagagcgagctgagcgagtacatcaaggccgaggagctgtacatcggcgtgaccgtgaacgtgaacggctacctgttcagactgctgaacgccgacgagtacaccctgaactacatggagcagaacaccgacaagtaccccttcagcaacctgaagctggccctgcagaagctgaagcaggaggagggcaagagcagagagctgaagcaggtgttcaaggccgccgacagcaagcacaccaacatggtggactacaacaccttcagagacatcctgatgagcctgaccgtgggcaacctggccgagcaggagttcgtgaccatcgccagacactacagagtgcccgagggcacctgcagcgacatggacttcctgatcgccctggcccacgagaagttcaagaagaacatgttcgagaacttcgacaccttcatctacagctgcgtgtacgaggacagagagaagaagaacgtgctgcccaccaaggacatcaagagactgtgcaagagcagcagactgcccctgagcgacgacctgctggagagcctgctgagcagattcgaggacagcgagaagcagatcgactacaagagcttcttcagcgccctgaactggagaaagaaccccgtgcccgagctgcagcccgccagctacctgaaggagagatgcgaggacgtgtggctgggcatgcccagccccatccccgccaagtacatcgactactggaccttcctgaaggacgccttcggcctggaggaggagtag

SEQ ID NO: 218197 - DNA, 3251 bp, Artificial Sequence
  derived and/or modified sequence
aacgtgggggccaaacaacacggccgggaggcgccgctgcctgccgggccctctcttctgggaccctggattttcggacactgagcgccatggccctgcctctgctgccgggcaacagcttcaaccgcaacgtgggaaaggagaagtttcacaaatcccaacattggggcttttgcaacaatgttatgatgttggtgagtgatgaaaagcctggaataggtggagaaccacttctggggcaaaagataaagcctaaatgtagcatatatcctaaaggagatggaagtgatgtaccatcatgggtagcctttgataaacaggtattatcttttgatgcctatttggaagaggaagtacttgataaaagccaaaccaactacagaataagatactataaaatctacttctaccctgaagatgacacaattcaagtaaatgaaccagaggtgaaaaatagtggattacttcaagggacttctatccggcgtcatcggattactcttccgcctcctgatgaggatcagttttatactgtgtatcattttaatgtcggcacagaggttgtcttctatggccggacattcaagatttatgactgtgatgcattcacaagaaactttttgaggaaaataggggtcaaagtgaatcccccagtgcaatgtccagaagatccttacatgaagattcggagagaggttgtagaacacgtagagcccttacgtccctacgaatccctcgacaccctgaaacagttcctccagtatcatggcaagattttgtgtttcttctgcctgtgggatgactcagtctcaatgtttggagaccgtagagaactcatcctgcattacttcttgtgtgatgatactattgaaatcaaagaattgcttccacacagctcaggccgagatgctctaaaaatgttcctccggaggagtaagctacccaagaattgcccacctagagtctatcaaccaggccagataacagatcgagcagttctcaattcatatggtgactttataaagaaccaagcggatggctacctgttcgatagatataagctaggaaaagtagaccaagagttttacaaagatagtgacctgtccctaggagtcaccatcaatgtgtggggaagaaaagtgctcctttatgactgtgatgaatttacgaagtcttattataagtctaaatatggaattgagaactttacctcagtttcatgcaagcctccttctcctcctccaaaaatagaaaggaaatttccaccttacaacggttttggttctgaagaggattctctccgtaactgcatagacctcaagcccacacctcatcggaggaacttcaagaagtttatggaaaaagacagctatggctccaaaagcaatatactccgtttttttgcaaaactagtcacagacaaatgtgttgacttggacaggatgtttgttatttcatattatctcggtgatgacaccatttcagtgtttgaacctatagagaggaattcaggaattgctggtgggatgttcttgaaaagaagtcgcgttaagaagcctggacaagaagtctttaaaagtgaactatctgaatatatcaaggccgaggagctgtacattggagtcacggtgaatgtgaatggttacctatttcgtttgctcaatgctgatgagtataccttaaactacatggagcagaatacagataagtatcctttcagtaacctcaaacttgccctacaaaagctgaagcaagaagaaggaaaatccagagagctcaagcaggtatttaaagctgctgactctaagcacacaaatatggtggattataatacattcagagacatattgatgtctttgactgttggaaaccttgcagagcaagaatttgtaaccattgcacgtcactaccgtgtgcctgagggcacatgttcagatatggatttcttaatcgcactggcccacgaaaagttcaagaaaaatatgtttgagaatttcgacactttcatttattcctgtgtgtatgaagatcgagaaaaaaaaaatgtattacccaccaaagacattaaaaggctgtgcaaatcctccagattacctttgagtgatgatcttctagaatccttattgtcaaggtttgaagacagtgaaaaacaaatagattataagtcatttttctctgccctgaactggagaaagaatccagtgcctgaattgcaaccagcatcataccttaaagagagatgtgaagatgtttggcttggtatgccatcacctattcctgcgaaatacattgactactggacctttttgaaggacgcgtttggcttagaggaggaataaccatgccagttttggtcaattctctatgatttacttctctcattttgccacatttactttagtagatataatttcattaaaaacaaaaaagaaacaaggtttatattaaatggaaatccataaaccacaattaatcctattttgtcatgttagttttacagaacatcatgttacattgccgacgtactgttactatttaaaatgccatcttaaaacatgttgaatatttttattatatgtatggtttattaataccaaaaaatcttctgataatttttgatccaacataatttgattcattactatatgaacagaaaatgacttttgaaggttatacatgacaatacaaaatcaaattatatcacagcaataagttgtgattctattaaacatttttgaaacctttttgacacgtttattacttacataattaagttttgtagcaacccacctcatcaaaataattcttaaacctctctagagtaaatatatttatcttttgaacttagtaaagctatgggaagaaaaagaacctccaacacacacacacacacacacacacacgcacgtgcacacacactggaaacatatgcagtatttatatttgtaatgcccttttttctatctaaagtcagcttgttagcttaggaatatatgcatgtgtgtataattatagtttgaccaaaactttattatgtctaaaatatttacaaatgtgaaagctgaagattttgagatttttgttttttttttggtttgttttacacacacatcccacgcgccccaccctagaggtttaaatattcagaaactacaacatttttcccctgcatttttctagttctatttttatttttcttcagcagaactcttgtcatgtagtgtacatttgattaaaacccatagccatgt

SEQ ID NO: 218198 - DNA, 1430 bp, Artificial Sequence
  derived and/or modified sequence
aacgtgggggccaaacaacacggccgggaggcgccgctgcctgccgggccctctcttctgggaccctggattttcggacactgagcgccatggccctgcctctgctgccgggcaacagcttcaaccgcaacgtgggaaaggagaagtttcacaaatcccaacattggggcttttgcaacaatgttatgatgttggtgagtgatgaaaagcctggaataggtggagaaccacttctggggcaaaagataaagcctaaatgtagcatatatcctaaaggagatggaagtgatgtaccatcatgggtagcctttgataaacaggtattatcttttgatgcctatttggaagaggaagtacttgataaaagccaaaccaactacagaataagatactataaaatctacttctaccctgaagatgacacaattcaagtaaatgaaccagaggtgaaaaatagtggattacttcaagggacttctatccggcgtcatcggattactcttccgcctcctgatgaggatcagttttatactgtgtatcattttaatgtcggcacagaggttgtcttctatggccggacattcaagatttatgactgtgatgcattcacaagaaactttttgaggaaaataggggtcaaagtgaatcccccagtgcaatgtccagaagatccttacatgaagattcggagagaggttgtagaacacgtagagcccttacgtccctacgaatccctcgacaccctgaaacagttcctccagtatcatggcaagattttgtgtttcttctgcctgtgggatgactcagtctcaatgtttggagaccgtagagaactcatcctgcattacttcttgtgtgatgatactattgaaatcaaagaattgcttccacacagctcaggccgagatgctctaaaaatgttcctccggaggagtaagctacccaagaattgcccacctagagtctatcaaccaggccagataacagatcgagcagttctcaattcatatggtgactttataaagaaccaagcggatggctacctgttcgatagatataagctaggaaaagtagaccaagagttttacaaagatagtgacctgtccctaggagtcaccatcaatgtgtggggaagaaaagtgctcctttatgactgtgatgaatttacgaagtcttattataagtctaaatatggaattgagaactttacctcagtttcatgcaagcctccttctcctcctccaaaaatagaaaggaaatttccaccttacaacggttttggttctgaagaggattctctccgtaactgcatagacctcaagcccacacctcatcggaggaacttcaagaagtttatggaaaaagacagctatggctccaaaagcaatatactctttttttgcaaaactagtcacagacaaatgtgttga

SEQ ID NO: 218199 - DNA, 2464 bp, Artificial Sequence
  derived and/or modified sequence
gggggccaaacaacacggccgggaggcgccgctgcctgccgggccctctcttctgggaccctggattttcggacactgagcgccatggccctgcctctgctgccgggcaacagcttcaaccgcaacgtgggaaaggagaagtttcacaaatcccaacattggggcttttgcaacaatgttatgatgttggtgagtgatgaaaagcctggaataggtggagaaccacttctggggcaaaagataaagcctaaatgtagcatatatcctaaaggagatggaagtgatgtaccatcatgggtagcctttgataaacaggtattatcttttgatgcctatttggaagaggaagtacttgataaaagccaaaccaactacagaataagatactataaaatctacttctaccctgaagatgacacaattcaagtaaatgaaccagaggtgaaaaatagtggattacttcaagggacttctatccggcgtcatcggattactcttccgcctcctgatgaggatcagttttatactgtgtatcattttaatgtcggcacagaggttgtcttctatggccggacattcaagatttatgactgtgatgcattcacaagaaactttttgaggaaaataggggtcaaagtgaatcccccagtgcaatgtccagaagatccttacatgaagattcggagagaggttgtagaacacgtagagcccttacgtccctacgaatccctcgacaccctgaaacagttcctccagtatcatggcaagattttgtgtttcttctgcctgtgggatgactcagtctcaatgtttggagaccgtagagaactcatcctgcattacttcttgtgtgatgatactattgaaatcaaagaattgcttccacacagctcaggccgagatgctctaaaaatgttcctccggaggagtaagctacccaagaattgcccacctagagtctatcaaccaggccagataacagatcgagcagttctcaattcatatggtgactttataaagaaccaagcggatggctacctgttcgatagatataagctaggaaaagtagaccaagagttttacaaagatagtgacctgtccctaggagtcaccatcaatgtgtggggaagaaaagtgctcctttatgactgtgatgaatttacgaagtcttattataagtctaaatatggaattgagaactttacctcagtttcatgcaagcctccttctcctcctccaaaaatagaaaggaaatttccaccttacaacggttttggttctgaagaggattctctccgtaactgcatagacctcaagcccacacctcatcggaggaacttcaagaagtttatggaaaaagacagctatggctccaaaagcaatatactccgtttttttgcaaaactagtcacagacaaatgtgttgacttggacaggatgtttgttatttcatattatctcggtgatgacaccatttcagtgtttgaacctatagagaggaattcaggaattgctggtgggatgttcttgaaaagaagtcgcgttaagaagcctggacaagaagtctttaaaagtgaactatctgaatatatcaaggccgaggagctgtacattggagtcacggtgaatgtgaatggttacctatttcgtttgctcaatgctgatgagtataccttaaactacatggagcagaatacagataagtatcctttcagtaacctcaaacttgccctacaaaagctgaagcaagaagaaggaaaatccagagagctcaagcaggtatttaaagctgctgactctaagcacacaaatatggtggattataatacattcagagacatattgatgtctttgactgttggaaaccttgcagagcaagaatttgtaaccattgcacgtcactaccgtgtgcctgagggcacatgttcagatatggatttcttaatcgcactggcccacgaaaagttcaagaaaaatatgtttgagaatttcgacactttcatttattcctgtgtgtatgaagatcgagaaaaaaaaaatgtattacccaccaaagacattaaaaggctgtgcaaatcctccagattacctttgagtgatgatcttctagaatccttattgtcaaggtttgaagacagtgaaaaacaaatagattataagtcatttttctctgccctgaactggagaaagaatccagtgcctgaattgcaaccagcatcataccttaaagagagatgtgaagatgtttggcttggtatgccatcacctattcctgcgaaatacattgactactggacctttttgaaggacgcgtttggcttagaggaggaataaccatgccagttttggtcaattctctatgatttacttctctcattttgccacatttactttagtagatataatttcattaaaaacaaaaaagaaacaaggtttatattaaatggaaatccataaaccacaa

SEQ ID NO: 218200 - DNA, 2274 bp, Artificial Sequence
  derived and/or modified sequence
aaacaacacggccgggaggcgccgctgcctgccgggccctctcttctgggaccctggattttcggacactgagcgccatggccctgcctctgctgccgggcaacagcttcaaccgcaacgtgagaaaggagatggaagtgatgtaccatcatgggtagcctttgataaacaggtattatcttttgatgcctatttggaagaggaagtacttgataaaagccaaaccaactacagaataagatactataaaatctacttctaccctgaagatgacacaattcaagtaaatgaaccagaggtgaaaaatagtggattacttcaagggacttctatccggcgtcatcggattactcttccgcctcctgatgaggatcagttttatactgtgtatcattttaatgtcggcacagaggttgtcttctatggccggacattcaagatttatgactgtgatgcattcacaagaaactttttgaggaaaataggggtcaaagtgaatcccccagtgcaatgtccagaagatccttacatgaagattcggagagaggttgtagaacacgtagagcccttacgtccctacgaatccctcgacaccctgaaacagttcctccagtatcatggcaagattttgtgtttcttctgcctgtgggatgactcagtctcaatgtttggagaccgtagagaactcatcctgcattacttcttgtgtgatgatactattgaaatcaaagaattgcttccacacagctcaggccgagatgctctaaaaatgttcctccggaggagtaagctacccaagaattgcccacctagagtctatcaaccaggccagataacagatcgagcagttctcaattcatatggtgactttataaagaaccaagcggatggctacctgttcgatagatataagctaggaaaagtagaccaagagttttacaaagatagtgacctgtccctaggagtcaccatcaatgtgtggggaagaaaagtgctcctttatgactgtgatgaatttacgaagtcttattataagtctaaatatggaattgagaactttacctcagtttcatgcaagcctccttctcctcctccaaaaatagaaaggaaatttccaccttacaacggttttggttctgaagaggattctctccgtaactgcatagacctcaagcccacacctcatcggaggaacttcaagaagtttatggaaaaagacagctatggctccaaaagcaatatactccgtttttttgcaaaactagtcacagacaaatgtgttgacttggacaggatgtttgttatttcatattatctcggtgatgacaccatttcagtgtttgaacctatagagaggaattcaggaattgctggtgggatgttcttgaaaagaagtcgcgttaagaagcctggacaagaagtctttaaaagtgaactatctgaatatatcaaggccgaggagctgtacattggagtcacggtgaatgtgaatggttacctatttcgtttgctcaatgctgatgagtataccttaaactacatggagcagaatacagataagtatcctttcagtaacctcaaacttgccctacaaaagctgaagcaagaagaaggaaaatccagagagctcaagcaggtatttaaagctgctgactctaagcacacaaatatggtggattataatacattcagagacatattgatgtctttgactgttggaaaccttgcagagcaagaatttgtaaccattgcacgtcactaccgtgtgcctgagggcacatgttcagatatggatttcttaatcgcactggcccacgaaaagttcaagaaaaatatgtttgagaatttcgacactttcatttattcctgtgtgtatgaagatcgagaaaaaaaaaatgtattacccaccaaagacattaaaaggctgtgcaaatcctccagattacctttgagtgatgatcttctagaatccttattgtcaaggtttgaagacagtgaaaaacaaatagattataagtcatttttctctgccctgaactggagaaagaatccagtgcctgaattgcaaccagcatcataccttaaagagagatgtgaagatgtttggcttggtatgccatcacctattcctgcgaaatacattgactactggacctttttgaaggacgcgtttggcttagaggaggaataaccatgccagttttggtcaattctctatgatttacttctctcattttgccacatttactttagtagatataatttcattaaaaa

SEQ ID NO: 218201 - protein, 570 aa, Artificial Sequence
  derived and/or modified sequence
MENLKSGVYPLKEASGCPGADRNLLVYSFYEKGPLTFRDVAIEFSLEEWQCLDTAQQDLYRKVMLENYRNLVFLAGIAVSKPDLITCLEQGKEPWNMKRHAMVDQPPVTYSHFAQDLWPEQGIKDSFQEVILRRYGKCGHEDLQLRTGCKSVDECNLHKECYDELNQCLTTTQSEIFQYDKYVNVFYKFSNPNIQKIRHTGKKPFKCKKCDKSFCMLLHLTQHKRIHIRENSYQCEECGKVFNWFSTLTRHRRIHTGEKPYKCEQCGKAFKQSSTLTTHKIIHTGEKPYRCEECGKTFNRSSHLTTHKRIHTGEKPYRCEECGRAFNRSSHLTTHKIIHTGEKPYKCEECGKAFNQSSTLTTHKIIHAGEKPYKCEECGKAFYRFSYLTKHKIIHTGEKFYKCEECGKGFNWSSTLTKHKRIHTGEKPYKCEQCGKAFNESSNLTAHKIIHTGEKPYKCEECGKAFNRSPKLTAHKVIHSGEKPYKCEECGKAFNQFSNLTKHKITHIGDTSYKYLECDKAFSQSSTLTKHKVIHTGEKPYNCEEYGKAFNQSSNLIEQSNSYWRETLQM

SEQ ID NO: 218202 - DNA, 1713 bp, Artificial Sequence
  derived and/or modified sequence
atggagaacctgaagagcggcgtgtaccccctgaaggaggccagcggctgccccggcgccgacagaaacctgctggtgtacagcttctacgagaagggccccctgaccttcagagacgtggccatcgagttcagcctggaggagtggcagtgcctggacaccgcccagcaggacctgtacagaaaggtgatgctggagaactacagaaacctggtgttcctggccggcatcgccgtgagcaagcccgacctgatcacctgcctggagcagggcaaggagccctggaacatgaagagacacgccatggtggaccagccccccgtgacctacagccacttcgcccaggacctgtggcccgagcagggcatcaaggacagcttccaggaggtgatcctgagaagatacggcaagtgcggccacgaggacctgcagctgagaaccggctgcaagagcgtggacgagtgcaacctgcacaaggagtgctacgacgagctgaaccagtgcctgaccaccacccagagcgagatcttccagtacgacaagtacgtgaacgtgttctacaagttcagcaaccccaacatccagaagatcagacacaccggcaagaagcccttcaagtgcaagaagtgcgacaagagcttctgcatgctgctgcacctgacccagcacaagagaatccacatcagagagaacagctaccagtgcgaggagtgcggcaaggtgttcaactggttcagcaccctgaccagacacagaagaatccacaccggcgagaagccctacaagtgcgagcagtgcggcaaggccttcaagcagagcagcaccctgaccacccacaagatcatccacaccggcgagaagccctacagatgcgaggagtgcggcaagaccttcaacagaagcagccacctgaccacccacaagagaatccacaccggcgagaagccctacagatgcgaggagtgcggcagagccttcaacagaagcagccacctgaccacccacaagatcatccacaccggcgagaagccctacaagtgcgaggagtgcggcaaggccttcaaccagagcagcaccctgaccacccacaagatcatccacgccggcgagaagccctacaagtgcgaggagtgcggcaaggccttctacagattcagctacctgaccaagcacaagatcatccacaccggcgagaagttctacaagtgcgaggagtgcggcaagggcttcaactggagcagcaccctgaccaagcacaagagaatccacaccggcgagaagccctacaagtgcgagcagtgcggcaaggccttcaacgagagcagcaacctgaccgcccacaagatcatccacaccggcgagaagccctacaagtgcgaggagtgcggcaaggccttcaacagaagccccaagctgaccgcccacaaggtgatccacagcggcgagaagccctacaagtgcgaggagtgcggcaaggccttcaaccagttcagcaacctgaccaagcacaagatcacccacatcggcgacaccagctacaagtacctggagtgcgacaaggccttcagccagagcagcaccctgaccaagcacaaggtgatccacaccggcgagaagccctacaactgcgaggagtacggcaaggccttcaaccagagcagcaacctgatcgagcagagcaacagctactggagagagaccctgcagatgtag

SEQ ID NO: 218203 - DNA, 1713 bp, Artificial Sequence
  derived and/or modified sequence
atggaaaacctgaagtccggcgtgtaccctctcaaggaggcaagtggctgtcccggcgccgaccgcaatctattagtctatagcttctacgagaagggcccgctgaccttccgcgatgtggcgatagagtttagtcttgaggagtggcaatgtttggacactgcccagcaagacctctaccggaaggtcatgcttgagaactacagaaatctcgtattccttgcaggtatcgctgtgagtaagcccgatctcatcacttgtttggaacaagggaaagaaccttggaatatgaagagacacgccatggtggatcaaccacctgtgacatacagtcacttcgcccaggatttatggcctgagcagggtatcaaggatagctttcaggaagtgattctccggcgttatggtaaatgtggacacgaagatctccagctgcggacagggtgcaaatcggttgacgagtgcaatctccacaaagaatgctacgatgagctcaaccaatgccttactacaacacagtccgagattttccaatatgataaatacgtgaacgtgttctataagtttagtaacccaaacatacagaagattagacacacagggaagaagccattcaagtgtaagaaatgtgataagagcttttgcatgctgctccatcttacccagcataagaggatccacattagagagaacagctatcaatgtgaagaatgtgggaaggtttttaattggttttctaccttgacaaggcaccggcgcatccatacaggggaaaaaccatataaatgtgaacagtgtggtaaagcgtttaagcagtcttccacactaacaacacataagatcatccacaccggggagaagccctaccgatgtgaggagtgcggcaagacttttaatagatcttcccacttgaccacccacaagcgtatccacaccggggagaagccatacaggtgcgaggaatgtggcagagctttcaatagaagcagccacttaacaacccacaagattattcacaccggagaaaaaccctataagtgcgaggagtgtggcaaggcttttaatcagagttcaaccctcactacacataaaattattcacgcgggggagaaaccctataagtgtgaggagtgtggcaaagccttctatagattcagctacttgactaaacataaaattatacacacaggcgaaaaattctacaaatgcgaggaatgtggcaagggatttaactggagctccaccctaacaaaacacaagcggattcacacaggcgagaaaccctacaagtgtgaacagtgtgggaaggctttcaacgaaagtagcaatcttactgcccacaaaatcattcacactggcgaaaagccgtataaatgcgaagaatgtggcaaggctttcaatcgatcgccgaaattgactgcacataaggtgattcactcgggggagaaaccttacaagtgcgaggagtgcggtaaggcgttcaaccagttctcaaacttaactaaacataagatcacacacatcggcgacacaagctacaaatatcttgaatgcgataaggctttttctcaatccagcacgttgactaagcacaaggtgatacataccggcgaaaagccatataattgcgaggagtacggcaaggcttttaatcagtcaagcaatctgatcgaacagtctaattcgtactggagggaaactttacagatgtag

SEQ ID NO: 218204 - DNA, 1713 bp, Artificial Sequence
  derived and/or modified sequence
atggagaacctgaagagcggcgtgtaccccctgaaggaggccagcggctgccctggagctgacaggaacctgctggtgtacagcttctatgagaagggccccctgaccttcagagatgtggccatcgagttcagcctggaggagtggcagtgcctggacacagcccagcaggacctgtacaggaaggtgatgctggagaactacagaaacctggtgttcctggccggcattgctgtgtccaagccagacctgatcacctgcctggagcagggcaaggagccctggaacatgaagagacatgccatggtggaccagccccctgtgacctacagccactttgcccaggacctgtggccagagcagggcatcaaggacagcttccaggaggtgatcctgcggcgctatggaaaatgtggccacgaggacctgcagctgaggacaggctgcaagtctgtggatgagtgcaacctgcacaaggagtgctatgatgagctgaaccagtgcctgaccaccacccagagcgagatcttccagtatgacaagtatgtgaatgtgttctacaagttcagcaaccccaacatccagaagatccgccacacaggcaagaagcccttcaagtgcaagaagtgtgacaagagcttctgcatgctgctgcacctgacccagcacaagaggatccacatccgggagaacagctaccagtgtgaagaatgtgggaaggtgttcaactggttcagcaccctgaccaggcaccggcgcatccacactggagagaagccctacaagtgtgagcagtgtgggaaggccttcaagcagagcagcaccctgaccacccacaagatcatccacactggagagaagccctaccgctgtgaagaatgtgggaagaccttcaacagaagcagccacctgaccacccacaagaggatccacactggagagaagccctaccgctgtgaagaatgtggccgggccttcaacagaagcagccacctgaccacccacaagatcatccacactggagagaagccctacaagtgtgaagaatgtgggaaggccttcaaccagagcagcaccctgaccacccacaagatcatccacgccggggagaagccctacaagtgtgaagaatgtgggaaggccttctaccgcttctcctacctgaccaagcacaagatcatccacactggagagaagttctacaagtgtgaagaatgtgggaagggcttcaactggagcagcaccctgaccaagcacaagaggatccacactggagagaagccctacaagtgtgagcagtgtgggaaggccttcaatgaaagcagcaacctgacagcccacaagatcatccacactggagagaagccctacaagtgtgaagaatgtgggaaggccttcaacagaagccccaagctgacagcccacaaggtgatccacagcggggagaagccctacaagtgtgaagaatgtgggaaggccttcaaccagttcagcaacctgaccaagcacaagatcacccacatcggggacaccagctacaagtacctggagtgtgacaaggccttcagccagagcagcaccctgaccaagcacaaggtgatccacactggagagaagccctacaactgtgaggagtatggcaaggccttcaaccagagcagcaacctgattgagcagagcaacagctactggagggagaccctgcagatgtag

SEQ ID NO: 218205 - DNA, 1713 bp, Artificial Sequence
  derived and/or modified sequence
atggagaacctgaagagcggcgtgtaccccctgaaggaggccagcggatgcccaggcgctgaccgcaatctgcttgtgtattccttctacgaaaaagggcctctaacttttcgcgatgttgccattgaattctctctcgaggagtggcagtgcttggatactgctcagcaggacctctataggaaggtgatgctggaaaactaccgcaatctggtcttcttagctggtatcgccgtgagtaaacctgacctgatcacgtgtctcgaacaggggaaggaaccttggaatatgaaaagacatgcgatggttgaccagccaccagtaacctatagtcattttgcacaggacctgtggccggagcagggcattaaggattcatttcaagaggttatcctgaggcgctatggcaagtgcgggcatgaagatcttcaactgagaaccggttgcaagagcgttgatgagtgtaatttacacaaagaatgttacgacgaactcaaccagtgcctgaccaccactcagtcagaaatctttcaatacgataagtatgtgaacgtgttttacaaattcagcaatccaaacatacagaaaattagacataccggaaagaagcctttcaagtgcaaaaagtgcgacaagagcttttgcatgctgctgcacttgacacaacacaagagaatccatattagagagaactcctaccagtgtgaggaatgcggaaaggtgttcaactggttcagtaccctgactaggcaccgccgcatccacacaggtgagaaaccttacaagtgtgaacagtgtggcaaagcattcaaacaatcctcaacccttacgacccacaaaatcattcacacaggagaaaagccctatcgttgtgaagagtgcggaaaaaccttcaatcggtctagtcacctgacaacccacaaacgaattcacaccggagaaaaaccataccgctgtgaggagtgtggacgggccttcaaccggtccagtcacctgaccacgcacaagatcattcacaccggtgagaagccttataagtgcgaggagtgtggcaaagctttcaatcagagttctaccttgacgacccacaaaataatccacgcaggcgaaaagccatacaagtgcgaagagtgtggaaaggccttttatcgattttcctacctgactaaacacaagatcattcatacgggtgaaaaattttataagtgcgaggagtgcggcaaggggtttaactggagctcgaccctcacaaagcacaagcgaattcacacaggagaaaaaccttacaaatgcgagcaatgcgggaaagcattcaatgagtcttcaaacctgaccgctcacaagatcattcatacaggagaaaagccgtacaagtgtgaagagtgcgggaaggcatttaatagaagccccaagctgactgctcacaaggtcattcactctggcgagaaaccgtataaatgcgaggaatgtggcaaagccttcaaccagttcagcaatctcaccaagcacaagataacacatattggagacacgagctacaaataccttgaatgtgataaggcattctcccaatcgagcacacttacaaagcacaaagtcatccacacaggggaaaaaccttacaattgcgaggaatacggcaaggctttcaaccagtccagcaacctgatcgaacagtcaaactcttattggcgcgaaactttgcagatgtag

SEQ ID NO: 218206 - DNA, 1713 bp, Artificial Sequence
  derived and/or modified sequence
atggaaaacttgaagtccggtgtgtatccgctaaaggaagcctccgggtgtcctggagccgatcggaatttgctggtctacagtttttacgaaaaaggcccactgacctttagagacgtggctatagagttcagcctggaagagtggcaatgtctagacaccgcccagcaggacctctatcgcaaagtgatgcttgaaaactacaggaatttggtgttcctggctggcattgccgtgagcaagccggatctgatcacatgcctcgaacaggggaaagaaccatggaatatgaagcggcatgcaatggtggatcagccccctgtcacctactctcattttgcccaagatttatggccagagcaaggaatcaaagactcttttcaggaagtgattctgcggagatacgggaagtgtggccatgaggatcttcaactgcgcacgggctgtaaatccgtcgacgagtgcaacctccataaagagtgttatgacgagctgaaccaatgcctaaccactacacaatcggaaatcttccaatacgataaatacgtgaacgttttttacaagttctccaaccctaacatccagaaaataaggcatacagggaagaagccttttaagtgcaaaaagtgtgacaagagcttttgtatgctgttgcatctcacacagcataagcgcatccacatccgagagaacagctatcaatgtgaggaatgcggtaaggttttcaattggttctctaccctgactcgtcatagaagaattcacactggcgagaagccttacaagtgcgaacagtgcggaaaagcattcaagcagtctagtacactgaccacacacaagattatacacacaggtgagaagccatatcggtgtgaagaatgcggaaagaccttcaatcgaagctctcatcttactacacataagcggattcacactggggaaaagccctatcgctgcgaagagtgcggaagggcctttaaccgcagctcacacctcaccacacataagatcatacatacaggggagaagccctataagtgcgaagaatgtgggaaagctttcaatcaaagcagcacactaaccacccataaaatcattcatgccggagaaaagccttacaagtgcgaggaatgcggaaaggctttctaccggttctcatatctgaccaagcataaaataatacacaccggggaaaaattctacaagtgcgaggagtgcgggaaggggttcaactggagcagcactctaacgaaacataaaagaatccacactggagagaagccctataagtgtgagcagtgtgggaaggctttcaacgagagtagtaacctaaccgcacacaagattattcataccggggaaaaaccttacaagtgcgaagaatgtgggaaagcgttcaatagatctccgaaactgacagcacataaggtcatccatagtggagagaaaccatacaaatgtgaggaatgcgggaaggcttttaatcaattctccaatctcactaaacacaagatcactcacattggcgatactagttataaatatctagaatgcgacaaggcattttctcagagctccaccttaactaagcacaaggtcatacatacaggggaaaagccctacaattgtgaagaatatggcaaggctttcaatcagagttcaaacctcatcgagcagagcaattcttactggagggaaaccctgcagatgtag

SEQ ID NO: 218207 - DNA, 3919 bp, Artificial Sequence
  derived and/or modified sequence
agcggacagggcggcttccgggtttggcggggcctttgtccctcgctgtggcctgagctccaggtctcgtcttcagcgctctgtgtcctctgctcctagaggtccaggctctgtggccctgtgacccgcaggtattgggagatctacagctaagacgccaggaacccctggaagcctagaaatggagaacctgaagtctggagtgtatcctctcaaggaagcaagtggatgccctggggctgacaggaatcttctggtgtactctttttatgaaaaggggccattgacatttagggatgtggccatagaattttctctggaggagtggcaatgcctggacactgctcagcaggatttgtatagaaaagtgatgttagagaactacagaaacctggtcttcttggcaggtattgctgtttctaagccagacctgatcacctgtctagagcaaggaaaagagccctggaatatgaagagacatgcgatggtagatcaacccccagttacatattctcattttgcccaagacctttggccagagcagggcataaaagattctttccaagaagtcatattgagaagatatggaaaatgtggacatgaagatttacagttaagaacaggctgtaaaagtgtggatgagtgtaatctgcacaaagaatgttatgatgaactaaaccagtgtttgacaactacccagagtgaaatatttcaatatgataaatatgtgaatgtcttttataaattttcaaatccaaatatacaaaagataagacatactggaaagaagcctttcaaatgtaaaaaatgtgacaaatcgttttgcatgcttttacacctaactcaacataaaagaattcatattagggaaaattcttaccaatgtgaagaatgtggtaaagtctttaactggttctcaacccttactagacacagaagaattcatactggagagaaaccctacaaatgtgaacaatgtggcaaagcttttaagcagtcctcaacccttactacacataagataattcatactggagagaaaccctacagatgtgaagaatgtggcaaaacctttaaccggtcctcacaccttactacacataaaagaattcatactggagagaaaccctacagatgtgaagaatgtggcagagcttttaaccggtcctcacaccttactacacataagattattcatactggagagaaaccctacaaatgtgaagaatgtggcaaagcttttaaccaatcctcaacccttactacacataagataattcatgctggagagaaaccttacaaatgtgaagaatgtggcaaagctttttaccgattctcataccttactaaacataagataattcatactggagagaaattctacaaatgtgaagaatgtggcaaaggctttaattggtcctcgacccttactaaacataaaagaattcatactggagagaaaccctacaaatgtgaacaatgtggcaaagcttttaatgagtcctcaaaccttactgcacataagataattcatactggagagaaaccctacaaatgtgaagaatgtggcaaagcctttaaccggtccccaaaacttactgcacataaggtaattcattctggagagaaaccctacaaatgtgaagaatgtggcaaagcttttaaccaattctcaaaccttactaaacataagataactcatattggagatacatcttacaaatacctagaatgtgataaagcctttagccagtcttcaactcttactaaacataaggtaattcatactggagagaaaccctacaactgtgaagaatacggcaaagctttcaaccagtcctcaaaccttattgaacaaagtaattcatactggagagaaaccctacaaatgtgaagattgtggcaaagcctctaacccgtcctgaattcttactaaacataagaacattcatactgaagaggaaccctatgagtgtgaagaatatggcaaagccttcaacaagtcctcaattcttaccagacataagataattctggctgggtgcggtggctcacacctgtaatcccagcactttgggaggctgagacgggtgaattacatgaggttgggagttcgagaccagcctgaccaacatggtgaaatcctgtctctactaaaaatacaaaattagccatgcgtagtggtgcatgcctgtaatcccagctactcgggaggctgaggcaggagaattgcttgaacccgggaggcagaggttgaagtgagctgagatcgcgccattgcactccagcctgggcaacaagagtggcactccatctcagaaaaaaaaaaaaaagataattcatactgaaaagaaactctacaaacttgaaagatgtgacagtgcttttgacaacacctaaaacttttaaacataaaaaatcatactggtgagaaatcctagaaatgtaaagaatgtgacaaggcctttaaatggttgtcacacttcattataggtaagatagttcatactgaagaaaacttctacaagtgtgaacagtgtggcaaaacttttaatgaatgctcacaccttattgcacaggagagcatttatacttgaaaaaaattgtacaaatataaagaccatgaaaaagccattaatatctattcacatcttaccactggagagttcatacttaataaaaggaatataagtgcaattactgtcaaaagatctttcagaaaatataaacctttaaagcgaagaaggtatttattttgaagatgaacactacaaatgtgaagagggttgtagtacctttatttgtatcacagattttattgtacacattttgtactagaagaaaactctgaagtagttgctcaaactttgttcaacatcagggaatttatattgaagaaaaactttgcaaatttaataaattttaaaaaacactttttcaaaaagtacagcttagaagacaccagagttcatactaaaatatatttttgcagatgcagtaaaaatgaaaatatttaatccaaaattaagtctatgtaaatatcagagaatttactgtagaaatatataaggcactgagacttcagatattatactaaatcagagtgctgagtatagaaaataaaactgaagttggggccaggtgcagtggctcacacctgtaatccagcactttgggaggccgagaagggtggatcacctgaggtcaggagtttgagaccagcctgactaacatggagaaaacacggctctactaaaaatacaaaattagccagctgtggtggtgtatgcctgtaatcacagctactcgagaggctgaggcaggagaattgcttgaacccgggaggtggagagtgcagtgaactgaaattgcgccattgcactccagcctgggcaacaagagtgaaactccatttcaaaaaaaaaaaaaaaaaaacaactaaagttggtagaaaaattatttgtatataactttaaaaggagtagaagggctttttgcagagttattacgtttgaagtatactttatttcttgaaaaaattacagattttttgtaaataatgatgtaattcaactctcaaaatatttcctactgtttctttattccagttgtattcacatgtgaaagcatgtgatcagttattgctgcattaaaaacatgagtcttttttattaggtggccattatttatgatcttttctatgaaagagtaaggacattaaaatgtaagatgcatgatgaaaaattaagtgaagaggctctttatggttaatttatattgaataatgcattaggtaggtgttcagagtaatattttgcgttgtgagaacatttttaattttatttaaaattaaatgaaaataaattagtatattattgtactaattgtacttttgtataataaaatccagtgtatttta

SEQ ID NO: 218208 - DNA, 4517 bp, Artificial Sequence
  derived and/or modified sequence
gggcgcgcgagagctgctagggcggtttctctgcctcgggcctgttgggcagggccggctaaggtgcgcgtgctcgctggttctaacccttctgttgggcgtttctgctgagaggcgggaggcgctgagagtctgtgcggaggtccgtggacagactgctttgctcgttgttgctcttcggaggcggcgatccccgaaggcgagctgaaatacggctgcaggctacaatttgcagccgacgattatggaagacggcaagcgggagaggtggcccaccctcatggagcgcttgtgctcggatggcttcgcatttccccaataccccattaaaccgtatcatctgaagaggatccacagagctgtcttacatggtaatctagagaaactgaagtaccttctgctcacgtattatgacgccaataagagagacaggaaggaaaggaccgccctacatttggcctgtgccactggccaaccggaaatggtacatctcctggtgtccagaagatgtgagcttaacctctgcgaccgtgaagacaggacacctctgatcaaggctgtacaactgaggcaggaggcttgtgcaactcttctgctgcaaaatggcgccaatccaaatattacggatttctttggaaggactgctctgcactacgctgtgtataatgaagatacatccatgatagaaaaacttctttcacatggtacaaatattgaagaatgcagcaagtgtgaatatcagccactgttatttgctgtgagtcgaagaaaagtgaaaatggtggaatttttattaaagaaaaaagcaaatgtaaatgccattgattatcttggcagatcagccctcatacatgctgttactcttggagaaaaagatatagtcattcttcttctgcagcacaatattgatgtgctttctcgagatgcgtttcgaaagattgcaggagattatgccattgaggctaagaatagagtcatttttgatctaatttatgaatacgaaagaaagagatatgaagatcttcctataaatagcaatccagtgtcttctcagaaaccaccaaccttgaagggtacaagtgacgaggaagattctgttttgggtatagccagagaaaacaaggatggagaaaaatctaggacagtgtcttctgagaaaccaccaggcttgaaggcttcaagtgccgagaaagattctgttttgaatatagccagaggaaaaaaggatggagaaaaaactaagagagtgtcttctcggaaaaaaccatccttggaggccacaagtgatgagaaggattctttttcgaatataaccagagaaaaaaaggatggagaaatatctaggaaagtgtcttctcagaaaccaccagccttgaagggtacaagtgacgaggaagattctgttttgggtatagccagagaaaacaaggatggagaaaaatctaggacagtgtcttctgagaaaccaccaggcttgaaggctacaagtgatgagaaagattctgttttgaatatagccagaggaaaaaaggatggagaaaaaactaggacagtgtcttctcagaaaccaccaaccttgaaggctacaagtgatgaggaagattctgttttgagtatagccagagaaaacaaggatggagaaaaatctaggacagtgtcttctgagaaaccatcaggcttgaaggctacaagtgccgagaaagattctgttttgaatatagccagaggaaaaaagtatggagaaaaaactaagagagtgtcttctcggaaaaaaccagccttgaaggctacaagtgacgagaaagattctgttttgtatatagccagagaaaaaaaggatggagaaaaatctaggacagtgtcttctccgaaacaaccagcattgaaggctatctgtgacaaggaagattctgttccgaatatggccacggaaaaaaaggatgaacaaatatctgggacagtgtcttgtcagaaacaaccagccttgaaggctacaagtgacaagaaagattctgtttcgaatatacccacagaaataaaggatggacaacaatctggaacagtgtcttctcagaaacaaccggcctggaaggctacaagtgtcaagaaagattctgtttcgaatatagccacagaaataaaggatggacaaatacgtgggacaggtattttggaatacacctttaatgtaatgttcgatcaaatagaagagaaattcacttccctaaataaatcagcgggggtgtctcctcagaaacaatcggcccagaaggttatatttaaaaagaaagtttctcttttgaatattgccacaagaataacaggcggttggaaatctggaacagagtatcctgagaatctgcccaccttgaaggctacaattgaaaataaaaattctgttctgaatacagccaccaaaatgaaggatgtacaaacatccacaccagcagaacaagacttagaaatggcatcagagggagagcaaaagaggcttgaagaatatgaaaataaccagccacaggtgaaaaaccaaatacattctagggatgaccttgatgacataattcagtcatctcaaacagtctcagaggacggtgactcgctttgctgtaattgtaagaatgtcatattactcattgatcaacatgaaatgaagtgtaaagattgtgttcacctattgaaaattaaaaatacattttgtttatggaaaagattaataaaacttaaagataaccactgtgagcaacttagagtaaaaattcgaaaactgaaaaataaggctagtgtactacaaaagagaatatctgaaaaagaagaaataaaatcgcagttaaagcatgaaatacttgaattggaaaaagaactctgtagtttgagatttgccatacagcaagaaaaaaagaaaagaagaaatgttgaagaggtgcaccaaaaagttagggaaaagttaagaataacagaagagcaatataggatagaagctgatgtgacaaaaccaattaaaccggctctcaaatcagcagaggtggaattgaagacaggaggaaataattcaaatcaggtttctgaaactgatgaaaaagaagacctgctgcatgaaaaccgcttgatgcaagatgaaattgccaggctcaggctggaaaaagacacaataaaaaaccaaaacctggaaaagaaatacttaaaagactttgaaattgtgaaaagaaagcatgaagaccttcaaaaggctctaaaacggaatggggaaacattagcaaaaacgatagcctgttatagtggacagcttgctgctctgacagatgaaaacacaacgctccgttccaaactggagaagcaaagagagagcaggcaaagactggaaacagaaatgcaatcataccattgtagactgaatgctgctcgatgtgatcatgatcaaagtcactcatcaaaaagagaccaagagcttgctttccagggcacagtagataaatgtcgtcacttacaggaaaatttgaattctcatgttctgattctttctctgcaactttctaaagctgagagtaagtccagagtcctcaaaactgagctccattacacaggagaggctctgaaagaaaaggctttggtttttgaacacgtgcaaagtgagctaaagcaaaaacagagtcaaatgaaggacattgaaaaaatgtacaaaagtggatacaatacaatggaaaaatgcatagaaaaacaggaaagattttgtcaactaaaaaaacaaaatatgttgcttcaacagcaactggatgatgctcgcaacaaagctgacaatcaagaaaaagcaatacttaatattcaagccagatgtgatgctagagtacaaaaccttcaagctgagtgcagaaagcaccgtcttttactagaagaagacaataaaatgttggtcaatgaactgaatcattcgaaagaaaaagaatgccaatatgaaaaagagaaagcagaaagagaagtagctgtgagacagcttcaacaaaaacgagatgatgtcttaaacaaaggatcagcaacaaaagctctgctggatgcttcatcgcgtcactgcacctatttagaaaatgggatgcaggattcaaggaagaaattagaccagatgagaagtcaatttcaagaaatacaggatcaacttacagctactataagatgtactaaggagatggaaggcgacacacaaaagcttgaagtagaacatgtgatgatgagaaaaattattaaaaaacaggatgaccaaattgagcggcttgagaaaatcctgcagcattcaagtttgatgctgcaggtgtttgagagctagatgaagatatggacatttctggaattaagagccccctctacattgagcacaagacagtgacgaatccacattcttcagccagaaagtcacctctgagagccaaatgtctgactatagaaaggagagtcaaagaatgataacgacatctcaggaaaattgtgaaaataatcagcagccggatgtggataaccctttcaaa

SEQ ID NO: 218209 - protein, 369 aa, Artificial Sequence
  derived and/or modified sequence
MADSAQAQKLVYLVTGGCGFLGEHVVRMLLQREPRLGELRVFDQHLGPWLEELKTGPVRVTAIQGDVTQAHEVAAAVAGAHVVIHTAGLVDVFGRASPKTIHEVNVQGTRNVIEACVQTGTRFLVYTSSMEVVGPNTKGHPFYRGNEDTPYEAVHRHPYPCSKALAEWLVLEANGRKVRGGLPLVTCALRPTGIYGEGHQIMRDFYRQGLRLGGWLFRAIPASVEHGRVYVGNVAWMHVLAARELEQRATLMGGQVYFCYDGSPYRSYEDFNMEFLGPCGLRLVGARPLLPYWLLVFLAALNALLQWLLRPLVLYAPLLNPYTLAVANTTFTVSTDKAQRHFGYEPLFSWEDSRTRTILWVQAATGSAQ

SEQ ID NO: 218210 - DNA, 1110 bp, Artificial Sequence
  derived and/or modified sequence
atggcagattcggcacaggctcagaagctggtatacctcgtgaccggggggtgcggcttcctcggagaacacgtggtgaggatgctattgcagagagaaccacgacttggtgaactccgggtattcgaccagcacctcgggccctggttggaggaactgaagacagggcccgtgcgcgtgaccgccatacagggtgacgtgacacaggcccacgaggtagccgccgctgttgctggggctcatgtagtcatccacacagccggcctggtggacgtcttcgggcgagcaagccccaagacaattcatgaagtgaatgtccaaggcaccagaaatgttatcgaagcatgcgttcaaacgggcacgcgatttttagtatatacatcttccatggaagtagtgggaccaaatacaaagggacaccccttctacagagggaacgaagacacaccttatgaggcggtgcataggcacccttacccctgcagcaaagctctggctgaatggctggtgctggaagctaatggccgcaaagtgaggggaggcttgcctctggtcacctgtgcactgcgccctactggcatctatggcgagggccatcaaataatgcgggacttctaccgacaagggctacgtctgggtgggtggctctttcgcgctatccccgcttctgtcgagcacggaagggtgtatgtgggcaatgtcgcctggatgcacgtgttggccgcacgcgagctggaacagcgagctactctgatgggcggtcaggtgtacttttgttatgacggtagcccctaccggtcctacgaggacttcaacatggaatttctggggccatgtgggctgcggctcgtcggagctaggccattactgccttactggcttttagtgtttctggccgccctcaatgccctgttgcaatggttactgcggccactagttttgtacgcccctctgctcaacccttatacattagccgtggctaacactaccttcacggtgagcacggataaagctcagagacacttcgggtacgaacccctgttctcgtgggaggatagtcggactcgcaccatcctctgggtacaggccgccaccggatccgcccagtag

SEQ ID NO: 218211 - DNA, 2172 bp, Artificial Sequence
  derived and/or modified sequence
gaaggacggtgtgcgggccggccagccctggacgaaagaagagggcccctccaggccagtctgggcaccctgggatagcggctgcagccaggcatggccgactctgcacaggcccagaagctggtgtacctggtcacagggggctgtggcttcctgggagagcacgtggtgcgaatgctgctgcagcgggagccccggctcggggagctgcgggtctttgaccaacacctgggtccctggctggaggagctgaagacagggcctgtgagggtgactgccatccagggggacgtgacccaggcccatgaggtggcagcagctgtggccggagcccatgtggtcatccacacggctgggctggtagacgtgtttggcagggccagtcccaagaccatccatgaggtcaacgtgcagggtacccggaacgtgatcgaggcttgtgtgcagaccggaacacggttcctggtctacaccagcagcatggaagttgtggggcctaacaccaaaggtcaccccttctacaggggcaacgaagacaccccatacgaagcagtgcacaggcacccctatccttgcagcaaggccctggccgagtggctggtcctggaggccaacgggaggaaggtccgtggggggctgcccctggtgacgtgtgcccttcgtcccacgggcatctacggtgaaggccaccagatcatgagggacttctaccgccagggcctgcgcctgggaggttggctcttccgggccatcccggcctctgtggagcatggccgggtctatgtgggcaatgttgcctggatgcacgtgctggcagcccgggagctggagcagcgggcaaccctgatgggcggccaggtatacttctgctacgatggatcaccctacaggagctacgaggatttcaacatggagttcctgggcccctgcggactgcggctggtgggcgcccgcccattgctgccctactggctgctggtgttcctggctgccctcaatgccctgctgcagtggctgctgcggccactggtgctctacgcacccctgctgaacccctacacgctggccgtggccaacaccaccttcaccgtcagcaccgacaaggctcagcgccatttcggctatgagcccctgttctcgtgggaggatagccggacccgtaccattctctgggtacaggccgctacgggttcagcccagtgacggtggggctggggcctggaggcccagatacagcacatccacccaggtcccgagccctcacaccctggacgggaagggacagctgcattccagagcaggaggcagggctctggggccagaatggctgtccttgtcgtagagccctccacattttctttttcttttttgagacagggtcttgctctgtcacccagactggagtgcagtggtgtgatcatagctcactgcaccctcaacctcctgggttcaagcaatcctcctgcctcagcctcctgaacagctgggaccacaggtgcacgccaccacacctggcttttttttgttgtttttagagacagggtctcactatattgctcaggctggtcttgaactcctgggctcaagtgatcttcccacgtgggcctcccaaaacgctggaactacaagtgtgagccaccgcgcctggcccaagccctccacattttcaatccaggagccttgagtctgtgttgtgtcctgacacctccaagttctagggccgtcaggacacgggagggtttggggacagagtgtccttcctctgtcctctcatcccagtcctgatggccgcttggtgagtgtctggtgccctggtggcctgccccagctctcttctggctttctgagcaggaagcgagcagaggctccacaggcttacgctgctctcctgacagccacacgcgaccctcggtgcagagtgcagaggcggctctggttcctccagccacctcagtccctctttgggaggtgatgttcccattgtttttcaaaggcctcaccttcaactgtctgtcttagaattcccctctggagggctatggcctccctatgctttcacttcccacctctctacctaagttccttcccagcacatcgccagccctgggcctggggatgtccccaatgctgtacctggctgaccccggattaaaagcctcatccacgaccgtg

SEQ ID NO: 218212 - DNA, 1110 bp, Artificial Sequence
  derived and/or modified sequence
atggctgacagcgcccaggcccagaagctggtgtacctggtgactggaggctgcggcttcctgggggagcacgtggtgaggatgctgctgcagcgggagccccggctgggggagctgcgggtgtttgaccagcacctgggcccctggctggaggagctgaagacaggccctgtgcgggtgacagccatccagggagatgtgacccaggcccacgaggtggccgctgctgtggccggggcccacgtggtgatccacacagctggcctggtggatgtgtttggccgggccagccccaagaccatccacgaggtgaatgtgcagggcaccagaaatgtgattgaggcctgtgtgcagacaggcacccgcttcctggtgtacaccagctccatggaggtggtgggccccaacaccaagggccaccccttctacagaggaaatgaagacaccccctatgaagctgtgcaccgccacccctacccctgcagcaaggccctggccgagtggctggtgctggaggccaacggcaggaaggtgcggggcggcctgcccctggtgacctgtgccctgcggcccaccggcatctatggagagggccaccagatcatgagggacttctaccggcagggcctgcggctgggcggctggctgttccgggccatcccagcctctgtggagcacggccgggtgtatgtgggcaatgtggcctggatgcacgtgctggccgcccgggagctggagcagagggccaccctgatgggcggccaggtgtacttctgctatgatggcagcccctaccgctcctatgaggacttcaacatggagttcctgggcccctgtggcctgcggctggtgggcgcccggcccctgctgccctactggctgctggtgttcctggccgccctgaatgccctgctgcagtggctgctgcggcccctggtgctgtatgcccccctgctgaacccctacaccctggccgtggccaacaccaccttcaccgtgtccacagacaaggcccagaggcacttcggctatgagcccctcttctcctgggaggacagcaggaccaggaccatcctgtgggtgcaggccgccactggaagtgcccagtag

SEQ ID NO: 218213 - DNA, 1110 bp, Artificial Sequence
  derived and/or modified sequence
atggccgacagcgcccaggcccagaagctggtgtacctggtgaccggcgggtgtggtttccttggggagcacgtggtacggatgctcctgcagagagagccgcggctgggcgagctcagggtttttgaccagcatctgggcccatggctcgaggaactgaaaacaggtcctgtgcgtgttacggctatccaaggagacgtgacgcaagctcatgaagtcgccgctgcggtagccggggctcatgtggttatacatacggctggcttggtggatgtatttggccgagcctccccgaagacaatccacgaagtcaatgtacaggggacaaggaacgttatcgaggcttgcgtccagactgggacccggtttctggtgtataccagttcaatggaggttgtgggaccaaataccaaaggccacccgttctatagaggtaatgaggacacaccctatgaggcagtgcaccgccacccttatccctgcagcaaagccctggcagagtggctggtgttggaggccaatggcaggaaggtccgaggaggcctacctctggtcacctgtgccttacgacctacagggatatacggtgaggggcatcagattatgcgcgatttctatcgtcaagggctccgcctaggcggctggctattccgcgccataccagctagcgtcgaacacgggcgcgtttacgtcgggaatgtggcttggatgcacgtgctcgccgcccgggagctggagcagcgcgcaaccctgatgggagggcaggtgtatttctgttacgatggctctccataccggagctacgaggactttaatatggagtttttaggaccttgtggattaagactggtgggggcgcgcccattgctaccttactggctgcttgtgttcctggctgcgctgaacgcactgctccagtggctcctccgacccctggtgctctacgccccgctgctgaacccctacactttagcagttgcaaacacaacctttaccgtctccaccgacaaggctcagaggcattttggctatgagcctctgtttagctgggaggactcacggacaagaacgattctgtgggtgcaggcggccaccggatcagcacagtag

SEQ ID NO: 218214 - DNA, 1110 bp, Artificial Sequence
  derived and/or modified sequence
atggccgatagtgctcaagctcagaagctggtgtacttggttactggaggatgcggatttctgggagaacacgtagttagaatgctactccagcgcgagccccgacttggagagttgagagtattcgaccaacatctcgggccttggctggaagaactgaagactgggccagttcgggtaactgctattcagggggacgtgacccaggcccatgaagttgccgctgccgtggctggcgcacacgtggtcattcataccgccggactcgtggatgtatttggaagagcaagtccaaaaactatccatgaggttaacgtgcagggcacacgaaatgtcatcgaggcctgcgtgcagacgggcactcgatttctcgtgtacacaagctcgatggaggtcgtgggacctaacaccaaggggcatcccttttacagggggaacgaagacactccctacgaagccgtacacaggcacccatacccgtgttctaaagcacttgccgaatggctggttcttgaggctaacggcaggaaagtccgcggtggattgcccctcgtgacttgtgccctgcggcctactggcatctacggggaagggcaccagatcatgcgcgacttctaccgccaagggctccgacttgggggatggctgttccgagcaattcccgcttcggtggagcacggacgtgtttatgtggggaatgttgcctggatgcacgtgctggccgctcgcgaactggaacagagagctacgcttatggggggacaggtttatttttgctatgatggctccccctacagatcatatgaagatttcaacatggagtttttagggccttgtggcctccgcctggtgggcgcacgcccactcctgccatattggctgctggtttttttagcggctcttaacgctctgctgcagtggcttctccgacctctggtgctgtacgcgccacttctaaacccctatactctggctgtggcgaatactaccttcaccgtcagcaccgataaagcccagaggcattttggctatgaacctctattttcctgggaggatagccggacgaggacaatcctgtgggttcaggccgctacaggaagcgctcaatag

SEQ ID NO: 218215 - DNA, 1110 bp, Artificial Sequence
  derived and/or modified sequence
atggccgacagcgcccaggcccagaagctggtgtacctggtgaccggcggctgcggcttcctgggcgagcacgtggtgagaatgctgctgcagagagagcccagactgggcgagctgagagtgttcgaccagcacctgggcccctggctggaggagctgaagaccggccccgtgagagtgaccgccatccagggcgacgtgacccaggcccacgaggtggccgccgccgtggccggcgcccacgtggtgatccacaccgccggcctggtggacgtgttcggcagagccagccccaagaccatccacgaggtgaacgtgcagggcaccagaaacgtgatcgaggcctgcgtgcagaccggcaccagattcctggtgtacaccagcagcatggaggtggtgggccccaacaccaagggccaccccttctacagaggcaacgaggacaccccctacgaggccgtgcacagacacccctacccctgcagcaaggccctggccgagtggctggtgctggaggccaacggcagaaaggtgagaggcggcctgcccctggtgacctgcgccctgagacccaccggcatctacggcgagggccaccagatcatgagagacttctacagacagggcctgagactgggcggctggctgttcagagccatccccgccagcgtggagcacggcagagtgtacgtgggcaacgtggcctggatgcacgtgctggccgccagagagctggagcagagagccaccctgatgggcggccaggtgtacttctgctacgacggcagcccctacagaagctacgaggacttcaacatggagttcctgggcccctgcggcctgagactggtgggcgccagacccctgctgccctactggctgctggtgttcctggccgccctgaacgccctgctgcagtggctgctgagacccctggtgctgtacgcccccctgctgaacccctacaccctggccgtggccaacaccaccttcaccgtgagcaccgacaaggcccagagacacttcggctacgagcccctgttcagctgggaggacagcagaaccagaaccatcctgtgggtgcaggccgccaccggcagcgcccagtag

SEQ ID NO: 218216 - protein, 372 aa, Artificial Sequence
  derived and/or modified sequence
MRVGPVRSAMSGASQPRGPALLFPATRGVPAKRLLDADDAAAVAAKCPRLSECSSPPDYLSPPGSPCSPQPPPAAPGAGGGSGSAPGPSRIADYLLLPLAEREHVSRALCIHTGRELRCKVFPIKHYQDKIRPYIQLPSHSNITGIVEVILGETKAYVFFEKDFGDMHSYVRSRKRLREEEAARLFKQIVSAVAHCHQSAIVLGDLKLRKFVFSTEERTQLRLESLEDTHIMKGEDDALSDKHGCPAYVSPEILNTTGTYSGKAADVWSLGVMLYTLLVGRYPFHDSDPSALFSKIRRGQFCIPEHISPKARCLIRSLLRREPSERLTAPEILLHPWFESVLEPGYIDSEIGTSDQIVPEYQEDSDISSFFC

SEQ ID NO: 218217 - DNA, 1119 bp, Artificial Sequence
  derived and/or modified sequence
atgcgggtgggccccgtgcgctctgctatgtccggcgcctcgcagcccagggggccggctcttttattccctgcaacaaggggcgttccagccaagagattgctcgatgctgacgatgctgctgctgtggcggctaaatgcccgagactgagcgagtgcagcagtcctcctgattatctgtcacctcccggatccccttgcagcccacaaccaccaccagctgcccctggcgccggggggggatccggttctgcaccgggacctagcagaattgctgactacctgctgctccctctggctgagagagaacatgtcagcagagccttatgtatacacacaggtagggagttgcgatgtaaggtttttcccatcaagcactatcaggataagatccgaccttacattcaactcccctctcacagcaatatcacaggcattgtggaggttatcctgggggaaaccaaggcttacgtttttttcgaaaaggacttcggcgacatgcatagttatgtccggtctcgtaaaagactgagggaggaagaagcggctaggctcttcaaacagatcgtcagcgccgttgcacactgccaccagagtgccattgtgctgggtgacctaaaactgcgaaaattcgtatttagcacggaggagcggactcaattgcggctcgagtctctggaagatacccatataatgaaaggtgaagatgatgccttgtcggacaagcacgggtgtcctgcgtacgtcagtcccgagatactcaatactacaggtacatatagtggcaaagcagccgacgtgtggagtcttggtgtgatgctctataccttgctcgtaggtagatatccgtttcacgactcagatcctagcgcgttgttttcaaaaattagacgaggtcagttttgcattccagagcacatatcaccaaaagctagatgtctcatccgctccctcctgcgtagagaacctagcgagcggttaacagcccctgagattctcctgcacccctggtttgaatctgtacttgagcccggctacatcgattctgaaattggcacaagtgaccagatagtcccagagtatcaggaagacagtgacatcagctcgtttttctgttag

SEQ ID NO: 218218 - DNA, 1119 bp, Artificial Sequence
  derived and/or modified sequence
atgagggtgggccctgtgcgcagcgccatgtctggggccagccagccccggggccctgccctgctcttccctgccacccggggcgtgcctgccaagaggctgctggatgctgatgatgctgctgctgtggccgccaagtgcccccggctgtctgagtgcagcagccccccagactacctgagccccccaggcagcccctgcagcccccagcccccacctgctgcccctggggccggcggcggcagcggcagcgcccctggccccagcagaattgctgactacctgctgctgcccctggccgagcgggagcacgtgtcccgggccctgtgcatccacacaggccgggagctgcgctgcaaggtgttccccatcaagcactaccaggacaagatccggccctacatccagctgcccagccacagcaacatcaccggcatcgtggaggtgatcctgggggagaccaaggcctacgtgttctttgagaaggactttggagacatgcacagctatgtgcgcagcaggaagaggctgcgggaggaggaggccgcccggctcttcaagcagatcgtgtctgctgtggcccactgccaccagagcgccatcgtgctgggggacctgaagctgaggaagtttgtgttcagcacagaggagaggacccagctgcggctggagagcctggaggacacccacatcatgaagggagaagatgatgccctgagtgacaagcacggctgcccagcctacgtgtccccagagatcctgaacaccaccggcacctacagcggcaaggctgctgatgtgtggagcctgggcgtgatgctgtacaccctgctggtgggccgctaccccttccatgacagcgaccccagcgccctcttcagcaagatcagaagaggccagttctgcatccctgagcacatcagccccaaggcccgctgcctgatccgcagcctgctgcggcgggagcccagcgagcggctgacagcccctgagatcctgctgcacccctggtttgagagcgtgctggagcccggctacattgattctgaaattggcaccagtgaccagatcgtgcctgagtaccaggaggacagcgacatcagcagcttcttctgctag

SEQ ID NO: 218219 - DNA, 1119 bp, Artificial Sequence
  derived and/or modified sequence
atgcgggtgggccccgtgcggagcgccatgagcggcgccagccagccccgaggccctgctctgctgtttccggcaaccaggggtgtgcctgctaaaagactcctggatgccgacgacgcagctgccgtcgctgccaagtgccccagactgagcgagtgtagtagccccccggattacctctctccgccgggcagtccgtgctccccacagcccccaccagccgccccgggcgccggagggggttccggtagcgcacccgggccttctcggattgcggactatcttcttctgcctcttgctgaaagagagcacgtttccagggccctatgtatccacaccggacgtgaactcaggtgcaaggttttccccatcaaacattatcaggacaagattcggccttacatccagctgcccagccactccaacatcaccggtatagtggaggtgatcctgggtgagaccaaggcttatgtgttctttgagaaagatttcggcgacatgcactcttacgtcaggtcaagaaagcgacttcgggaagaagaggcggcccgacttttcaaacagatcgtgtccgctgtggcccactgccaccagagcgcgatcgttttgggagacctgaaactgcgcaagttcgtgttttcaaccgaggagagaacacaactccggttagagtccctagaggacacccacatcatgaagggtgaagacgatgctctgtctgacaagcacgggtgtccagcttatgtgtcaccagagatccttaatacaaccgggacgtattctggtaaagctgcggatgtgtggtctcttggcgttatgctgtacaccctgctggtgggccgatacccctttcacgactccgaccccagcgcactgttcagtaaaattcgacgtggccagttttgtatcccggaacatatttcacccaaggcgcgctgtctgatccgttccctgctgcgtagggagccgagtgagagactcacagctcccgaaatcctactccacccttggtttgagtccgtgttggaaccaggctatatagactctgagattgggactagtgaccaaatcgtccctgaataccaggaggattctgatatttcaagtttcttctgttag

SEQ ID NO: 218220 - DNA, 1119 bp, Artificial Sequence
  derived and/or modified sequence
atgagagttggcccagtccggtccgcgatgtcaggggcaagccagccgagaggtcccgctctcctttttcccgcaacccgcggagtgccagccaagcgcctgctggatgccgacgatgcggctgccgtggcagccaaatgtccaaggctgagcgagtgttccagtcccccagattacctgtcaccgcctggttctccctgcagccctcaaccccctccagctgctccaggagccggaggtggcagtggcagcgcaccgggtccaagcagaatcgccgactatcttcttttgcctctcgccgaacgggaacacgttagcagagctctatgcatccatactggcagggaacttcgctgcaaagtattccccataaagcactaccaagataaaattcggccatacatccagctcccaagccactcaaatatcacaggcattgtggaggtgatcctgggcgaaaccaaggcgtacgtgtttttcgagaaggatttcggagacatgcattcctatgtgagaagcaggaaaaggttgagggaagaagaggctgccagactatttaaacaaatagtgtccgcagtagcgcactgccaccaaagcgcgattgtgctcggtgacctcaaacttagaaagtttgtatttagtaccgaggaaagaacacagcttaggctggaaagtctcgaagacacgcatatcatgaaaggtgaggatgatgctctgtctgataagcacgggtgcccggcttatgtttcacccgaaatcttgaatacaaccggcacttatagcgggaaagccgctgacgtatggagcctgggcgtcatgctctacacgttgttagtgggaaggtacccttttcatgacagtgatccctccgcccttttctcgaaaattcgtcgcggacagttttgcataccagagcatatctctccaaaagcacgatgtctcattaggagcctgttaaggagggaaccaagtgaacggctgaccgctccggagattttgcttcatccttggtttgaaagtgtattggaacctggttacattgactcagaaattggaaccagtgaccaaatcgttccggaatatcaggaagattccgacatcagttcctttttctgttag

SEQ ID NO: 218221 - DNA, 3635 bp, Artificial Sequence
  derived and/or modified sequence
aaggaggagtgcactggccgggatcggtgcagcgctcacactcactcacagtcactctctctgagcgcgtctcgctcgctctcatacacgcccggagcccaggagcgctcaggatcccgagcgccgcgaaaaagttcccccggcttttgctggagactcatcgctttgggaagtgcatttgcttcgtggctccgccgagcctgctgaatcctgtcctcgcggctcgggaccccgggatcgctgaccgctgccgccgccgcctctgcctcccggactatcggcagcctcggcaacaatagtggcggccgcccccagcgaggctccgggagcccttgcctgcgggggtccggggactcgagccggcctccgcctcccggacgcacagccagcgtggtccccgcgtgcaacgcgagcgccggggagtggctcctgctttgcccctcgtgggggccgagccaagaccagtctgcaaactccatcccgccggctggaagaagtcgcggagccggcaccaaacccgcagcgtcttcccgcgcggatcccgggacttaaaaagccggggccaccccggcccaggacgggatgcgggtcggtccggtgcgctctgccatgagcggcgcctcgcagccccgcggcccggccctgctcttcccagccacccgaggcgtcccggccaaacgcctgctggacgccgacgacgcggcggctgtggcggccaagtgcccgcgcctctccgagtgctccagccccccggactacctcagcccccccggctcgccctgcagcccgcagcccccgcctgccgctccgggggccggcggaggctccgggagcgcgccggggcccagccgcatcgccgactacctgctgctgcccctagccgagcgcgagcatgtgtcccgggcgctgtgcatccacactggacgcgagctgcgctgcaaggtgtttcccattaaacactaccaggacaaaatcaggccttacatccagctgccatcgcacagcaacattactggcattgtggaagtgatccttggggaaaccaaggcctatgtcttctttgagaaggactttggggacatgcactcctatgtgcgaagccggaagaggctgcgggaagaggaagccgcccggctcttcaagcagattgtctccgccgtcgcccactgccaccagtcagccatcgtgctgggggacctgaagcttaggaagttcgtcttctccacggaggagagaacccagcttagactagaaagtctagaagacacacacataatgaagggggaagatgatgctttgtcagacaaacatggctgcccagcctacgtgagccctgagatcctcaacaccactgggacctactccggaaaggctgcggacgtttggagcctgggggtgatgctctacacccttctggttggacgataccccttccatgactcagaccccagtgcccttttctccaaaattcggcgtggacagttctgcattcctgagcacatttcccccaaagccaggtgcctcattcgcagcctcttgagacgggagccctccgagagactcactgcccccgagatcctactgcacccctggtttgagtccgtcttggaacccgggtacatcgactcagaaataggaacttcagaccagattgttccagagtaccaggaggacagtgacattagttccttcttctgctaatccccaaaacctcagaaacctcataattcttaacacctggcatttccatttctaaagatggacaggccctttggcgtggtaccaaccagataatgactgcatcaggatgaaagctgctgaactcggcatggcgcctcctcttctctgttgggatgagtgactttattgatttgagcagcatatgctgtgattggctgccctgcaaatttgtttcccttaaggaaccctcaccaactatctctgctggatttgggagttccgcatcttttgtggagggcagagtatggacatcttacacccggtggtcaagtgtgtaataaacttgagcattcgaatgggagaaaaagcaaatcgcacaatgacatattttgagtaataaccgtatttttcacagggtgacaaattgggccaataaatctgccatctttgaactcatctttggtggctagactgctacggcagcttctctgatgggaaagttccttttttggcttaacactcaccctttcttcacactcacatttaccaatgactctgctccgtttttggagcagactgttttaagttgctcaggagcctgatggaaccatgaaccgagactcttctctgtttcctgccaagacctcatctgcactaatgccttctccctgaccttgacacttccccctttagctataaaagcacttaccagccgaacgtggaacagtatcacaaaagattccatctcccaacgatttcagaactctgagctcagagagactccagattttaaaaaataatttgagtgcttggaaactattagctttttaagttccttccaaatatgttagtacctaccctttactttttccccaagaccatctcagggtggagcattctgtctaagagaagaaagataaggaggctcccacccacctctcccaagagcagacattaaacatctttgtgctttgaagagagtgaattttggatagtcttgtgattctcagactaacttccagaattatactttaacccctcccagatatggtccgcctttggcattgtgtgtacatctgcagttttgcatggtgggttgttaatatttcaaatgtgtggtttatgaatacgtctgtataatcggcttctggagtgaaacagcaaaccccaaatcttcaaagttggaaggaactttaaaaatcatccggtccaatctctttcctctttctgccacctcccaaggcagaaatcccctcttcagcttcttttgtaggtgggaatccagcctctgttagatatgtccagagatggaaactcactcccctacaaaagatggagcttaatggagaaattgcaactttcattaaaaaacaaattcagatgaaatatcagtaactgtcttggacagtgctgaaatcaggtggttaaacgggtaaacaaaatatactgtattttgagaaatggcacaaaaacaggcagtcatctttaagggctatgcctaggcaaactactaacatgcattgtgagaatgccgtgtatacctcacgtactgtgtactttgtacatatattttaccttttatacctatgttcgattttgttttgttttgttttgttctggctttgaggcttgttttgttgtctgtgtctgtctgaataacctgcgtgtctaaaaccacgtgaaatgtgaatgattattggcaatattaccttgacagaatcatgggactttgagaagagggaggacagaggcctctgtcgcactaacgctctcgtggttgctcgactgttgtatctgtgatacattatccgactaaggactctgggctggcagggccttctgccgggaaagctagaaacactaggttcttcctgtacatacgtgtatatatgtgaacagtgagatggccgtttctgacttgtagagaaattttaataaacctggtttcgtaaata

SEQ ID NO: 218222 - DNA, 1119 bp, Artificial Sequence
  derived and/or modified sequence
atgagagtgggccccgtgagaagcgccatgagcggcgccagccagcccagaggccccgccctgctgttccccgccaccagaggcgtgcccgccaagagactgctggacgccgacgacgccgccgccgtggccgccaagtgccccagactgagcgagtgcagcagcccccccgactacctgagcccccccggcagcccctgcagcccccagcccccccccgccgcccccggcgccggcggcggcagcggcagcgcccccggccccagcagaatcgccgactacctgctgctgcccctggccgagagagagcacgtgagcagagccctgtgcatccacaccggcagagagctgagatgcaaggtgttccccatcaagcactaccaggacaagatcagaccctacatccagctgcccagccacagcaacatcaccggcatcgtggaggtgatcctgggcgagaccaaggcctacgtgttcttcgagaaggacttcggcgacatgcacagctacgtgagaagcagaaagagactgagagaggaggaggccgccagactgttcaagcagatcgtgagcgccgtggcccactgccaccagagcgccatcgtgctgggcgacctgaagctgagaaagttcgtgttcagcaccgaggagagaacccagctgagactggagagcctggaggacacccacatcatgaagggcgaggacgacgccctgagcgacaagcacggctgccccgcctacgtgagccccgagatcctgaacaccaccggcacctacagcggcaaggccgccgacgtgtggagcctgggcgtgatgctgtacaccctgctggtgggcagataccccttccacgacagcgaccccagcgccctgttcagcaagatcagaagaggccagttctgcatccccgagcacatcagccccaaggccagatgcctgatcagaagcctgctgagaagagagcccagcgagagactgaccgcccccgagatcctgctgcacccctggttcgagagcgtgctggagcccggctacatcgacagcgagatcggcaccagcgaccagatcgtgcccgagtaccaggaggacagcgacatcagcagcttcttctgctag

SEQ ID NO: 218223 - protein, 217 aa, Artificial Sequence
  derived and/or modified sequence
MAAQCVRLARRSLPALALSLRPSPRLLCTATKQKNSGQNLEEDMGQSEQKADPPATEKTLLEEKVKLEEQLKETVEKYKRALADTENLRQRSQKLVEEAKLYGIQAFCKDLLEVADVLEKATQCVPKEEIKDDNPHLKNLYEGLVMTEVQIQKVFTKHGLLKLNPVGAKFDPYEHEALFHTPVEGKEPGTVALVSKVGYKLHGRTLRPALVGVVKEA

SEQ ID NO: 218224 - protein, 196 aa, Artificial Sequence
  derived and/or modified sequence
MAAQCVRLARRSLPALALSLRPSPRLLCTATKQKNSGQNLEEDMGQSEQLKETVEKYKRALADTENLRQRSQKLVEEAKLYGIQAFCKDLLEVADVLEKATQCVPKEEIKDDNPHLKNLYEGLVMTEVQIQKVFTKHGLLKLNPVGAKFDPYEHEALFHTPVEGKEPGTVALVSKVGYKLHGRTLRPALVGVVKEA

SEQ ID NO: 218225 - DNA, 654 bp, Artificial Sequence
  derived and/or modified sequence
atggccgcccagtgcgtgcggcttgcccgcaggagtctgcccgcactcgccctgtcactgagaccaagcccccggcttctatgcacggccaccaagcagaaaaatagcgggcaaaatctggaggaggacatgggtcagtcagagcaaaaagctgaccccccggcaaccgaaaagactctcctggaagaaaaagttaaactggaggaacagctcaaagaaacagtggaaaagtacaagagagccctcgcagatacagaaaacctgcgtcagcgatcccagaaactggttgaagaggctaagctttacgggattcaggccttttgtaaggatctgctggaagtcgcggacgttttagagaaagcaacccagtgtgtgcccaaggaagaaataaaggacgataacccccacttgaagaacctctatgaaggtctggtgatgacagaggtccaaatccagaaggtttttaccaaacatggattgttgaagcttaaccctgtcggagccaagttcgatccatacgagcatgaagccctcttccatactccagttgaggggaaagaaccaggaacggttgccctggtcagcaaggtggggtataaactgcatggacggaccttgaggcccgccttagtgggcgttgtcaaagaagcctag

SEQ ID NO: 218226 - DNA, 591 bp, Artificial Sequence
  derived and/or modified sequence
atggctgcccagtgtgtccgcctggcccgaagaagcctcccagccctcgccctatcattacgtccaagtccaagactgctgtgtaccgcgaccaagcagaagaacagcggtcagaacctcgaggaagatatgggacagtccgagcagctcaaggagacggtggaaaagtacaagagggccctcgccgacacggagaacttgaggcagagaagccaaaaacttgtggaggaggcgaaattatacggtatccaagctttttgtaaggacttgctagaagtcgctgatgtgctggagaaagccacccaatgtgtccccaaagaggagattaaagatgataaccctcatctcaaaaatttgtacgaagggctcgtgatgacggaagtccagattcaaaaagtgttcactaaacatggtctactgaagctgaatcccgtcggggcaaaatttgatccttacgaacatgaggccctttttcacacccctgttgaaggaaaagagccaggcaccgtagccttggtgtccaaggtcggatacaaactccacggacggacgcttcgcccagcgctggtcggagttgttaaggaggcctag

SEQ ID NO: 218227 - DNA, 2775 bp, Artificial Sequence
  derived and/or modified sequence
aagatgctcttccgtgacccacaattattggtgactattgcctgtccataacaggaaaagcgattacggattggctgaggcgaagtagtagggcagaaaagtgggtatagctgcctgcacgcacgcttggtgcgtgcgcggcgactgcgacgggcagtggcagtcatggcggctcagtgcgtgaggttggcgcggcgcagtcttcctgctttggcgttgtctctcaggccatctccccggttgttgtgcacagccacgaaacaaaagaacagtggccagaacctggaagaggacatgggtcagagtgaacagaaggcagatcctcctgctacagagaagaccctcctggaagagaaggtcaagttggaggaacagctgaaggagactgtggaaaaatataaacgagctttggcagacactgagaacttacggcagaggagccagaaattggtggaggaggcaaaattatacggcattcaagccttctgcaaggacttgttggaggtggcagacgttctggagaaggcaacacagtgtgttccaaaagaagaaattaaagacgataaccctcacctgaagaacctctatgaggggctggtcatgactgaagtccagatccagaaggtgttcacaaagcatggcttgctcaagttgaaccctgtcggagccaagttcgacccttatgaacatgaggccttgttccacacaccggttgaggggaaggagccaggcacagtggccctagttagcaaagtggggtacaagctgcatgggcgcactctgagacccgccctggtgggggtggtgaaggaagcttagctgctgttgatggggtgggtgtttttaaactcacttgatgtaactctcaaggctggttcattgtttctcatctatgagtacgtgtgaccttttcccaaaccttattggaaaccttaagtaaccagtggctaaacagaaaagccggttgcccaactgcattaatgaactctaattcgggagtctgttcccttttagtgccacgcgttgaatagttccacatactttcagaagagctcagcagggccctgcctggtctcccgagcatcatgagtaacgtgtctgctcagactctgctgacaccaaagtattttaaacaaataaaaggtcttggggaattctgtttggctacctgggcacgccagtctgcaccatgtgtccctgcggcgcatgagtgactggcgtatttagcccgtcacatttcattcgctgaaggaaaggcaagagagttgaaacatttttcttacttaaaaaaaatgatctttgtgaagaacatagtgagttcgtttgtcttcagtcaacagcggctgaaactgaccactgagaaatgggtgtgggcactgacagttctcccccattatttggccaggaattgagcttggcttggcaaagttccttttaccctgttctgttcatctaaatgcagacatatttaaatcatattcaactagttactaatgacctcaagttgtattccctggcaaaatggactttctcaaaataggactgcacgcttggtgtactttaaatgttaatgtttaatttaaaatttttatttaagaggattaaagccctaatgtttattttcctactttctgaaaacaattttgtgtcctctcatggagatccttgccgctgaggcaagcatggcttagccttcccattctctactccagcccagaagctgtcagcttgacacgtgcgtgcgtgcacattcacgtacacacatatacaggcttctacacagaaagggagagccacactcccccagtgcagctgcagcccgtccggtaagaatacgaaacacccaggagccacagcaagggcacaggatttgcaaaatcatcttgccaaagggctgttcctcatttacacggtcatccagggcttagaaaaaggctgaatgattggcgtctgttacaaaaaagagaaaagaacctttcgctgcctttgcttctagaatggaagatacttgtgaaagccatttgctgcacaggaaagatggggcagtttatttcacttctaattttaaaagacgcaagtaatggtcccataatacttcatcttgggataccattcccaaacatgttccacctttaagatgccttaagttaatttggtcagaaacaactaaaggcagcatcgtgtattgaagaaaacatgactgggagctccagcgctgcctgttttcacgctgtggggttgtgagtgcatcatcacccctggagctcccgagttaaatggaggctaagaaaagtaatttatcaactcatttctgtgaatgtttgcagtctcctaccgtctcaactacagctgcagttgctaaaaagcacttaactcgtaacctagaggcaatatagcttaagtagcaaaatatttttttacagtaagcttcagtcatccatagtcactataagttggttatcatctgaaatgcttagaaccagaattgtttcaaacttggggggttttcggattttggaatatagtcaagcatggcttaaccacagggatgtgttctgagaaatgcgctgtcaggcagtttttcctgtgaacaccatgtgtacctacatggacctaaaaaacaggtggtggagcctcctccacacctaggctatatggtgtatgtagcctgttgctctagactggagggcacgttactgtactgatactgtaggcaactgttaacacaatggtatctgtgtatctgaacataacatagtaaaggtacagtgcaaa

SEQ ID NO: 218228 - DNA, 1293 bp, Artificial Sequence
  derived and/or modified sequence
gtgcgcggcgactgcgacgggcagtggcagtcatggcggctcagtgcgtgaggttggcgcggcgcagtcttcctgctttggcgttgtctctcaggccatctccccggttgttgtgcacagccacgaaacaaaagaacagtggccagaacctggaagaggacatgggtcagagtgaacagctgaaggagactgtggaaaaatataaacgagctttggcagacactgagaacttacggcagaggagccagaaattggtggaggaggcaaaattatacggcattcaagccttctgcaaggacttgttggaggtggcagacgttctggagaaggcaacacagtgtgttccaaaagaagaaattaaagacgataaccctcacctgaagaacctctatgaggggctggtcatgactgaagtccagatccagaaggtgttcacaaagcatggcttgctcaagttgaaccctgtcggagccaagttcgacccttatgaacatgaggccttgttccacacaccggttgaggggaaggagccaggcacagtggccctagttagcaaagtggggtacaagctgcatgggcgcactctgagacccgccctggtgggggtggtgaaggaagcttagctgctgttgatggggtgggtgtttttaaactcacttgatgtaactctcaaggctggttcattgtttctcatctatgagtacgtgtgaccttttcccaaaccttattggaaaccttaagtaaccagtggctaaacagaaaagccggttgcccaactgcattaatgaactctaattcgggagtctgttcccttttagtgccacgcgttgaatagttccacatactttcagaagagctcagcagggccctgcctggtctcccgagcatcatgagtaacgtgtctgctcagactctgctgacaccaaagtattttaaacaaataaaaggtcttggggaattctgtttggctacctgggcacgccagtctgcaccatgtgtccctgcggcgcatgagtgactggcgtatttagcccgtcacatttcattcgctgaaggaaaggcaagagagttgaaacatttttcttacttaaaaaaaatgatctttgtgaagaacatagtgagttcgtttgtcttcagtcaacagcggctgaaactgaccactgagaaatgggtgtgggcactgacagttctcccccattatttggccaggaattgagcttggcttggcaaagttccttttaccctgttctgttcatctaaatgcagacatatttaaatcatattcaactagtt

SEQ ID NO: 218229 - DNA, 654 bp, Artificial Sequence
  derived and/or modified sequence
atggccgcccagtgtgtgcggctggcccggcgcagcctgcctgccctggccctgagcctgcggcccagcccccggctgctgtgcacagccaccaagcagaagaacagcggccagaacctggaggaggacatgggccagagcgagcagaaggctgaccccccagccacagagaagaccctgctggaggagaaggtgaagctggaggagcagctgaaggagaccgtggagaagtacaagagggccctggccgacacagagaacctgcggcagaggagccagaagctggtggaggaggccaagctgtatggcatccaggccttctgcaaggacctgctggaggtggctgatgtgctggagaaggccacccagtgtgtgcccaaggaggagatcaaggatgacaacccccacctgaagaacctgtatgagggcctggtgatgacagaggtgcagatccagaaggtgttcaccaagcacggcctgctgaagctgaaccctgtgggcgccaagtttgacccctatgaacatgaggccctcttccacacccctgtggagggcaaggagcccggcaccgtggccctggtgtccaaggtgggctacaagctgcacggccgcaccctgcggcctgccctggtgggcgtggtgaaggaggcctag

SEQ ID NO: 218230 - DNA, 591 bp, Artificial Sequence
  derived and/or modified sequence
atggccgcccagtgtgtgcggctggcccggcgcagcctgcctgccctggccctgagcctgcggcccagcccccggctgctgtgcacagccaccaagcagaagaacagcggccagaacctggaggaggacatgggccagagcgagcagctgaaggagaccgtggagaagtacaagagggccctggccgacacagagaacctgcggcagaggagccagaagctggtggaggaggccaagctgtatggcatccaggccttctgcaaggacctgctggaggtggctgatgtgctggagaaggccacccagtgtgtgcccaaggaggagatcaaggatgacaacccccacctgaagaacctgtatgagggcctggtgatgacagaggtgcagatccagaaggtgttcaccaagcacggcctgctgaagctgaaccctgtgggcgccaagtttgacccctatgagcacgaggccctcttccacacccctgtggagggcaaggagcccggcaccgtggccctggtgtccaaggtgggctacaagctgcacggccgcaccctgcggcctgccctggtgggcgtggtgaaggaggcctag

SEQ ID NO: 218231 - DNA, 654 bp, Artificial Sequence
  derived and/or modified sequence
atggccgcccagtgcgtgcggctggcccggcggagcctgcccgccctggctctgtccctccgcccaagcccaagattgctgtgtacggccaccaagcaaaaaaactccggccagaacctggaggaagacatgggccagagcgagcagaaagcggatccccccgccactgaaaagacattactggaggagaaggtgaaactggaggaacaattgaaggagaccgttgagaaatataagcgcgccctggcagatacagagaacctgagacagagaagccagaagctggtagaagaggccaagctatacggtattcaggccttctgtaaggacctgctagaggtcgcggacgttctggaaaaagccacccagtgcgtcccaaaggaagagatcaaagacgacaatccgcacttgaagaacctctatgagggacttgtgatgacggaggttcaaatccagaaagtgtttaccaaacatggactattaaagttgaaccccgtcggggccaagtttgacccttacgagcatgaggccctttttcacacccctgtggaaggcaaagagcccgggaccgttgcacttgtgagcaaagtggggtacaagttgcacggccggactctgcggcccgccttggtgggagtggttaaagaagcttag

SEQ ID NO: 218232 - DNA, 591 bp, Artificial Sequence
  derived and/or modified sequence
atggccgcccagtgcgtgcggctggcccggcggagcctgcccgccctggctctgagtcttcgaccctcgcctcgcctcttatgcaccgccactaaacagaaaaactccgggcagaatctggaagaagatatggggcaaagcgagcagttgaaagagaccgttgagaaatacaaacgggcccttgccgataccgaaaatctcaggcagcgatcacaaaagctggttgaggaagctaaactctacggaattcaggcattctgtaaggacttgctcgaggttgccgatgtactcgaaaaagccacacagtgcgtgcccaaggaagaaattaaagatgacaatccccacctgaaaaacctctatgaggggctggtgatgactgaggtccagattcagaaagtgttcactaagcacggtctactcaagctgaaccctgttggagccaagtttgacccgtacgaacacgaggctctgtttcacacccccgtagaaggcaaggagccaggaacagtcgccctggttagtaaggtgggctataagcttcatgggcgcactctacgcccagccttggtaggggttgtcaaggaggcgtag

SEQ ID NO: 218233 - DNA, 654 bp, Artificial Sequence
  derived and/or modified sequence
atggcagcccagtgcgtgagattggcaagacggagtcttcctgccctggcattatccctacggccatcaccacgccttctgtgtacagctaccaaacagaagaacagtgggcaaaacctggaagaggacatgggacagagcgagcagaaggccgacccgcctgccaccgagaaaacgctgttggaggaaaaagtgaaattggaggaacagctaaaagaaacagtggagaaatacaaacgggctttggcagacacagagaacctaaggcaaaggagccagaaactggttgaggaagcaaagctttacggcattcaggccttttgcaaggatcttcttgaagtggccgacgttctggagaaggcaacccagtgcgtgcctaaggaagagatcaaagatgataatcctcacctcaaaaatctatatgagggtttggtgatgacagaagtacagatccaaaaagtattcaccaagcacggtctgctgaagcttaatcctgtgggtgccaagtttgacccatatgagcatgaagctctatttcatactcctgtggaggggaaagagcccggtactgtggccttagtgtctaaggtcgggtataaactgcatggaagaaccctgcgcccagctctggtgggggtagtgaaagaggcctag

SEQ ID NO: 218234 - DNA, 591 bp, Artificial Sequence
  derived and/or modified sequence
atggctgcccaatgtgtgagattggccaggagatcgctgccagctctcgctctatctctccggccttcacctcggctgctgtgtacggcaactaagcagaagaactccgggcaaaatctagaggaggacatgggacagtccgagcaactgaaagagactgtggaaaaatacaagagagctctggcagataccgagaacctacggcaacggtcacagaaactggtggaagaggccaagctatacggcatccaggctttttgcaaagacctgctggaagtggcggacgttctcgagaaagccactcaatgtgtacctaaggaagagattaaagatgacaatcctcacctgaaaaacttgtacgaaggcctggttatgactgaggttcagattcaaaaggttttcactaagcatggattgctgaagctaaacccagttggagccaagtttgacccctatgaacacgaagctctcttccacacacctgtagagggtaaagagcccggtactgtcgccctcgtgagtaaagttgggtacaagctccatggaagaacactgcgtccggctctggtcggggtagtcaaagaagcctag

SEQ ID NO: 218235 - DNA, 654 bp, Artificial Sequence
  derived and/or modified sequence
atggccgcccagtgcgtgagactggccagaagaagcctgcccgccctggccctgagcctgagacccagccccagactgctgtgcaccgccaccaagcagaagaacagcggccagaacctggaggaggacatgggccagagcgagcagaaggccgacccccccgccaccgagaagaccctgctggaggagaaggtgaagctggaggagcagctgaaggagaccgtggagaagtacaagagagccctggccgacaccgagaacctgagacagagaagccagaagctggtggaggaggccaagctgtacggcatccaggccttctgcaaggacctgctggaggtggccgacgtgctggagaaggccacccagtgcgtgcccaaggaggagatcaaggacgacaacccccacctgaagaacctgtacgagggcctggtgatgaccgaggtgcagatccagaaggtgttcaccaagcacggcctgctgaagctgaaccccgtgggcgccaagttcgacccctacgagcacgaggccctgttccacacccccgtggagggcaaggagcccggcaccgtggccctggtgagcaaggtgggctacaagctgcacggcagaaccctgagacccgccctggtgggcgtggtgaaggaggcctag

SEQ ID NO: 218236 - DNA, 591 bp, Artificial Sequence
  derived and/or modified sequence
atggccgcccagtgcgtgagactggccagaagaagcctgcccgccctggccctgagcctgagacccagccccagactgctgtgcaccgccaccaagcagaagaacagcggccagaacctggaggaggacatgggccagagcgagcagctgaaggagaccgtggagaagtacaagagagccctggccgacaccgagaacctgagacagagaagccagaagctggtggaggaggccaagctgtacggcatccaggccttctgcaaggacctgctggaggtggccgacgtgctggagaaggccacccagtgcgtgcccaaggaggagatcaaggacgacaacccccacctgaagaacctgtacgagggcctggtgatgaccgaggtgcagatccagaaggtgttcaccaagcacggcctgctgaagctgaaccccgtgggcgccaagttcgacccctacgagcacgaggccctgttccacacccccgtggagggcaaggagcccggcaccgtggccctggtgagcaaggtgggctacaagctgcacggcagaaccctgagacccgccctggtgggcgtggtgaaggaggcctag

SEQ ID NO: 218237 - protein, 490 aa, Artificial Sequence
  derived and/or modified sequence
MEEEGVKEAGEKPRGAQMVDKAGWIKKSSGGLLGFWKDRYLLLCQAQLLVYENEDDQKCVETVELGSYEKCQDLRALLKRKHRFILLRSPGNKVSDIKFQAPTGEEKESWIKALNEGINRGKNKAFDEVKVDKSCALEHVTRDRVRGGQRRRPPTRVHLKEVASAASDGLLRLDLDVPDSGPPVFAPSNHVSEAQPRETPRPLMPPTKPFLAPETTSPGDRVETPVGERAPTPVSASSEVSPESQEDSETPAEEDSGSEQPPNSVLPDKLKVSWENPSPQEAPAAESAEPSQAPCSETSEAAPREGGKPPTPPPKILSEKLKASMGEMQASGPPAPGTVQVSVNGMDDSPEPAKPSQAEGTPGTPPKDATTSTALPPWDLPPQFHPRCSSLGDLLGEGPRHPLQPRERLYRAQLEVKVASEQTEKLLNKVLGSEPAPVSAETLLSQAVEQLRQATQVLQEMRDLGELSQEAPGLREKRKELVTLYRRSAP

SEQ ID NO: 218238 - protein, 223 aa, Artificial Sequence [sequence omitted]

SEQ ID NO: 218239 - DNA, 1473 bp, Artificial Sequence
  derived and/or modified sequence
atggaggaggagggcgtgaaggaggccggcgagaagcccagaggcgcccagatggtggacaaggccggctggatcaagaagagcagcggcggcctgctgggcttctggaaggacagatacctgctgctgtgccaggcccagctgctggtgtacgagaacgaggacgaccagaagtgcgtggagaccgtggagctgggcagctacgagaagtgccaggacctgagagccctgctgaagagaaagcacagattcatcctgctgagaagccccggcaacaaggtgagcgacatcaagttccaggcccccaccggcgaggagaaggagagctggatcaaggccctgaacgagggcatcaacagaggcaagaacaaggccttcgacgaggtgaaggtggacaagagctgcgccctggagcacgtgaccagagacagagtgagaggcggccagagaagaagaccccccaccagagtgcacctgaaggaggtggccagcgccgccagcgacggcctgctgagactggacctggacgtgcccgacagcggcccccccgtgttcgcccccagcaaccacgtgagcgaggcccagcccagagagacccccagacccctgatgccccccaccaagcccttcctggcccccgagaccaccagccccggcgacagagtggagacccccgtgggcgagagagcccccacccccgtgagcgccagcagcgaggtgagccccgagagccaggaggacagcgagacccccgccgaggaggacagcggcagcgagcagccccccaacagcgtgctgcccgacaagctgaaggtgagctgggagaaccccagcccccaggaggcccccgccgccgagagcgccgagcccagccaggccccctgcagcgagaccagcgaggccgcccccagagagggcggcaagccccccacccccccccccaagatcctgagcgagaagctgaaggccagcatgggcgagatgcaggccagcggcccccccgcccccggcaccgtgcaggtgagcgtgaacggcatggacgacagccccgagcccgccaagcccagccaggccgagggcacccccggcaccccccccaaggacgccaccaccagcaccgccctgcccccctgggacctgcccccccagttccaccccagatgcagcagcctgggcgacctgctgggcgagggccccagacaccccctgcagcccagagagagactgtacagagcccagctggaggtgaaggtggccagcgagcagaccgagaagctgctgaacaaggtgctgggcagcgagcccgcccccgtgagcgccgagaccctgctgagccaggccgtggagcagctgagacaggccacccaggtgctgcaggagatgagagacctgggcgagctgagccaggaggcccccggcctgagagagaagagaaaggagctggtgaccctgtacagaagaagcgccccctag

SEQ ID NO: 218240 - DNA, 672 bp, Artificial Sequence
  derived and/or modified sequence
atggaggaggagggcgtgaaggaggccggcgagaagcccagaggcgcccagatggtggacaaggccggctggatcaagaagagcagcggcggcctgctgggcttctggaaggacagatacctgctgctgtgccaggcccagctgctggtgtacgagaacgaggacgaccagaagtgcgtggagaccgtggagctgggcagctacgagaagtgccaggacctgagagccctgctgaagagaaagcacagattcatcctgctgagaagccccggcaacaaggtgagcgacatcaagttccaggcccccaccggcgaggagaaggagagctggatcaaggccctgaacgagggcatcaacagaggcaagaacaaggccttcgacgaggtgaaggtggacaagagctgcgccctggagcacgtgaccagagacagagtgagaggcggccagagaagaagaccccccaccagagtgcacctgaaggaggtggccagcgccgccagcgacggcctgctgagactggacctggacgtgcccgacagcggcccccccgtgttcgcccccagcaaccacgtgagcgaggcccagcccagagagacccccagacccctgatgccccccaccaagcccttcctggcccccgagaccaccagccccagcagccacctgttctag

SEQ ID NO: 218241 - DNA, 1473 bp, Artificial Sequence
  derived and/or modified sequence
atggaagaagaaggagtgaaagaagccggggagaagcctaggggcgcccagatggtggataaagcaggctggataaaaaaaagctcgggtggccttttaggcttttggaaagaccgttacctgcttctctgccaagcacaactcttagtttacgagaatgaggatgaccagaaatgcgtggagacagtcgaactcggctcttacgaaaaatgtcaggacctgagagccctgctcaagcggaagcatcggttcatactcctcagatcaccaggaaacaaggtgagtgatatcaagtttcaagcacccactggggaggaaaaggagtcctggatcaaagctctgaacgaagggatcaaccggggaaaaaacaaggcatttgacgaagtcaaggtggataaaagctgcgcactggagcacgtgacccgagatagagttcgcggaggccagcgtcgcaggcctcccactcgtgtgcatcttaaggaggtcgcctctgctgcgagcgacggcctgctgcgactagatctagacgtgccagacagcgggccccccgtctttgccccaagtaatcatgtttctgaggctcagccacgcgagacacctcgccccctcatgccccccacaaagcccttccttgcccctgaaacaactagtcctggggatcgcgtggaaacccctgtcggagaacgtgcccctacacccgtgtctgcgagctcagaagtgagcccagagtctcaggaggatagtgaaaccccagctgaggaagacagcggatctgaacaacctccaaacagcgttttgcccgataaactgaaagtgtcatgggaaaatccctcacctcaggaggcacctgctgccgaatccgccgaaccatcacaagccccatgctctgaaactagtgaagccgcaccacgagaaggtgggaagccccccacccccccaccaaaaatcctcagtgagaagcttaaggcctcaatgggagagatgcaggcatccggaccacccgcccccggaaccgtccaggtgagcgtaaacggcatggacgactctcctgaacccgcaaaaccatcccaggcagaaggcactcccgggacaccgccaaaagacgctacaacctccacggccctgcctccctgggacctgccgccgcaattccacccaaggtgttctagcctgggagacctgctcggggagggtcctcggcacccattgcagccccgcgagcggttgtaccgcgcgcagctcgaagtaaaggtagcctcggagcagactgaaaaactgctgaacaaagtactgggtagcgagccggcccccgtctctgctgagactttattgagtcaggctgtggagcagttgaggcaggctacacaagtgctgcaggaaatgagggacctgggtgagctgagccaggaggccccaggtctgagggagaagcgcaaagaactcgtaacattataccgtcgcagtgctccttag

SEQ ID NO: 218242 - DNA, 672 bp, Artificial Sequence
  derived and/or modified sequence
atggaggaagagggagtgaaggaggcaggcgagaagccaagaggcgcccagatggtggataaagctgggtggataaagaagtcttctggggggctcttaggattttggaaagaccgatacctactgttgtgtcaggcccaattgctggtctacgagaacgaagacgaccagaaatgcgttgaaactgtcgagctgggctcgtacgaaaaatgccaggacttaagggccttgctcaaacgcaagcaccgctttattttattgaggtcccccgggaataaagtcagtgatattaaatttcaggctcctaccggagaggagaaggaatcttggataaaagctctcaacgaaggaatcaatagaggaaagaacaaggcctttgacgaggtcaaagttgacaaatcatgcgctcttgagcatgtgacacgggacagagtccggggtggccagcggcgtcgcccccccacacgcgtgcatctcaaagaggtcgccagtgctgcttcagatggcctcctgaggctcgatttggatgtgcccgactctggacctccagtgtttgctccaagcaaccatgtcagcgaagcccaaccaagggaaactccacggcccctgatgccacccaccaagcccttcttggctccggaaacaactagcccctcttcacatcttttctag

SEQ ID NO: 218243 - DNA, 1473 bp, Artificial Sequence
  derived and/or modified sequence
atggaggaggagggcgtgaaggaggccggggagaagcccaggggggcccagatggtggacaaggccggctggatcaagaagagcagcggcggcctgctgggcttctggaaggaccgctacctgctgctgtgccaggcccagctgctggtgtatgaaaatgaagatgaccagaagtgtgtggagaccgtggagctgggcagctatgagaagtgccaggacctgcgggccctgctgaagaggaagcaccgcttcatcctgctgcggagccctggcaacaaggtgtctgacatcaagttccaggcccccactggagaggagaaggagagctggatcaaggccctgaatgaaggcatcaacagaggcaagaacaaggcctttgatgaggtgaaggtggacaagagctgtgccctggagcacgtgacccgggacagagtgcggggcggccagaggagaagaccacccaccagggtgcacctgaaggaggtggccagcgctgccagtgatggcctgctgcggctggacctggatgtgcctgacagcggcccccctgtgtttgcccccagcaaccacgtgtctgaggcccagccccgggagaccccccggcccctgatgccacccaccaagcccttcctggcccctgagaccaccagccctggggacagagtggagacccctgtgggggagcgggcccccacccctgtgtctgccagcagcgaggtgtccccagagagccaggaggacagcgagaccccagctgaggaggacagcggcagcgagcagccccccaacagcgtgctgcctgacaagctgaaggtgtcctgggagaaccccagcccccaggaggccccagctgctgagagcgctgagcccagccaggccccctgcagcgagaccagcgaggccgccccccgggagggcggcaagccacccaccccaccacccaagatcctgtctgagaagctgaaggcctccatgggagagatgcaggccagcggccccccagcccctggcaccgtgcaggtgtctgtgaatggcatggatgacagccctgagcccgccaagcccagccaggccgagggcaccccaggcaccccacccaaggatgccaccaccagcacagccctgcccccctgggacctgcccccccagttccacccccgctgcagcagcctgggggacctgctgggggagggccccaggcaccccctgcagccccgggagcggctgtaccgggcccagctggaggtgaaggtggccagcgagcagacagagaagctgctgaacaaggtgctgggcagcgagcccgcccctgtgtctgctgagaccctgctgagccaggccgtggagcagctgcggcaggccacccaggtgctgcaggagatgagggacctgggggagctgagccaggaggcccctggcctgcgggagaagaggaaggagctggtgaccctgtaccgccgcagcgccccctag

SEQ ID NO: 218244 - DNA, 672 bp, Artificial Sequence
  derived and/or modified sequence
atggaggaggagggcgtgaaggaggccggggagaagcccaggggggcccagatggtggacaaggccggctggatcaagaagagcagcggcggcctgctgggcttctggaaggaccgctacctgctgctgtgccaggcccagctgctggtgtatgaaaatgaagatgaccagaagtgtgtggagaccgtggagctgggcagctatgagaagtgccaggacctgcgggccctgctgaagaggaagcaccgcttcatcctgctgcggagccctggcaacaaggtgtctgacatcaagttccaggcccccactggagaggagaaggagagctggatcaaggccctgaatgaaggcatcaacagaggcaagaacaaggcctttgatgaggtgaaggtggacaagagctgtgccctggagcacgtgacccgggacagagtgcggggcggccagaggagaagaccacccaccagggtgcacctgaaggaggtggccagcgctgccagtgatggcctgctgcggctggacctggatgtgcctgacagcggcccccctgtgtttgcccccagcaaccacgtgtctgaggcccagccccgggagaccccccggcccctgatgccacccaccaagcccttcctggcccctgagaccaccagccccagcagccacctgttctag

SEQ ID NO: 218245 - DNA, 1473 bp, Artificial Sequence
  derived and/or modified sequence
atggaggaggagggcgtgaaggaggccggcgagaagccccggggcgctcagatggttgacaaagccgggtggattaaaaaatccagcggcgggttgttagggttttggaaggatcgttatctgctcctctgtcaagcgcagctgcttgtctatgaaaatgaggacgatcaaaaatgtgtggagaccgtagagcttggctcctacgaaaagtgtcaagacctcagggctctactgaaaaggaagcacaggttcatcctcctgcgatcacccggcaataaggtttccgacattaaattccaggcaccaaccggagaagagaaggagtcctggattaaagccctcaatgagggaattaaccgcggtaagaacaaagccttcgatgaagtgaaggtagacaagtcctgcgccctcgaacacgtgacccgtgatcgcgtccgaggcggccagaggcggcgccccccgacacgcgttcacttgaaagaggtggcttcagccgcctcagatggactccttcgactggacctcgatgtgccggacagcggacccccggtgtttgctccctccaaccatgtcagcgaggcccagccacgggagacaccacggccactcatgcctcccactaagccttttcttgcgccagagacgacgagcccaggggacagggtagaaaccccagtaggcgagcgggctcctactcccgtctctgccagttccgaggtctcacccgagtcccaggaagacagtgagaccccagccgaagaggacagcggatcagagcagccacccaacagcgtcctacccgacaaactcaaggttagttgggaaaacccttcaccacaagaagcccccgctgccgagtcagccgagccctcccaggctccctgttcagagactagcgaagcagcccctcgggaaggcggcaaaccccctacaccgccccccaaaatattgagtgaaaagctgaaggcctcgatgggcgagatgcaagccagcgggccacccgcgccaggaaccgtgcaggtgagtgtgaatgggatggatgatagtcctgagccagctaagccttcacaggcagaaggcaccccaggaacaccacctaaggatgccacaacctctacagcccttccaccgtgggatctgccacctcagtttcatccacgctgctctagtctaggggatctgctgggtgaaggaccacgacaccctctgcagcccagagaacgattataccgagcacagttggaagtgaaagtggcgtctgagcaaacagagaagttattgaacaaggtgctgggctctgaacccgcaccggtgtccgctgagacattattatctcaggccgtggaacagttgagacaagcaacccaggtccttcaagagatgcgagatctaggtgaactttcgcaggaggcccctggccttcgggaaaaacgtaaggagcttgttactctgtacagacggtcagcaccctag

SEQ ID NO: 218246 - DNA, 672 bp, Artificial Sequence
  derived and/or modified sequence
atggaggaggagggcgtgaaggaggccggcgagaagccccggggcgcacaaatggtggataaagccggatggataaaaaaatcatccggtgggctgctggggttctggaaggaccggtatcttcttctgtgccaggcacagctgttagtgtatgagaatgaagatgaccagaaatgcgtggaaacggtggaattgggttcatatgaaaaatgtcaggacctccgagcacttctgaagcgcaagcatcggttcatcctgctgcgaagccctgggaacaaagtctcagatatcaagttccaggccccaactggcgaggaaaaggagtcctggattaaggccctaaatgaggggattaacagagggaagaacaaggccttcgatgaggtgaaagtcgacaaaagctgcgcccttgagcacgtcacacgcgacagagtccggggtggccaacgtaggcggcctcccacgagagtgcacttgaaagaagtcgcctctgcagcttccgacgggctgctgcgcctcgacctggacgtacccgattccgggcccccagtgttcgcccccagcaaccacgtgtccgaggcccagccccgagaaaccccaagaccactcatgccccctacgaaacctttccttgctccagaaacgactagtcctagttctcacctgttctag

SEQ ID NO: 218247 - DNA, 3720 bp, Artificial Sequence
  derived and/or modified sequence
cttgggcccccggcagccggcgggacagaacgcggagagtcgccgcctggccgggcgtagacgcggtggcagagcccgcgcggcgctggaagcgagtggcggagcggcgggacctcggcggactcgccatggaggaggagggtgtgaaggaagccggtgagaagcctcggggagcacagatggtggacaaggctggctggatcaagaagagcagtgggggcctcctgggtttctggaaagaccgatatctgctcctctgccaggcccagctgctggtctatgagaatgaggatgatcagaagtgtgtggagactgtggagctgggcagctatgagaagtgccaggaccttcgtgccctcctcaagcgaaaacaccgctttatcctgctgcgatccccagggaacaaggtcagcgacatcaaattccaggcacccaccggggaggagaaggaatcctggatcaaagccctcaatgaagggattaaccgaggcaaaaacaaggctttcgatgaggtaaaggtggacaagagctgcgccctggagcatgtgacacgggaccgggtgcgagggggccagcgacgccggccaccaacgagagtccacctgaaggaggtggccagtgcagcttctgacggtcttctgcgcctggatcttgatgttccggacagtgggccaccagtgtttgcccccagcaatcatgtcagtgaagcccaacctcgggagacaccccggcccctcatgcctcctaccaagcctttcctagcacctgagaccaccagccctggtgacagggtggagacccctgtgggggagagagccccaacccctgtctcagcaagctctgaggtctcccctgagagccaagaggactcagagaccccagcagaggaggacagtggctctgagcagcctcccaacagcgtcctgcctgacaaactgaaggtgagctgggagaaccccagcccccaggaggcccctgctgcagagagtgcagaaccgtcccaggcaccctgttctgagacttctgaggctgcccccagggagggtgggaagccccctacacccccacccaagatcttatcagagaaactgaaagcctccatgggtgagatgcaggcttctgggccacctgctccaggcacagtgcaggtctcagtgaatggcatggatgacagtcctgagcctgccaagccctctcaggctgagggcaccccaggaactcctccaaaggatgcaacaacatccacagcactgcccccctgggacctgccacctcagttccatccccgctgctcctcccttggggacttgcttggggaaggcccgcggcatcccttgcagcccagggaacggctatatcgggcccagctggaggtgaaggtggcctcggaacagacggagaaactgttgaacaaggtgctgggcagtgagccggcccctgttagtgccgaaacattgctcagccaggctgtggagcagctgaggcaggccacccaggtcctgcaggaaatgagagatttgggagagctgagccaggaagcacctgggctaagggagaagcggaaggagctggtgaccctctacaggagaagtgcaccctagggccttctgggccagaggcaccatcccttctggccatccatcaagtccatcaaggcccagccctgctgagaaatgtgcttctgcttctacagcaatggctgcaggagggccattgggcatgtcagggtttggccatgacccgaagagactcctggcgtccttcctactctgctctggccagtggtgccaggtgccacccagggctactgcctggctatctggcctggcctctgggctggggctggggctgggagcacacacgctgggacctatgtgtttgtgtggtcgttccaaactgccccagggctttgggggcggcacttggggtttctgggaatgacatcatctctgttccccatccccagtagtttacattcctgacttctgaatacagcacagctgagccccctgcagctcccatctccagctattcctaggcaaagagcctcatggctaaggcagcctcaaagccagcccctcctcccacctattctgagtagctgcagaggccttgggtccaggctctaggttcatccctcagttggggggaacgtaggacccagctggagcctcttgagggagatgagaggcctctttgtgaggaggacattagctgtgtggcctctctctctttggccctgtttccttttttgcaaaacaaggacattttctgcagccccttcctctcagtgagctatgattggagggcttaggtctggaggattcaagagtggaagaggaatttaaggggtcccctagtctagtctctgcccctggatagtgtccagccttgtatatttctgaagaggtggatcccagagtggctctgatgtccacattagaaaaacttacttgtaatgatcatgtcagccttcagaagagaatccccaccaacttctgtgcctcctcagatggggatttatctggatctctgtggttccttctcagccgaaacaggtccagtatcccagtcatttcttcaaatgctgataggggtatgttggaatccgaagccacttccccgccttcaagccccagatgggctgctctcctgtaactttctaggagaagagacattttcttctttccctttcctggtccatccctgcaccctggtcctctcccagcctctcccccacattgtccctgactctaggggcacatccagtctccatcgtgctgcagcagctggactgagggcagagcctgtaggtgcagaggccctggctcccgaggtccagccactctccctggggcctctggggtgagagcagcttccgataggacctgcccagatttctgcatgtgcacttttgtttactgaaagagagaaaggggggggtcacagcaacatgccctggcctttctgctctgttccccaaccccactgaggcctgctgcacaggtcaatgccttcgttatcgttattgtactgtcactttgttcttgaggtagtagtcaaggatcaggaggggcagatgtcttctctgggctgcgtggggccggagcagaggtgagcagcaatgcactggttcgggagcccccatcagcctccttgtgcaaactgggcccccatgccacagtctggctttccctccatctgccccaggacaagagcaagaaggacatcagttgcccagtcatgtgatcccctgccatcttgccttaggaacagccttcccccaccagcagccatggctggctggggctttagccaagccacctactgccaggaattggagcctcagttccctcctgtgtcaagtagctaactgcagcagctggactgagggcagagtctgtgggtgcagagaccctgcatgtaggtcacaggttgaggcccagccactctccctggggcctggtgggtaggcaagtagctctggggccacctcaagtgaccaaatgctattaatttccatcctttagcaggctgggccctaggcaggaagctggcttctgggagaggagtgagaacgtgcagggcctgcctagcttgcgtgcttgaggaaggtggcattccgtgcttgcctccttgaggagggtggcattctgtgtcttctgcttatgaagcgcctttcttaaagtttggcaataaatccatttttatggaacttca

SEQ ID NO: 218248 - DNA, 2390 bp, Artificial Sequence
  derived and/or modified sequence
agaacgcggagagtcgccgcctggccgggcgtagacgcggtggcagagcccgcgcggcgctggaagcgagtggcggagcggcgggacctcggcggactcgccatggaggaggagggtgtgaaggaagccggtgagaagcctcggggagcacagatggtggacaaggctggctggatcaagaagagcagtgggggcctcctgggtttctggaaagaccgatatctgctcctctgccaggcccagctgctggtctatgagaatgaggatgatcagaagtgtgtggagactgtggagctgggcagctatgagaagtgccaggaccttcgtgccctcctcaagcgaaaacaccgctttatcctgctgcgatccccagggaacaaggtcagcgacatcaaattccaggcacccaccggggaggagaaggaatcctggatcaaagccctcaatgaagggattaaccgaggcaaaaacaaggctttcgatgaggtaaaggtggacaagagctgcgccctggagcatgtgacacgggaccgggtgcgagggggccagcgacgccggccaccaacgagagtccacctgaaggaggtggccagtgcagcttctgacggtcttctgcgcctggatcttgatgttccggacagtgggccaccagtgtttgcccccagcaatcatgtcagtgaagcccaacctcgggagacaccccggcccctcatgcctcctaccaagcctttcctagcacctgagaccaccagcccctcctcccacctattctgagtagctgcagaggccttgggtccaggctctaggttcatccctcagttggggggaacgtaggacccagctggagcctcttgagggagatgagaggcctctttgtgaggaggacattagctgtgtggcctctctctctttggccctgtttccttttttgcaaaacaaggacattttctgcagccccttcctctcagtgagctatgattggagggcttaggtctggaggattcaagagtggaagaggaatttaaggggtcccctagtctagtctctgcccctggatagtgtccagccttgtatatttctgaagaggtggatcccagagtggctctgatgtccacattagaaaaacttacttgtaatgatcatgtcagccttcagaagagaatccccaccaacttctgtgcctcctcagatggggatttatctggatctctgtggttccttctcagccgaaacaggtccagtatcccagtcatttcttcaaatgctgataggggtatgttggaatccgaagccacttccccgccttcaagccccagatgggctgctctcctgtaactttctaggagaagagacattttcttctttccctttcctggtccatccctgcaccctggtcctctcccagcctctcccccacattgtccctgactctaggggcacatccagtctccatcgtgctgcagcagctggactgagggcagagcctgtaggtgcagaggccctggctcccgaggtccagccactctccctggggcctctggggtgagagcagcttccgataggacctgcccagatttctgcatgtgcacttttgtttactgaaagagagaaaggggggggtcacagcaacatgccctggcctttctgctctgttccccaaccccactgaggcctgctgcacaggtcaatgccttcgttatcgttattgtactgtcactttgttcttgaggtagtagtcaaggatcaggaggggcagatgtcttctctgggctgcgtggggccggagcagaggtgagcagcaatgcactggttcgggagcccccatcagcctccttgtgcaaactgggcccccatgccacagtctggctttccctccatctgccccaggacaagagcaagaaggacatcagttgcccagtcatgtgatcccctgccatcttgccttaggaacagccttcccccaccagcagccatggctggctggggctttagccaagccacctactgccaggaattggagcctcagttccctcctgtgtcaagtagctaactgcagcagctggactgagggcagagtctgtgggtgcagagaccctgcatgtaggtcacaggttgaggcccagccactctccctggggcctggtgggtaggcaagtagctctggggccacctcaagtgaccaaatgctattaatttccatcctttagcaggctgggccctaggcaggaagctggcttctgggagaggagtgagaacgtgcagggcctgcctagcttgcgtgcttgaggaaggtggcattccgtgcttgcctccttgaggagggtggcattctgtgtcttctgcttatgaagcgcctttcttaaagtttggcaataaatccatttttatgg

SEQ ID NO: 218249 - DNA, 1473 bp, Artificial Sequence
  derived and/or modified sequence
atggaggaggagggagtgaaggaagccggagaaaagccacggggtgcccagatggtagacaaggctggttggatcaagaagtccagcggcggactgctgggcttttggaaagatcggtacttgcttctgtgtcaggcccaactcctggtctatgaaaacgaggatgaccagaaatgcgtcgaaaccgtggagctaggcagctacgagaaatgccaggacctgcgcgctctcctgaaaaggaaacaccggttcatcctactcaggtcgccaggtaacaaagtctcggacattaagtttcaggcaccaacaggcgaggaaaaggagagctggatcaaggccctgaacgagggcattaatagaggtaaaaataaggcattcgatgaagtgaaggtggataaatcttgcgcacttgaacatgtgactcgtgatcgcgtgcgcggagggcaaaggcgccgaccccctactcgtgtgcatctaaaggaggtggcatccgctgcctctgatggactcctgcggctcgatcttgatgtccctgactctggacccccagtattcgcgccaagcaatcatgtgagcgaggcccaacccagagagacgcctcgtcctctgatgcctccaaccaagccatttctggcccctgagaccacaagccccggtgaccgagtcgagacccctgttggggagcgggctcccacaccggtctctgcatcttcggaggtatcaccagagagccaagaggactctgagacccctgcagaggaagactcagggtccgagcagccacctaacagcgtgttacccgataaactgaaagtgagttgggaaaacccctcccctcaggaggccccagccgcagagagcgcagagccttcccaggctccatgtagtgaaacatccgaagccgctccacgagaaggtggcaaacctcccacccctccaccgaagatcctgtccgaaaagctaaaagccagcatgggtgaaatgcaggcttcaggaccgccagctcctggcacagtccaagtcagcgttaacggtatggatgatagccccgaaccagccaaaccctcacaggcagaggggacgcctgggactccacctaaagacgccacaacatccacggctctgcctccttgggatctgcctccccagtttcatccaaggtgtagttctttgggggatctgctcggtgaaggccctagacaccctctgcaaccccgagaaagactttatcgggcacaactcgaagttaaggtggccagcgagcagaccgaaaagttattgaataaggtgttgggctcagagcctgccccagtatccgccgagaccctactctcacaggccgtagagcagctcagacaggctactcaagtattgcaggagatgcgggatttaggtgagttaagccaggaagctcccggactacgcgagaaacgtaaggaattggtgaccctgtaccgcaggtccgctccctag

SEQ ID NO: 218250 - DNA, 672 bp, Artificial Sequence
  derived and/or modified sequence
atggaggaagagggcgtgaaggaggctggcgaaaagcctagaggagcccagatggtcgataaggccggatggatcaagaagtccagtggcggactgttgggtttttggaaagataggtatctactattgtgccaggcacagttactggtgtacgagaatgaggacgatcagaaatgcgtggaaaccgtggagttaggcagctatgagaaatgccaggatctgcgagcactgctgaaaagaaaacatcgtttcattctcctacgctccccaggtaataaggtaagcgatataaagttccaggccccaacgggcgaggaaaaggaatcatggattaaggctctcaacgagggcatcaaccgtggtaaaaacaaggcctttgatgaggtcaaagtagataagtcatgtgccctggagcacgtaacgagagatagagttcggggtgggcaaaggaggcgcccacccaccagagttcacttaaaagaggtcgccagcgccgctagcgacggcctgttaagactggacttggatgtccccgattcgggacctcctgtgttcgctcctagcaatcatgtgagcgaggcccagccgagagaaacccctcgacctctgatgcccccaactaagccttttttggcccctgagacaacaagtccatcatcacaccttttctag

SEQ ID NO: 218251 - protein, 239 aa, Artificial Sequence
  derived and/or modified sequence
MASEELACKLERRLRREEAEESGPQLAPLGAPAPEPKPEPEPPARAPTASADAELSAQLSRRLDINEGAARPRRCRVFNPYTEFPEFSRRLIKDLESMFKLYDAGRDGFIDLMELKLMMEKLGAPQTHLGLKSMIKEVDEDFDGKLSFREFLLIFHKAAAGELQEDSGLMALAKLSEIDVALEGVKGAKNFFEAKVQALSSASKFEAELKAEQDERKREEEERRLRQAAFQKLKANFNT

SEQ ID NO: 218252 - protein, 127 aa, Artificial Sequence
  derived and/or modified sequence
MELKLMMEKLGAPQTHLGLKSMIKEVDEDFDGKLSFREFLLIFHKAAAGELQEDSGLMALAKLSEIDVALEGVKGAKNFFEAKVQALSSASKFEAELKAEQDERKREEEERRLRQAAFQKLKANFNT

SEQ ID NO: 218253 - protein, 142 aa, Artificial Sequence
  derived and/or modified sequence
MFKLYDAGRDGFIDLMELKLMMEKLGAPQTHLGLKSMIKEVDEDFDGKLSFREFLLIFHKAAAGELQEDSGLMALAKLSEIDVALEGVKGAKNFFEAKVQALSSASKFEAELKAEQDERKREEEERRLRQAAFQKLKANFNT

SEQ ID NO: 218254 - DNA, 720 bp, Artificial Sequence
  derived and/or modified sequence
atggcatctgaagagctggcgtgtaagttggagcgcaggttgcgaagagaagaggctgaggagagtggcccccagctggcccctctcggcgccccagcacctgagcccaagcctgaacctgagccacctgctcgggcaccgacagcctctgcagacgcggaactgagcgcacagctttctagaaggttggatattaatgagggcgctgcacggccgagaagatgtagagtgttcaacccctatacggagtttccagagttctcaaggcgtcttatcaaagacttagagtcgatgttcaaactctatgacgcgggacgagacggatttattgacctgatggagcttaaactgatgatggaaaaattgggtgcaccgcaaacacacctcgggttgaagagcatgattaaagaggttgacgaagatttcgacggcaagctgtcatttcgggaatttctgctgatattccataaagccgcagcaggcgagctccaagaagattccgggctaatggccctggcgaagcttagtgaaatcgatgttgctctagagggggtaaaaggcgctaagaatttttttgaggccaaggttcaagcactgtcctcggcctctaagtttgaagcggagctgaaggccgagcaagatgagcgcaaacgtgaggaggaagagaggcgcttacgccaggccgccttccaaaagctgaaagctaactttaatacatag

SEQ ID NO: 218255 - DNA, 429 bp, Artificial Sequence
  derived and/or modified sequence
atgtttaaattatacgacgctggtcgcgacggttttatcgatctgatggagctcaagctgatgatggagaaactgggagcccctcagactcatctaggcctcaaatctatgattaaagaagtggacgaggacttcgatgggaaactctcctttcgcgaattcctgttaatctttcacaaggctgcagctggggagctgcaagaggatagtgggctcatggcactggctaaattgtctgaaatcgacgtggcactagagggcgtgaaaggcgctaaaaactttttcgaggcgaaagtccaggcattgtcctccgcctctaagtttgaagccgagttgaaggcagaacaggacgaaagaaaacgtgaggaggaggagcggcgcctacgacaggccgcatttcagaagctgaaagcaaactttaatacttag

SEQ ID NO: 218256 - DNA, 720 bp, Artificial Sequence
  derived and/or modified sequence
atggccagcgaggagctggcctgcaagctggagcggcggctgcggcgggaggaggccgaggagagcggcccccagctggcccccctgggcgccccagcccctgagcccaagccagagcctgagcccccagcccgggcccccacagccagcgcagatgctgagctgagcgcccagctgagccggcggctggacatcaatgaaggagctgcccggccccggcgctgcagggtcttcaacccctacacagagttccctgagttcagcagaagactcatcaaggacctggagagcatgttcaagctgtatgatgctggaagagatggcttcatcgacctgatggagctgaagctgatgatggagaagctgggcgccccccagacccacctgggcctgaagtccatgatcaaggaggtggatgaggactttgatggcaagctgtccttccgggagttcctgctgatcttccacaaggctgctgctggggagctgcaggaggacagcggcctgatggccctggccaagctgtctgaaattgatgtggccctggagggcgtgaagggggccaagaacttctttgaggccaaggtgcaggccctgagcagcgccagcaagtttgaagctgagctgaaggccgagcaggatgagaggaagcgggaggaggaggagcggcggctgcggcaggccgccttccagaagctgaaggccaacttcaacacctag

SEQ ID NO: 218257 - DNA, 429 bp, Artificial Sequence
  derived and/or modified sequence
atgttcaagctgtatgatgctggaagagatggcttcatcgacctgatggagctgaagctgatgatggagaagctgggcgccccccagacccacctgggcctgaagtccatgatcaaggaggtggatgaagattttgatggcaagctgtccttccgggagttcctgctgatcttccacaaggctgctgctggggagctgcaggaggacagcggcctgatggccctggccaagctgtctgaaattgatgtggccctggagggcgtgaagggggccaagaacttctttgaggccaaggtgcaggccctgagcagcgccagcaagtttgaggccgagctgaaggccgagcaggatgagaggaagcgggaggaggaggagcggcggctgcggcaggccgccttccagaagctgaaggccaacttcaacacctag

SEQ ID NO: 218258 - DNA, 720 bp, Artificial Sequence
  derived and/or modified sequence
atggccagcgaggagctggcctgcaagctggagcggcggctgcggagggaggaagccgaggagagcgggccccaattagctccgctcggtgcccccgcgcccgagcccaagcctgaaccagagcctcctgccagggcacccactgcatccgccgacgcagagctctcagctcagctgtccaggaggctagacatcaacgagggggccgcaaggccgaggagatgtcgggtcttcaacccttatactgagttcccagagtttagtaggcgtctgatcaaggatctcgaatccatgttcaagctgtacgatgcaggaagagacgggttcattgacctaatggagctgaaactcatgatggagaagctcggcgctcctcagacgcacctcggtcttaagtcaatgataaaggaagtcgacgaggatttcgatgggaagttaagcttccgcgagttcctattgatcttccataaagcagcggctggagaacttcaggaagattcagggctgatggctctggccaaattgtctgagatagatgtcgcccttgagggtgtaaagggcgccaaaaattttttcgaagccaaggtccaggccctgagcagtgcgtccaaattcgaagccgaactgaaggctgagcaagacgaacgcaagcgggaggaagaagagcggcgcctcaggcaggcagcgttccaaaagctgaaagcaaactttaacacctag

SEQ ID NO: 218259 - DNA, 429 bp, Artificial Sequence
  derived and/or modified sequence
atgttcaagctgtacgacgccggccgggacggcttcatcgacctgatggagcttaaattgatgatggagaaattgggtgccccccagacacacttgggactgaagtctatgattaaagaggttgacgaagactttgatggaaaattgagctttagggagtttctcctgatttttcacaaggctgccgcgggggaactgcaggaagacagcgggttgatggccctcgctaaactctccgagatcgacgtagcattggagggtgtgaagggggccaagaatttcttcgaagctaaggtccaggcactgtcttcagcaagcaaattcgaggcagagctgaaagctgaacaagacgagaggaagcgcgaggaagaggagagaagattgcggcaagctgcatttcagaaattaaaggcaaattttaacacttag

SEQ ID NO: 218260 - DNA, 720 bp, Artificial Sequence
  derived and/or modified sequence
atggcgtccgaggagctggcctgcaaactggagagacggctacgtagagaggaagctgaggaaagtggtccccagttggcccctctcggcgcacccgctccggaacctaagccagagccagaaccccctgcaagagcccctaccgctagcgccgatgcagaactcagcgcacaactctcgcgccgactggacatcaatgagggcgctgccagaccccgacgctgtagggtgtttaacccatatacggagttccccgaattcagccggagactcataaaggatctggagagtatgttcaaactgtatgacgccggacgagacggattcatagacctgatggagctcaagctcatgatggaaaaattgggagccccacaaacccatctcggtctgaaaagcatgattaaagaggtcgatgaggactttgatgggaagttaagcttccgcgaatttctactgatttttcataaggccgctgctggagagctgcaggaggattcaggtctcatggccctcgctaaattaagcgaaatcgacgttgcactggaaggagtgaaaggggctaagaatttctttgaggctaaggtccaggccctgtcaagcgcctctaagttcgaagcggagctaaaagccgagcaggacgagcgaaagcgggaggaagaggaacgcaggctgagacaggccgcttttcagaagctgaaggccaacttcaacacatag

SEQ ID NO: 218261 - DNA, 429 bp, Artificial Sequence
  derived and/or modified sequence
atgttcaaattgtacgacgcagggcgagatggattcatcgacctcatggaactcaagctgatgatggagaaattaggagcaccccagacacacctcggccttaaaagcatgatcaaagaagtcgacgaagacttcgacgggaagctgagctttcgtgaatttctcctaatttttcacaaagccgctgctggagagctgcaggaagatagtgggctgatggccctggcaaagctttccgaaattgatgtcgccctcgaaggcgtgaagggtgccaagaacttcttcgaagccaaagtccaggctctgtccagtgctagtaaattcgaggccgaacttaaggccgaacaggatgagcggaagcgcgaggaagaggagcggaggctgcggcaggcggcatttcagaagctcaaggctaatttcaatacttag

SEQ ID NO: 218262 - DNA, 720 bp, Artificial Sequence
  derived and/or modified sequence
atggccagcgaggagctggcctgcaagctggagagaagactgagaagagaggaggccgaggagagcggcccccagctggcccccctgggcgcccccgcccccgagcccaagcccgagcccgagccccccgccagagcccccaccgccagcgccgacgccgagctgagcgcccagctgagcagaagactggacatcaacgagggcgccgccagacccagaagatgcagagtgttcaacccctacaccgagttccccgagttcagcagaagactgatcaaggacctggagagcatgttcaagctgtacgacgccggcagagacggcttcatcgacctgatggagctgaagctgatgatggagaagctgggcgccccccagacccacctgggcctgaagagcatgatcaaggaggtggacgaggacttcgacggcaagctgagcttcagagagttcctgctgatcttccacaaggccgccgccggcgagctgcaggaggacagcggcctgatggccctggccaagctgagcgagatcgacgtggccctggagggcgtgaagggcgccaagaacttcttcgaggccaaggtgcaggccctgagcagcgccagcaagttcgaggccgagctgaaggccgagcaggacgagagaaagagagaggaggaggagagaagactgagacaggccgccttccagaagctgaaggccaacttcaacacctag

SEQ ID NO: 218263 - DNA, 429 bp, Artificial Sequence
  derived and/or modified sequence
atgttcaagctgtacgacgccggcagagacggcttcatcgacctgatggagctgaagctgatgatggagaagctgggcgccccccagacccacctgggcctgaagagcatgatcaaggaggtggacgaggacttcgacggcaagctgagcttcagagagttcctgctgatcttccacaaggccgccgccggcgagctgcaggaggacagcggcctgatggccctggccaagctgagcgagatcgacgtggccctggagggcgtgaagggcgccaagaacttcttcgaggccaaggtgcaggccctgagcagcgccagcaagttcgaggccgagctgaaggccgagcaggacgagagaaagagagaggaggaggagagaagactgagacaggccgccttccagaagctgaaggccaacttcaacacctag

SEQ ID NO: 218264 - DNA, 2259 bp, Artificial Sequence
  derived and/or modified sequence
cccagcctgtcccgggccgcgagcgcttccagtcgggttacttctgggggacaagaaaggcaccgtctgaacggtcgagacgctttttcccgctacggttttccccggagctgacaggggcagcaaggtcggagttgatccgagggtccctgcctggtcccggggggacggtcagcctcccgcccggagccgcggggagaggaagcaggtcggggtctccgggacgcgcagacacccagacaccggcggcctcctcccaccaggctggcagtcgctgagccctggcgcctccttaaagccgcagctccgccccgaccgccccgcccgccagtccgtcctcagaccctcccaaccgccgggtccccgccgcctcggcggagtgttgtagagcctcgagcctgcgaggagcgcgccgcccgccagctccctgcgtcccgtcccgcgtccccgcgttcccgcgtcctgcgatccgccgccatggccagtgaggagctggcgtgcaagctggagcgccggctgcggcgcgaggaggccgaggagagtggcccccagctggctcccctcggcgccccagccccggagcccaagcccgagcccgagcctcccgcccgtgcgcccacggccagcgccgacgcggagctgagcgcccagctgagccggcggctggacatcaacgagggcgctgcgcggccccggcgctgcagggtcttcaacccctacacggagttcccggagttcagccgccgcctcatcaaggacctggagagcatgttcaaactgtatgacgctgggcgggatggcttcatcgacctgatggagctgaagctgatgatggagaagctgggggccccccagacccacctgggcctgaagagcatgatcaaggaggtggatgaggacttcgatggcaagctcagcttccgggagttcctgctcattttccacaaggccgcggcaggggagctgcaggaggacagtgggctgatggcgctggcaaagctttctgagatcgatgtggccctggagggtgtcaaaggtgccaagaacttctttgaagccaaggtccaagccttgtcatcggccagtaagtttgaagcagagttgaaagctgagcaagatgagcggaagcgggaggaggaggagaggcggctccgccaggcagccttccagaaactcaaggccaacttcaatacatagtcctgctgaccttgccctctgcccacagctgtgcctcacagatgccccgagaagagatgactaggcatcttcatcactgctgtcggtcccctccctgagccagcatctccatccaccaccccgtgccagctcccgtgccagccttcattcctcccagtgtccaagcccctccaggagggtcctggggtgggccagatgcctgcccacctctgtctcctgcctctgctcctctgcccttcttatagccagaacttgtatcttctcagcaaccttcactttgtccttgtccctttaccattccccatcaaagagtagtctgctatatcaatttgtgtagatatgtctgtctttttgggtcctcagagaaaatgcccattttctcggagaattctctgcactcctctctgcttcacattcaacttccctgttctcatctttggtaggattctgccagttgcttttgcatcttctgttcctgggtaatggtgggtcttaatggaggctgggtggaccactgcccgtccactcttcaacaggaggaacagcatgccaccatagtaacacacattagagaaaggacagaggtctgctccttcctgccacctttctcctggccccttagcattcccccagtccctccctcttcaccttgctccgtctatgtcttcccagctcagccttttccccactcttaaatactgtactacttcactgtaagaacgaaagaatagttaggataccaatgagtaaaagggttcctgttcactctgactctgtgcaaattgtattacagtagaccgctgacgttcccaagtgacagatccagggcctttcaaacatccccaaagtcatggccatactcaccattagccagtttctaacatctgtttcagggtatccagctgtagatgttcttatcccccatacttgtgagttcttggggttgctcacaaatactaggggtttttgttgtatttttaacaaatatatcctaatgtcatatttattctcttttgtaactgctgtctttacaataaagaaatcatctgcctttctatctta

SEQ ID NO: 218265 - DNA, 1003 bp, Artificial Sequence
  derived and/or modified sequence
acttctgggggacaagaaaggcaccgtctgaacggtcgagacgctttttcccgctacggttttccccggagctgacaggggcagcaaggtcggagttgatccgagggtccctgcctggtcccggggggacggtcagcctcccgcccggagccgcggggagaggaagcaggtcggggtctccgggacgcgcagacacccagacaccggcggcctcctcccaccaggctggcagtcgctgagccctggcgcctccttaaagccgcagctccgccccgaccgccccgcccgccagtccgtcctcagaccctcccaaccgccgggtccccgccgcctcggcggagtgttgtagagcctcgagcctgcgaggagcgcgccgcccgccagctccctgcgtcccgtcccgcgtccccgcgttcccgcgtcctgcgatccgccgcctcatcaaggacctggagagcatgttcaaactgtatgacgctgggcgggatggcttcatcgacctgatggagctgaagctgatgatggagaagctgggggccccccagacccacctgggcctgaagagcatgatcaaggaggtggatgaggacttcgatggcaagctcagcttccgggagttcctgctcattttccacaaggccgcggcaggggagctgcaggaggacagtgggctgatggcgctggcaaagctttctgagatcgatgtggccctggagggtgtcaaaggtgccaagaacttctttgaagccaaggtccaagccttgtcatcggccagtaagtttgaagcagagttgaaagctgagcaagatgagcggaagcgggaggaggaggagaggcggctccgccaggcagccttccagaaactcaaggccaacttcaatacatagtcctgctgaccttgccctctgcccacagctgtgcctcacagatgccccgagaagagatgactaggcatcttcatcactgctgtcggtcccctccctgagccagcatctccatccac

SEQ ID NO: 218266 - DNA, 1131 bp, Artificial Sequence
  derived and/or modified sequence
atggacggcgaggagcagcagcccccccacgaggccaacgtggagcccgtggtgcccagcgaggccagcgagcccgtgcccagagtgctgagcggcgacccccagaacctgagcgacgtggacgccttcaacctgctgctggagatgaagctgaagagaagaagacagagacccaacctgcccagaaccgtgacccagctggtggccgaggacggcagcagagtgtacgtggtgggcaccgcccacttcagcgacgacagcaagagagacgtggtgaagaccatcagagaggtgcagcccgacgtggtggtggtggagctgtgccagtacagagtgagcatgctgaagatggacgagagcaccctgctgagagaggcccaggagctgagcctggagaagctgcagcaggccgtgagacagaacggcctgatgagcggcctgatgcagatgctgctgctgaaggtgagcgcccacatcaccgagcagctgggcatggcccccggcggcgagttcagagaggccttcaaggaggccagcaaggtgcccttctgcaagttccacctgggcgacagacccatccccgtgaccttcaagagagccatcgccgccctgagcttctggcagaaggtgagactggcctggggcctgtgcttcctgagcgaccccatcagcaaggacgacgtggagagatgcaagcagaaggacctgctggagcagatgatggccgagatgatcggcgagttccccgacctgcacagaaccatcgtgagcgagagagacgtgtacctgacctacatgctgagacaggccgccagaagactggagctgcccagagccagcgacgccgagcccagaaagtgcgtgcccagcgtggtggtgggcgtggtgggcatgggccacgtgcccggcatcgagaagaactggagcaccgacctgaacatccaggagatcatgaccgtgcccccccccagcgtgagcggcagagtgagcagactggccgtgaaggccgccttcttcggcctgctgggctacagcctgtactggatgggcagaagaaccgccagcctggtgctgagcctgcccgccgcccagtactgcctgcagagagtgaccgaggccagacacaagtag

SEQ ID NO: 218267 - DNA, 1131 bp, Artificial Sequence
  derived and/or modified sequence
atggatggggaggagcaacagccgccgcacgaggctaatgtcgaaccagtggtaccttctgaagccagtgagcctgtcccccgagtcttaagcggggatccacagaatttatccgacgtggacgccttcaacctgctgctggagatgaagttgaagagacggaggcaaagacctaatctacccaggaccgtaactcaacttgtcgcggaggacggttctcgcgtgtatgtggtcgggacggcccactttagcgacgattcaaaaagagacgtcgtgaaaactattcgcgaggttcagcctgatgtggttgtggtcgagttgtgtcagtacagggtatctatgcttaagatggacgagtccacactcctgagggaagcccaggagctgagcctcgaaaagctgcagcaagccgtcagacagaacggcctaatgtccggcctcatgcagatgcttttgctgaaggtgagcgcacacattacggagcagctagggatggcaccaggcggggaattccgcgaagctttcaaagaagcctcaaaggtgccattctgcaaatttcacctaggtgatcgtccaattcctgtcacatttaagcgcgcgattgctgccctcagcttctggcaaaaggttcgcctagcctggggactctgcttcctctccgatcccatttctaaggacgatgtggagcgctgtaaacagaaggatctcctcgaacagatgatggccgaaatgataggagagtttccagacctccaccgaacaatcgtcagtgagagagacgtttatctgacttacatgctaaggcaagctgcccgccgcctggagctcccgcgggcgtccgatgcagaaccccgtaagtgcgtccccagtgtggtagtgggtgtggtaggtatgggccatgtgcccggaatagagaagaattggtcgaccgatttaaacatccaggagattatgacggtgccgccaccttccgtctcaggacgcgtcagcagattggccgtgaaagcagccttcttcggactcctcgggtatagtttgtactggatgggtagacgcacagccagcctggtcttatctctgcccgctgcccaatactgtctgcaacgggtcaccgaggctcggcacaagtag

SEQ ID NO: 218268 - DNA, 1131 bp, Artificial Sequence
  derived and/or modified sequence
atggacggggaggagcaacaacctcctcacgaagcaaacgtggaaccagtagtaccctctgaagctagcgaacctgtgccacgagtcctgtcaggtgatccccagaatctcagcgatgtggatgcctttaacctcctgttggagatgaagttgaagcggagacggcagcggcccaatctgccacggactgtaacccagcttgtggctgaggacggcagtagggtgtatgtcgtggggaccgcccacttctctgacgacagcaagcgcgacgtggtcaagaccatacgggaagtgcagcccgatgtggtggtggtggaactttgccagtacagagtgtctatgttgaagatggatgagagtacccttctgagagaagcccaggaactctcactggagaagctgcagcaggcggtgaggcagaacggccttatgtcggggctgatgcagatgcttctcctaaaggtctcggcgcacataacagaacagctgggaatggcacctgggggggagttcagggaggcttttaaggaggctagtaaggtgcccttctgtaaattccacctgggggatcgaccaattccagttacatttaaacgtgcgattgcagccctgtcattctggcagaaggtgagactagcctggggcctgtgcttcctctctgacccgattagcaaagatgacgtcgagcgatgtaagcagaaagacctgctcgaacagatgatggccgaaatgatcggcgagttccctgaccttcaccgcaccatcgtctcagaacgcgacgtttatctcacatatatgctgaggcaagctgccaggcggttagaactgcctcgtgcctctgatgctgagcctcgaaaatgcgtgccctcagtggttgtaggggtggtgggtatggggcacgtgccagggatcgaaaaaaattggtccacagacttgaatattcaggaaatcatgaccgtaccccccccctcagtgagcggacgtgtgtctcgcctggctgtcaaggccgcatttttcggtttactcggttattccttgtattggatggggagacgaacagcgagtttagtactctccctgcctgcagcccagtattgcctgcagcgggtgacagaagcccggcataaatag

SEQ ID NO: 218269 - DNA, 1131 bp, Artificial Sequence
  derived and/or modified sequence
atggatggagaggagcagcagcccccccacgaggcgaacgtggaaccggttgtccctagcgaggccagcgaacccgtcccacgggtgctttcaggggatccacagaatctgtccgatgtggatgccttcaacttattattggagatgaagcttaagagacgccgccagcgcccaaacctgccacgcacagtaacacaactcgtggccgaagatggaagcagggtctatgtggtgggaacagcccacttctcagacgactcaaaacgtgacgtggtgaagacaattcgggaagtgcagccagatgtcgtggtggttgaactgtgtcagtaccgtgtgagtatgttgaaaatggatgagagcactctcctgagagaagcccaggagctgtcattggagaaattacagcaagctgtgcgacaaaacggattgatgagcggtttgatgcagatgttgctcctgaaggtaagcgcgcatattacagaacaactgggtatggcaccaggaggagagtttagagaggcctttaaggaagcgtccaaggtgcccttctgcaaattccatcttggggatcggccgataccggtcacgtttaaacgtgccatcgccgcactatcattctggcagaaggtgcgcttggcctggggcctgtgcttcttgagcgatcctatctccaaggacgatgtggaaaggtgtaagcagaaagatctacttgagcagatgatggccgagatgatcggggaattcccagaccttcataggaccatcgtgtctgaaagggatgtttatctgacatacatgctaagacaagctgcaaggcgcctcgagctgccgcgcgccagtgacgcggaaccccgcaaatgtgtcccttccgtagtggtgggcgttgtaggcatgggccatgtcccagggattgagaagaactggagtaccgacctcaatatccaggaaattatgactgtaccacctccttccgtgtctggcagggtttcccgtctggctgtgaaggcagctttcttcggtctcctcgggtattctctgtactggatgggtcggcggacggcaagcctcgtgctgtcactacctgctgcccagtactgtctgcaaagagttaccgaagcaagacacaaatag

SEQ ID NO: 218270 - DNA, 1131 bp, Artificial Sequence
  derived and/or modified sequence
atggatggagaggagcagcagccccctcatgaggccaacgtggagcctgtggtgcccagcgaggccagcgagcctgtgccccgggtgctgagcggggacccccagaacctgagtgatgtggatgccttcaacctgctgctggagatgaagctgaagagaagacggcagaggcccaacctgcccaggacagtgacccagctggtggccgaggatggcagccgggtgtatgtggtgggcacagcccacttcagtgatgacagcaagagagatgtggtgaagaccatccgggaggtgcagccagatgtggtggtggtggagctgtgccagtacagagtgtccatgctgaagatggatgagagcaccctgctgcgggaggcccaggagctgagcctggagaagctgcagcaggccgtgcggcagaatggcctgatgagcggcctgatgcagatgctgctgctgaaggtgtctgcccacatcacagagcagctgggcatggcccctggaggagagttccgggaggccttcaaggaggccagcaaggtgcccttctgcaagttccacctgggggaccggcccatccctgtgaccttcaagagggccatcgccgccctgtccttctggcagaaggtgcggctggcctggggcctgtgcttcctgagtgaccccatcagcaaggatgatgtggagcgctgcaagcagaaggacctgctggagcagatgatggccgagatgattggagagttcccagacctgcacaggaccatcgtgtctgaaagagatgtgtacctgacctacatgctgcggcaggccgcccggcggctggagctgccccgggccagtgatgctgagcccaggaaatgtgtgcccagcgtggtggtgggcgtggtgggcatgggccacgtgcccggcatcgagaagaactggagcacagacctgaacatccaggagatcatgacagtgcccccacccagcgtgtctggccgggtgtcccggctggccgtgaaggccgccttcttcggcctgctgggctacagcctgtactggatgggcagaagaacagccagcctggtgctgagcctgcctgctgcccagtactgcctgcagagggtgacagaggcccggcacaagtag

SEQ ID NO: 218271 - DNA, 1131 bp, Artificial Sequence
  derived and/or modified sequence
atggacggcgaggagcagcagcccccccacgaggccaacgtggagcccgtggtgcccagtgaggcctccgagcccgtaccccgcgtattatccggagatcctcagaatttgtctgatgttgatgctttcaatcttttacttgagatgaagctgaaacgacgcaggcagagacctaacctgccccggactgtcacacagctggtggccgaggacggatccagagtctacgtcgtcggcaccgcccacttctctgacgactccaagcgtgacgtggtgaaaactatcagggaagtgcagcccgacgtggttgtcgtggagctatgccagtatcgagtctccatgctgaaaatggatgagagcacccttttgcgggaagctcaggaattgtcactcgaaaagctccagcaggccgttcggcagaatggactgatgtccggactcatgcaaatgctgcttctgaaggtttcagctcatattactgagcagcttgggatggcacctggcggagaatttcgggaagcgttcaaggaagcctccaaggtccctttttgtaagtttcacctaggggaccgtcccattcccgtgacattcaagagagccatcgccgccctgagcttctggcagaaggtccggctagcctggggcctttgctttctttcagatcctatctcgaaagatgatgtcgagcgctgcaaacaaaaagatctcctggaacaaatgatggccgagatgattggcgagttccccgatctgcaccgcactatcgtttcagagcgagacgtgtatttgacatacatgctccgacaagccgcacgtcggctggagttaccccgcgctagcgacgctgagccccgcaagtgtgttccatcagtggttgtgggggtggtgggcatgggccatgtgccaggaatagagaagaactggtctaccgatctgaacattcaagagattatgacagtgccccctcctagtgtgtctggccgggtaagtagactcgctgtgaaggctgcttttttcggtctcctgggttatagcctctattggatgggtagaaggactgcttcactggttctgtcgctgcctgcagctcagtactgcctgcaacgagtaactgaggccagacataaatag

SEQ ID NO: 218272 - DNA, 1131 bp, Artificial Sequence
  derived and/or modified sequence
atggacggcgaggagcagcagcccccccacgaggccaacgtggagccggtggtacctagcgaggctagtgagccggttccacgggtgctatccggcgacccccagaatctgtctgatgtcgacgcctttaacctactgttagagatgaagctgaagcgacgaaggcagaggcctaacctgccccgaacagtcacgcagttagtggctgaagacgggtcacgagtctatgtggtcgggactgctcattttagcgatgatagcaagcgcgacgtcgttaagacaatacgggaggttcagcccgatgtcgttgtcgtggagctgtgccagtatcgcgtcagtatgttgaagatggatgagagtacattgctgcgagaggcccaggagctgagtctcgagaagctgcagcaggcggtcagacagaatgggcttatgagcgggctcatgcaaatgctgctgctgaaagtctcagctcatatcactgagcagcttgggatggcccccggcggcgaattcagagaggcttttaaggaggcctctaaggtccctttctgcaaatttcacttgggtgatcgaccgatccctgttacatttaaaagggcaatcgccgcgctgagcttttggcagaaggtgcgactggcttggggactatgcttcctgagtgaccctattagtaaggatgatgttgagcgatgtaagcagaaggatctgttagaacagatgatggcagaaatgattggcgaattcccagacttgcatcgtaccatcgtgtcagaaagagatgtttatctgacttatatgttgcgccaggccgctagaagactggaattgcctcgggcgtcagacgcagagcctaggaagtgcgtgccctccgttgtcgtaggggtggttgggatggggcatgtacccgggatagaaaagaattggagcacagacctgaatatacaggaaattatgacagtgccacccccgtccgtatccggaagagtaagcaggctcgccgtgaaagccgctttcttcgggttactgggatacagtttgtattggatggggaggaggacagcgtcactagtgctgagcctccccgccgcacagtactgcctccaaagagttactgaagccaggcataagtag

SEQ ID NO: 218273 - DNA, 1131 bp, Artificial Sequence
  derived and/or modified sequence
atggacggcgaggagcagcagcccccccacgaggccaacgtggagcccgttgtgccctctgaagcttcagagcctgtcccaagggtgctgagcggcgatcctcagaatctgtccgacgtcgacgcgttcaacctgctcctggaaatgaagctcaagcggcgccggcagcgacctaatctgcctaggacagtgacccagctggttgctgaggatggatcacgagtgtatgtggtgggtactgcccatttttccgatgactcaaagcgcgacgtggttaagacaattcgagaagtacagccagatgtcgtggtggtggaactttgccaatacagagtctctatgttgaaaatggatgagtcaacactgcttcgcgaagctcaagaattgtcgctggagaagctccaacaggcggtgcgacaaaacggattgatgagtggtctaatgcagatgctgctgctaaaagtcagtgcgcacataactgagcagctgggtatggccccggggggagaattccgcgaagccttcaaagaagccagcaaggtccccttttgcaaattccacctaggggatagacccatccccgtgaccttcaagagggctattgcggctctctcattctggcagaaagtgcgcctagcttggggactgtgttttctatcggatcccatctccaaagatgatgtggagagatgcaaacagaaggacctccttgagcaaatgatggcagagatgataggagagtttcccgatttgcatagaacaatcgtttcagagagggacgtttacttgacatacatgttaaggcaagctgctcggcggttagaactgcccagagcctctgatgctgaacctcggaagtgcgtcccctctgtcgtagtcggtgtggtgggcatgggacatgtacctggtatagagaaaaactggtcaactgatttaaacatccaagaaataatgactgtccctccaccatcagttagcggtagagtgtcacggctcgccgttaaggccgcattctttggcctgttagggtacagcctctattggatgggtaggagaacagcttccctggtactgtccctacctgccgcccaatactgtttgcagcgggtcaccgaggctcggcacaaatag

SEQ ID NO: 218274 - DNA, 1131 bp, Artificial Sequence
  derived and/or modified sequence
atggacggggaagaacagcagccccctcatgaggctaacgtcgagccagtagtgccaagcgaggctagtgagcccgtgcctcgggtgctatcaggagatcctcaaaatttgagtgatgttgacgcattcaacctactgctggaaatgaagttgaagaggcggaggcagcggccaaacctgccgagaactgtgacccagctagttgccgaggatgggagccgagtgtacgtagttggaacagctcacttttctgatgacagcaaacgcgacgtggttaagaccattcgcgaggtacaacctgatgtagtagtggtggaactgtgtcagtacagagtttcaatgctaaaaatggacgagagtaccttacttagggaggcccaggaactgtctcttgagaaactgcagcaagccgtgcggcagaatggccttatgagcgggctcatgcagatgctcctactaaaagtgtccgctcatattactgagcaactcgggatggcccctggcggtgagtttcgcgaggcctttaaagaagcctccaaggtgcctttctgcaagttccacctcggggatcggcctattccagtcacatttaagcgggctatcgccgctttgagcttttggcagaaagtgcggcttgcgtggggactgtgtttcctaagcgaccccatctccaaggacgacgttgagagatgtaagcagaaagacctcctggaacagatgatggctgagatgatcggtgagtttccggacctgcatcggacaattgttagcgagagggatgtctacttgacgtatatgctcagacaggctgcgaggagactagaactgcccagagcgagtgatgcagaaccacgcaagtgcgtcccttcagtcgtggtcggcgtcgtagggatgggccacgtacccggaatcgaaaagaactggtctaccgacttaaatatccaggaaattatgaccgtccctcctcccagtgtgagtggcagagtgagtcggctggccgtcaaggcggcttttttcggactgcttgggtacagtctgtactggatgggacgccgaactgcttcactggtcctatctctgccagcggcacagtactgcctgcagagggtcaccgaggctcgacataagtag

SEQ ID NO: 218275 - DNA, 1131 bp, Artificial Sequence
  derived and/or modified sequence
atggacggcgaagaacagcagcctccccacgaagcaaacgtggaacctgtggtgccttctgaggcctccgaacctgtgcctagggtgctgtcgggggatccccagaacttgagtgacgtggacgcttttaacctgctgttagaaatgaagctgaagcgcagaaggcagcgccctaatttgcccagaactgtgacgcagttagtagcggaagacggctcgagagtttatgtcgtaggcacagcgcatttctcagacgacagtaagcgtgacgttgtcaaaacgatacgagaagtacaacctgacgtcgttgtcgtggagctgtgtcagtatcgtgtcagcatgctaaagatggacgagtctactctactgcgggaagcacaagagctctcactggagaagctacagcaggccgttcggcagaacggcctgatgagcggactaatgcagatgttattgctgaaggtgagcgcccacatcacggaacagctcgggatggccccagggggagagttccgggaggcatttaaggaggcttcaaaagtccccttttgtaagtttcacctgggcgatcggcctattccagtgactttcaagagggctatcgctgccttgtccttctggcagaaggtaaggttggcatgggggctgtgtttcctctccgatcccatttccaaagatgacgttgagcgctgcaagcagaaagacctgctggagcagatgatggcagagatgatcggcgagttccccgatcttcacaggactatcgtgtcggaacgggatgtctatctaacttacatgctgcgacaagctgcacgacgccttgagctgccgagggcctctgatgctgagcctagaaagtgtgtcccttccgtggtcgtgggcgtggtaggtatgggccatgtgccgggaatcgagaagaactggtccacagatttaaatatccaagagatcatgacagtccctcctccgtccgtttccggcagggtatcacggctggctgtcaaggccgcatttttcggtctgcttggatatagcctgtattggatgggcagacggacagccagcttggtactgagcctgcctgcggctcagtactgccttcagagagtgacagaggcacgccacaagtag

SEQ ID NO: 218276 - DNA, 1131 bp, Artificial Sequence
  derived and/or modified sequence
atggatggcgaagagcagcagcctccccacgaggccaacgtagaacccgtggtgccctctgaagcttcagaacctgtccccagagttctctccggcgatccacagaacttgtcggacgttgacgcatttaacctgttgttagaaatgaagttgaagaggcgacggcagcgtccaaacctgccgaggaccgttacacagctggtagcagaagacggttctcgcgtctatgtcgtgggaacagcccacttctctgacgatagcaaaagagacgtggtaaagacaatacgtgaagtgcagcccgacgtggtagtggtggagttgtgtcagtaccgagtgagcatgttgaaaatggatgagagcactctcctgagagaggctcaggaactgagcctagaaaagctgcaacaggcagtccgccagaacggtttgatgtcaggtctgatgcaaatgctcctgcttaaggtgagcgcccatatcacagagcagctgggcatggctccaggcggagaatttagggaggctttcaaagaggcttccaaagtgcctttttgcaagtttcatttaggcgaccgccctattccagtgacatttaagagggcgatcgctgctctgtccttttggcagaaagtaaggctggcctggggcctgtgctttctcagcgaccccatctctaaagacgatgttgagaggtgtaaacagaaggacttactggaacagatgatggctgagatgatcggagagtttcctgatctgcaccgaaccatcgtgagtgagagagacgtctacttaacctacatgctgcgacaggcagccagaagactcgagcttcctcgggcttctgacgccgaaccgagaaaatgtgtgcccagcgtggtcgtaggcgttgtaggaatgggtcacgttcccggtatcgaaaaaaactggtccacagatcttaacatccaggagattatgaccgtgcccccacccagcgtatcaggtcgcgtaagtcgtctagcggttaaggccgcatttttcggcctgttaggttacagtctgtactggatggggaggcgaaccgcgagcctggtcttgagccttcccgctgcccagtactgcttgcaacgtgtaaccgaggccaggcataaatag

SEQ ID NO: 218277 - protein, 178 aa, Artificial Sequence
  derived and/or modified sequence
MAAPLGGMFSGQPPGPPQAPPGLPGQASLLQAAPGAPRPSSSTLVDELESSFEACFASLVSQDYVNGTDQEEIRTGVDQCIQKFLDIARQTECFFLQKRLQLSVQKPEQVIKEDVSELRNELQRKDALVQKHLTKLRHWQQVLEDINVQHKKPADIPQGSLAYLEQASANIPAPLKPT

SEQ ID NO: 218278 - DNA, 537 bp, Artificial Sequence
  derived and/or modified sequence
atggctgcaccactcggtggcatgttttcgggccaacccccagggcccccgcaggcccccccgggccttcctggccaggcttcattactgcaggccgcacctggggcaccaaggccttcatcgagcactcttgtggacgaactggagtccagtttcgaagcttgctttgcaagcctagtgagccaggattacgtgaatggcacggaccaggaggaaattcgcaccggagtggaccaatgcattcagaaattcctggacatcgccaggcagactgaatgtttctttctgcaaaagcggcttcagctttcggtccaaaagcccgaacaggttatcaaagaagacgtcagcgaactccgcaatgaattgcagagaaaagatgctcttgtgcaaaaacaccttacaaagctcaggcactggcagcaggtactggaggacatcaacgtgcaacataagaagcctgctgatatcccccaggggtccctggcctatctcgagcaggcttccgccaacatccccgcacccctgaaacccacttag

SEQ ID NO: 218279 - DNA, 537 bp, Artificial Sequence
  derived and/or modified sequence
atggccgcccccctgggcggcatgttcagcggccagcccccaggccccccccaggcccctcctggcctgcccggccaggccagcctgctgcaggccgcccctggggccccccggcccagcagcagcaccctggtggatgagctggagagcagctttgaggcctgctttgccagcctggtgtcccaggactatgtgaatggaacagaccaggaggagatcagaactggagtggaccagtgcatccagaagttcctggacatcgcccggcagacagagtgcttcttcctgcagaagaggctgcagctgtctgtgcagaagccagagcaggtgatcaaggaggatgtgtctgagctgagaaatgagctgcagaggaaggatgccctggtgcagaagcacctgaccaagctgcggcactggcagcaggtgctggaggacatcaacgtgcagcacaagaagccagctgacatcccccagggcagcctggcctacctggagcaggccagcgccaacatcccagcccccctgaagcccacctag

SEQ ID NO: 218280 - DNA, 537 bp, Artificial Sequence
  derived and/or modified sequence
atggccgcccccctgggcggcatgttcagcggccagccccccggccctcctcaggcaccacctgggctccccggacaggccagcctcctgcaggcggcacccggcgcccctcggcccagcagcagtactcttgtagacgagttggagagctcatttgaagcatgtttcgcttcgctcgtgtcacaggactacgtgaacggtacagaccaggaggagatcaggaccggcgtggatcagtgcatccagaagtttctggatatcgccaggcaaacagagtgtttcttcctgcagaagaggctccagttaagtgtgcagaagccagaacaggtcattaaggaggatgtgagtgaattacgtaatgagttacagagaaaagacgctttggtgcagaagcatctgactaaactgcgacattggcagcaggtgttggaggacatcaatgttcagcacaaaaaaccggccgacatcccccagggtagtctcgcctatctcgagcaagccagcgccaatattcctgccccactcaaacccacatag

SEQ ID NO: 218281 - DNA, 2394 bp, Artificial Sequence
  derived and/or modified sequence
gatctctcttgcgccattccaaacatggcggctccactagggggtatgttttctgggcagccacccggtccccctcaggccccgccgggccttccgggccaagcttcgcttcttcaggcagctccaggcgctcctagaccttccagcagtactttggtggacgagttggagtcatctttcgaggcttgctttgcatctctggtgagtcaggactatgtcaatggcaccgatcaggaagaaattcgaaccggtgttgatcagtgtatccagaagtttctggatattgcaagacagacagaatgttttttcttacaaaaaagattgcagttatctgtccagaaaccagagcaagttatcaaagaggatgtgtcagaactaaggaatgaattacagcggaaagatgcactagtccagaagcacttgacaaagctgaggcattggcagcaggtgctggaggacatcaacgtgcagcacaaaaagcccgccgacatccctcagggctccttggcctacctggagcaggcatctgccaacatccctgcacctctgaagccaacgtgagcaaagggcagaggcagttggcctatgagtgggctgatgcgtgaggttggccacacattccttcctgtggacttgacattttggaagaactctttgccagataatgagttcattttagttttatgctcccattgaaaaattttccactatttttataagctgttaatttcttgagtactttataacatgtctgtagcttggataaaccaagtaagtattttttttttgtctttagcaaagtttagactgtgaatatgatgacacagattcttttttatggtggctttgcttgttttaaatttttgcatgacttttcatctttttatgtgtgtttcctgtagtttgatccgaaggaaaagagtatagtagcctgagaatcaggagatgggagttttagtcgtaggccttatgataattaccccgcggtggtgtgtagaaaagtatgtaaatttgctctgttttaagactttgaactacctcaagaagaggaatctaatacaatatttgtaatgtttccagagctctcagaatgaggatttttttgtaaataggtcagaagacgatggaactgtcctgggttagtatagtaatcttacagtaggatccttaggttgatgctgacttctgtttggggtatgtttatattttatgtggtgtttactttttttttttgacatagaaggatatagtgggagcagtgatacgctaacattcattacattctgcagtaatgaatctgtttaatgggtcagtcactgttttcagtagcatgacagtggggtcataggtgagctgtgaggggctaaatcttgctctgattgtctctttctgttttgagttttgtttgcgtgtatcatttttgttctacattttgggaggggaaacattttccgttaaggaaggttgttgccagtggatttgactccaagggactagagtgtcgtggtgggggtggggaggggctgcagggtgatcattggctactgagcctccacagagagcatgtggtgccctgcctttgggagggtattttgctctcgttagttttgtgggcagcctcagattccctgttgagttgctgttaagaaatggagatttctggctctcattgggtaaggttttctgagttttatatcttattagatcacatccctttacccagaacaaatgcttcactgtcttctgattggcagtactcctgtggctttgtgccttgactcattttgttgtcttcagccttgaaggccccttcccacatggactgacatccactcatgtgcctgatccctgaagcctcccagcacccattcagttgcatccccagggcacaggactttgatctcttctgttgccctcgctaggttctccctggtgggttagtgctttgtatctgtctctctgcccctcactaattctacacccatgagaattagacattattctccttaaatatataaggaccatataatctgtatctttttggtgtgtgtatatggtatctggcacatggatctctgattaccagcctgacatcaacaaatcccctcagttacaacgtataggttaaacaaagcttttaaaagctcatgtggtatgacctcaaggttgctaacctggtcactcatggtaattagaaactctgattggcagctttgtatttcttgactaaaaacctaaataaactgattaggttttaggcgttctttcaaagaggttcttgagaagattgagaactatcctatttggtgcttagtgaaaagattttgaattactgtacgtaccagttgttgccatttctttattaaattcagaagtttttttgccaaataacaa

SEQ ID NO: 218282 - DNA, 537 bp, Artificial Sequence
  derived and/or modified sequence
atggctgcgcctttgggaggcatgttcagcggacagcctcctggcccaccacaggccccacctggactgcctgggcaagccagccttctgcaagcagctcctggggctcctaggccttctagctccactctcgtcgacgaactcgagagttcctttgaagcgtgcttcgcgagcctggtgtctcaggattacgttaacggaacggaccaggaagagatacggaccggcgttgatcaatgtattcagaaattcctcgatattgctcgccagaccgagtgcttttttctccagaaacgccttcagctctccgttcaaaagcctgagcaagtcataaaggaagatgtcagcgagttgcgaaacgagcttcagcggaaggatgctctcgtgcaaaagcacttgaccaagctgcgacactggcagcaggtgctggaagatattaatgtgcagcacaagaaacctgccgacatcccccaggggtcgctggcctatttggagcaggctagcgcgaacattcccgctcctctgaagccgacctag

SEQ ID NO: 218283 - DNA, 537 bp, Artificial Sequence
  derived and/or modified sequence
atggccgcccccctgggcggcatgttcagcggccagccccccggccccccccaggccccccccggcctgcccggccaggccagcctgctgcaggccgcccccggcgcccccagacccagcagcagcaccctggtggacgagctggagagcagcttcgaggcctgcttcgccagcctggtgagccaggactacgtgaacggcaccgaccaggaggagatcagaaccggcgtggaccagtgcatccagaagttcctggacatcgccagacagaccgagtgcttcttcctgcagaagagactgcagctgagcgtgcagaagcccgagcaggtgatcaaggaggacgtgagcgagctgagaaacgagctgcagagaaaggacgccctggtgcagaagcacctgaccaagctgagacactggcagcaggtgctggaggacatcaacgtgcagcacaagaagcccgccgacatcccccagggcagcctggcctacctggagcaggccagcgccaacatccccgcccccctgaagcccacctag

SEQ ID NO: 218284 - protein, 587 aa, Artificial Sequence
  derived and/or modified sequence
MGWDLGTRLFQRQEQRSRLSRIWLEKTRVFLEGSTRTPALPHCLFWLLQVPSTQDPLFPGYGPQCPVDLAGPPCLRPLFGGLGGYWRALQRGREGRTMTSRASELSPGRSVTAGIIIVGDEILKGHTQDTNTFFLCRTLRSLGVQVCRVSVVPDEVATIAAEVTSFSNRFTHVLTAGGIGPTHDDVTFEAVAQAFGDELKPHPKLEAATKALGGEGWEKLSLVPSSARLHYGTDPCTGQPFRFPLVSVRNVYLFPGIPELLRRVLEGMKGLFQNPAVQFHSKELYVAADEASIAPILAEAQAHFGRRLGLGSYPDWGSNYYQVKLTLDSEEEGPLEECLAYLTARLPQGSLVPYMPNAVEQASEAVYKLAESGSSLGKKVAGALQTIETSLAQYSLTQLCVGFNGGKDCTALLHLFHAAVQRKLPDVPNPLQILYIRSISPFPELEQFLQDTIKRYNLQMLEAEGSMKQALGELQARHPQLEAVLMGTRRTDPYSCSLCPFSPTDPGWPAFMRINPLLDWTYRDIWDFLRQLFVPYCILYDRGYTSLGSRENTVRNPALKCLSPGGHPTYRPAYLLENEEEERNSRT

SEQ ID NO: 218285 - protein, 456 aa, Artificial Sequence
  derived and/or modified sequence
MGWDLGTRLFQRQEQRSRLSRIWLEKTRVFLEGSTRTPALPHCLFWLLQVPSTQDPLFPGYGPQCPVDLAGPPCLRPLFGGLGGYWRALQRGREGRTMTSRASELSPGRSVTAGIIIVGDEILKGHTQDTNTFFLCRTLRSLGVQVCRVSVVPDEVATIAAEVTSFSNRFTHVLTAGGIGPTHDDVTFEAVAQAFGDELKPHPKLEAATKALGGEGWEKLSLVPSSARLHYGTDPCTGQPFRFPLVSVRNVYLFPGIPELLRRVLEGMKGLFQNPAVQFHSKELYVAADEASIAPILAEAQAHFGRRLGLGSYPDWGSNYYQVKLTLDSEEEGPLEECLAYLTARLPQGSLVPYMPNAVEQASEAVYKLAESGSSLGKKVAGALQTIETSLAQYSLTQLCVGFNGGKDCTALLHLFHAAVQRKLPDVPNPLQILYIRSISPFPELEQFLQDTIKRY

SEQ ID NO: 218286 - DNA, 2160 bp, Artificial Sequence
  derived and/or modified sequence
gccggtgaaggggcagaacaggcaggtgagagtctaagagggctcagtaatctgaagcttggtgggaagaagggattctgggctagaaagggtgcagaagcctgaagtagaaagagacgggattttggtccggggtggagagcgaatgcattgaaaagggccaaggcccaggataaggtagacatttaaaggggtacggatgcccaaggtagagcagacacttgaggagaccagctcagcaaacggaagacacttaaagtggtaggttctcaagagagaagaagtttttaagactagagctaagcaagacatttaaaaggacatgggttgggatttgggaacacgtttattccagaggcaggaacaaaggagtcgcttgtcaaggatctggttagagaagactagggtcttcctcgaaggaagcacgcgcacgcctgctctcccccattgtcttttctggcttctccaggttccctcgacccaggaccccctgttcccaggctatggcccccagtgccctgtagacctggcaggccccccgtgcttgcgacccctatttgggggtctgggtggctactggagggccttgcagaggggcagagaaggcaggaccatgacatctagggcctctgaactttctccggggcgcagcgtgacggctggcatcatcattgttggagatgagatccttaagggacacactcaggacaccaacaccttctttctgtgccggacactgcgctccctaggggtccaggtttgccgagtctcagttgtacctgatgaggtagccaccattgcagctgaggtcacttctttctccaaccgcttcacccatgtcctcacagcagggggcatcggccccactcatgatgatgtgacctttgaggcagtggcacaggcctttggagatgagctgaagccacaccccaagttggaagcagccaccaaagccctaggaggggaaggctgggagaagctatcattggtgccctcctctgcccgcctgcattatggcacagatccttgcactggtcaacctttcagattccctctggtctccgtccgaaacgtctacctcttcccaggcattccagagctgctgcggcgggtgctggaggggatgaagggactattccaaaacccagctgttcagttccactcaaaggagctatatgtggctgctgatgaagcctccatcgcccccattctggctgaggcccaggcccactttggacgtaggcttggcctgggttcctaccctgactggggcagcaactactatcaggtgaagctgactctagactcagaggaagaaggacccctggaggaatgcttggcctacctgactgcccgtttgccccagggatcgctggtcccctacatgcccaacgctgtggagcaggccagtgaggctgtatacaaactcgctgaatcagggtcttctttggggaaaaaggtggcaggtgccctacagaccattgagacctccctggctcagtacagcctcacccagctctgtgtgggcttcaacgggggcaaagactgcactgccctcctgcacctcttccatgcagctgtgcagaggaaattacctgatgttccaaaccccctccagatcctgtatatccgcagcatctcccctttccctgagctggaacagtttctacaggacactatcaagaggtataatctgcagatgttggaagctgagggcagcatgaagcaggccctgggtgaactgcaggcacggcacccccagctggaggctgtccttatgggcacccgccggactgacccctactcctgtagcctctgccctttcagccccactgacccaggctggcccgcattcatgcgcatcaacccactgctggactggacctacagagacatctgggattttctgcgtcagctgtttgtcccatactgtatcctgtatgaccgaggatacacatcactggggagtcgggagaataccgtgcggaacccggccctgaagtgcctgagcccaggaggacaccccacataccgtccagcctatctactggagaacgaagaagaggagcggaactcccgcacatgacctcccaccctaggagggagggaaggacaccgtcctagggtataacctggcaataaaccgtgcctctcactgtg

SEQ ID NO: 218287 - DNA, 1730 bp, Artificial Sequence
  derived and/or modified sequence
gaacaagggaaagagccggtgaaggggcagaacaggcaggttccctcgacccaggaccccctgttcccaggctatggcccccagtgccctgtagacctggcaggccccccgtgcttgcgacccctatttgggggtctgggtggctactggagggccttgcagaggggcagagaaggcaggaccatgacatctagggcctctgaactttctccggggcgcagcgtgacggctggcatcatcattgttggagatgagatccttaagggacacactcaggacaccaacaccttctttctgtgccggacactgcgctccctaggggtccaggtttgccgagtctcagttgtacctgatgaggtagccaccattgcagctgaggtcacttctttctccaaccgcttcacccatgtcctcacagcagggggcatcggccccactcatgatgatgtgacctttgaggcagtggcacaggcctttggagatgagctgaagccacaccccaagttggaagcagccaccaaagccctaggaggggaaggctgggagaagctatcattggtgccctcctctgcccgcctgcattatggcacagatccttgcactggtcaacctttcagattccctctggtctccgtccgaaacgtctacctcttcccaggcattccagagctgctgcggcgggtgctggaggggatgaagggactattccaaaacccagctgttcagttccactcaaaggagctatatgtggctgctgatgaagcctccatcgcccccattctggctgaggcccaggcccactttggacgtaggcttggcctgggttcctaccctgactggggcagcaactactatcaggtgaagctgactctagactcagaggaagaaggacccctggaggaatgcttggcctacctgactgcccgtttgccccagggatcgctggtcccctacatgcccaacgctgtggagcaggccagtgaggctgtatacaaactcgctgaatcagggtcttctttggggaaaaaggtggcaggtgccctacagaccattgagacctccctggctcagtacagcctcacccagctctgtgtgggcttcaacgggggcaaagactgcactgccctcctgcacctcttccatgcagctgtgcagaggaaattacctgatgttccaaaccccctccagatcctgtatatccgcagcatctcccctttccctgagctggaacagtttctacaggacactatcaagaggtataatctgcagatgttggaagctgagggcagcatgaagcaggccctgggtgaactgcaggcacggcacccccagctggaggctgtccttatgggcacccgccggactgacccctactcctgtagcctctgccctttcagccccactgacccaggctggcccgcattcatgcgcatcaacccactgctggactggacctacagagacatctgggattttctgcgtcagctgtttgtcccatactgtatcctgtatgaccgaggatacacatcactggggagtcgggagaataccgtgcggaacccggccctgaagtgcctgagcccaggaggacaccccacataccgtccagcctatctactggagaacgaagaagaggagcggaactcccgcacatgacctcccaccctaggagggagggaaggacaccgtcctagggtataacctggcaataaaccgtgcctctcactgtg

SEQ ID NO: 218288 - DNA, 1839 bp, Artificial Sequence
  derived and/or modified sequence
gggaaagagccggtgaaggggcagaacaggcaggttccctcgacccaggaccccctgttcccaggctatggcccccagtgccctgtagacctggcaggccccccgtgcttgcgacccctatttgggggtctgggtggctactggagggccttgcagaggggcagagaaggcaggaccatgacatctagggcctctgaactttctccggggcgcagcgtgacggctggcatcatcattgttggagatgagatccttaagggacacactcaggacaccaacaccttctttctgtgccggacactgcgctccctaggggtccaggtttgccgagtctcagttgtacctgatgaggtagccaccattgcagctgaggtcacttctttctccaaccgcttcacccatgtcctcacagcagggggcatcggccccactcatgatgatgtgacctttgaggcagtggcacaggcctttggagatgagctgaagccacaccccaagttggaagcagccaccaaagccctaggaggggaaggctgggagaagctatcattggtgccctcctctgcccgcctgcattatggcacagatccttgcactggtcaacctttcagattccctctggtctccgtccgaaacgtctacctcttcccaggcattccagagctgctgcggcgggtgctggaggggatgaagggactattccaaaacccagctgttcagttccactcaaaggagctatatgtggctgctgatgaagcctccatcgcccccattctggctgaggcccaggcccactttggacgtaggcttggcctgggttcctaccctgactggggcagcaactactatcaggtgaagctgactctagactcagaggaagaaggacccctggaggaatgcttggcctacctgactgcccgtttgccccagggatcgctggtcccctacatgcccaacgctgtggagcaggccagtgaggctgtatacaaactcgctgaatcagggtcttctttggggaaaaaggtggcaggtgccctacagaccattgagacctccctggctcagtacagcctcacccagctctgtgtgggcttcaacgggggcaaagactgcactgccctcctgcacctcttccatgcagctgtgcagaggaaattacctgatgttccaaaccccctccagatcctgtatatccgcagcatctcccctttccctgagctggaacagtttctacaggacactatcaagaggtataatctgcagatgttggaagctgagggcagcatgaagcaggccctgggtgaactgcaggcacggcacccccagctggaggctgtccttatgggcacccgccggactgacccctactcctgtagcctctgccctttcagccccactgacccaggctggcccgcattcatgcgcatcaacccactgctggactggacctacagagacatctgggattttctgcgtcagctgtttgtcccatactgtatcctgtatgaccgagggtaagggtattaggggaagggaatgggtaagggagtttttagggtgctgggatagggagggccaataggatcgcccaccctaccacatgcttgccctccaccctccctgctccagatacacatcactggggagtcgggagaataccgtgcggaacccggccctgaagtgcctgagcccaggaggacaccccacataccgtccagcctatctactggagaacgaagaagaggagcggaactcccgcacatgacctcccaccctaggagggagggaaggacaccgtcctagggtataacctggcaataaaccgtgcctctcactgtg

SEQ ID NO: 218289 - DNA, 2656 bp, Artificial Sequence
  derived and/or modified sequence
aggaaaggaacaagggaaagagccggtgaaggggcagaacaggcaggtgagagtctaagagggctcagtaatctgaagcttggtgggaagaagggattctgggctagaaagggtgcagaagcctgaagtagaaagagacgggattttggtccggggtggagagcgaatgcattgaaaagggccaaggcccaggataaggtagacatttaaaggggtacggatgcccaaggtagagcagacacttgaggagaccagctcagcaaacggaagacacttaaagtggtaggttctcaagagagaagaagtttttaagactagagctaagcaagacatttaaaaggacatgggttgggatttgggaacacgtttattccagaggcaggaacaaaggagtcgcttgtcaaggatctggttagagaagactagggtcttcctcgaaggaagcacgcgcacgcctgctctcccccattgtcttttctggcttctccaggttccctcgacccaggaccccctgttcccaggctatggcccccagtgccctgtagacctggcaggccccccgtgcttgcgacccctatttgggggtctgggtggctactggagggccttgcagaggggcagagaaggcaggaccatgacatctagggcctctgaactttctccggggcgcagcgtgacggctggcatcatcattgttggagatgagatccttaagggacacactcaggacaccaacaccttctttctgtgccggacactgcgctccctaggggtccaggtttgccgagtctcagttgtacctgatgaggtagccaccattgcagctgaggtcacttctttctccaaccgcttcacccatgtcctcacagcagggggcatcggccccactcatgatgatgtgacctttgaggcagtggcacaggcctttggagatgagctgaagccacaccccaagttggaagcagccaccaaagccctaggaggggaaggctgggagaagctatcattggtgccctcctctgcccgcctgcattatggcacagatccttgcactggtcaacctttcagattccctctggtctccgtccgaaacgtctacctcttcccaggcattccagagctgctgcggcgggtgctggaggggatgaagggactattccaaaacccagctgttcagttccactcaaaggagctatatgtggctgctgatgaagcctccatcgcccccattctggctgaggcccaggcccactttggacgtaggcttggcctgggttcctaccctgactggggcagcaactactatcaggtgaagctgactctagactcagaggaagaaggacccctggaggaatgcttggcctacctgactgcccgtttgccccagggatcgctggtcccctacatgcccaacgctgtggagcaggccagtgaggctgtatacaaactcgctgaatcagggtcttctttggggaaaaaggtggcaggtgccctacagaccattgagacctccctggctcagtacagcctcacccagctctgtgtgggcttcaacgggggcaaagactgcactgccctcctgcacctcttccatgcagctgtgcagaggaaattacctgatgttccaaaccccctccagatcctgtatatccgcagcatctcccctttccctgagctggaacagtttctacaggacactatcaagaggtactaggggcctggaggtttgggctccaagagaagcttgacagagcccacgcccgacccctacttctgtttcttcctaaggtataatctgcagatgttggaagctgagggcagcatgaagcaggccctgggtgaactgcaggcacggcacccccagctggaggctgtccttatgggcacccgccggactgacccctactcctgtagcctctgccctttcagccccactgacccaggctggcccgcattcatgcgcatcaacccactgctggtaatggggaagagggtttatcaccttcagtctcacgtgccccagcagtcactgcaccctagctcacctgcagtagtggggaggctagagcctggaacctggatgaaggggcctcatcatccaagggaggcagtgctatctgttcattcatccttttgaccaatatttattgagcccaaattcaatagcaggcattgcacttcctactgtggatagaatagtgacttagacttgtgctgtccaatatagccattaattatttatttatacttaaattttaattaattagaatgaaatacatatgactaaaaaccactgaattatatactttaaaaggatgaatttgatggtatgtggatacctcaatttttaaaattaagtacaattaaaaattcagttctggctgggcgcagtggctcacgcctgtaatcccagcactttgggaggccatggtgggcagatcacttgaggccaggagttcgagaccagcctggccaacatggcgaaaccctgtctctactaaaaatacaaaaaattagccaggcgtggtggcctgtagtcctagttactcgagaggctgaggcaggagaattgcttgaacccaggagacggaggttgcagtgagctgagatggcaccactgtactccagcctgggcaacagaacaagactctgtctc

SEQ ID NO: 218290 - DNA, 1764 bp, Artificial Sequence
  derived and/or modified sequence
atgggctgggatctgggaactcgcctgtttcagcgccaggaacagagatcacgactgagccgcatatggctcgagaagacccgggtctttttggaggggagtacacgaacgccagcattgccacactgcttgttctggcttctgcaagtgccttctacacaggatcctctgttccctggttacggtccacaatgtcctgtggatctggcggggcctccctgtctgagacctctcttcggcggactgggaggatactggagagcgctgcagagaggacgtgaaggtcgaacaatgacatctcgtgcaagcgaattaagccctggacggtctgtaactgccggaatcataatcgtgggcgacgagattctcaagggtcatacccaagacacaaacacatttttcctatgtcgaactctgcggagcctgggcgtgcaggtgtgtcgggtgtctgttgtgccggacgaagtggctacaatcgccgcagaagtaaccagcttctccaatagattcacgcacgtgcttaccgcaggcgggattggtcctactcatgacgatgtgacctttgaagccgtggcacaggcattcggggacgaacttaagccccatccaaaattggaggcagccaccaaggcactggggggagaagggtgggagaaactttccctcgtcccttcgagcgctagattgcactacggaaccgatccctgcacaggccagcctttccggttccctctggtttccgtgagaaacgtgtacctgtttccaggtatccctgaacttctcagacgggtgctggaaggcatgaagggcttattccagaaccctgctgtgcagttccactccaaggagctgtacgtcgctgccgacgaggccagcattgcacctatactggccgaagctcaagcacacttcggacgtaggctaggactgggaagttacccagactgggggtccaactattaccaggtcaaactgaccttggatagcgaggaggagggtccgctcgaggagtgcctagcctacctcactgctcgcctcccacaagggagtctcgtgccttatatgccgaacgctgtggagcaagcatctgaggccgtgtataaacttgcggaatctgggtccagcctaggcaagaaggtggctggtgctttgcagacgattgagacaagtcttgcgcagtactctttaactcagctgtgcgtgggcttcaatgggggcaaggactgcaccgccttgctccacctcttccatgccgccgttcaaagaaagctgccagatgtgcctaatccactacagatattatacatccggagtatcagcccctttcccgagcttgagcaatttctccaggatactatcaagcggtacaacctacagatgctggaagcagagggaagcatgaagcaggcactgggggagctgcaggccagacacccccagctggaagctgttctcatgggtactcgtcggaccgatccatacagctgctctctctgcccgtttagtcctaccgacccaggctggcccgccttcatgaggattaatcctctactggattggacgtaccgagatatctgggattttttgaggcagttgttcgtgccatactgtattctctacgaccgaggatacacatccttgggctccagagaaaacactgtgaggaatcctgccttaaagtgcctctcacctggcggtcaccccacctatagacccgcctacctgctggaaaacgaagaggaggagcgtaattcccggacctag

SEQ ID NO: 218291 - DNA, 1473 bp, Artificial Sequence
  derived and/or modified sequence
atgacttcacgagcgtcggaactttcccccggcaggtccgtgaccgccggtataattattgtgggggacgagatacttaagggtcatacccaagacactaatactttctttctgtgcaggaccctccggtcgttgggggtgcaggtgtgtcgggtatctgttgtgccagacgaagttgctacaattgcagctgaggtaacctcattcagcaatcgtttcacccatgtgcttaccgccggtgggatcggcccaacacacgacgatgttacttttgaggccgtggctcaggcctttggggacgaactcaagccccacccaaagttggaggccgctactaaagctctgggaggcgagggatgggagaaactgtccctggtaccttcatccgcgagactacactatggaacagacccctgcaccggccagccctttagattcccattggtgtctgtcaggaatgtttacctgttcccaggcattcccgaactacttcggagggtgcttgagggcatgaagggtttgttccagaaccctgccgtgcagtttcactcaaaggaactgtacgtagctgctgacgaggccagtatcgccccgattctcgcagaagctcaagcccatttcgggcggagactgggattgggcagttatccagattgggggagcaattactatcaggtgaagctgaccctggactccgaagaagaaggaccactcgaggagtgcttagcgtacctgacagcacgcttaccccaggggtcacttgtcccttacatgccaaatgctgtggagcaggcatccgaagcggtttacaagttagcggagagtggttccagcctcggaaaaaaagtagctggggcactgcagaccatcgagacttctctggcccagtacagtcttacccagctatgcgtggggtttaatggaggcaaggactgtacagcccttctccacttattccatgctgccgtgcagaggaagctgccagacgttcccaatccgcttcagatactgtatataagatcaatttctccttttcccgaactggaacaatttctccaggataccattaaaaggtacaaccttcagatgctggaagccgagggttccatgaaacaggctctcggtgaactacaggctcgacatccacagctggaggcagtgctaatgggcactaggcgcacagacccctactcttgcagcttatgcccattttcacctacagatccagggtggcctgcattcatgaggatcaatccactgctggattggacctatagagatatctgggacttcttacgacagctgtttgtaccttattgcattctttacgaccgtgggtatacctccctcggctcccgagagaataccgtgcggaatccagcactcaagtgcctgtcaccgggggggcaccccacttacagaccagcctacctgttggagaacgaagaagaggaacggaactcacggacgtag

SEQ ID NO: 218292 - DNA, 1371 bp, Artificial Sequence
  derived and/or modified sequence
atgggttgggaccttggtaccagactctttcagaggcaggagcagcggagccgactgtctcgaatctggctcgaaaagacgagagtgtttttggaaggatccacccgtacccctgcactgccacactgtctcttttggttgctgcaggtgccctccacacaggaccctcttttcccgggctatggccctcagtgtcccgtggatcttgctggcccaccctgcctgaggccactgtttggcgggttaggcggctattggcgggcgctgcaacgaggtcgcgaaggacgcacaatgacaagccgggctagcgaattatccccaggaagatccgtcaccgccgggatcatcatcgtaggcgacgagatacttaaggggcacacccaagataccaacacatttttcctatgcagaaccctccggtccctgggggttcaggtatgtagagtgagcgtagtacctgatgaagtcgcaacgattgccgcagaggtgactagcttctctaacaggtttactcacgtattgaccgctggtggcattggaccgacacacgatgacgttacttttgaggccgtcgcacaggcctttggtgatgagctcaagccccaccccaagctcgaggcagctacaaaggcgctgggaggcgaggggtgggaaaagctcagcctcgtcccatctagcgcaaggctgcactacggaacagacccgtgcacaggacagccgttcagattcccgctggtaagcgtacgcaatgtttatctctttccaggtatccccgagcttctcagacgggtgctggagggcatgaaagggttgttccagaatcctgccgttcaattccacagtaaagaactctatgtcgccgccgatgaggcatccatcgctcctattctagccgaagcccaggctcactttggcagacgactcggccttggttcatatcctgattggggctcaaactattatcaggtgaaactgaccctggatagcgaggaggagggaccgctggaagaatgtctcgcatatctgactgccaggctgcctcaagggtctctggtgccttatatgccaaatgctgtggagcaagcctcagaagccgtgtataaactcgccgagagcggatcctcactcggcaaaaaggtggctggagcgctccagaccattgagacgagcctcgcacagtactccctgacacagttgtgtgtgggcttcaatggcggcaaggactgcaccgccctgctacatctttttcacgccgctgtacagagaaaactccccgatgtgcccaacccattgcagattctgtacatccggtcaatcagtcctttccctgaattagagcagttcctccaggataccataaagcggtactag

SEQ ID NO: 218293 - DNA, 1764 bp, Artificial Sequence
  derived and/or modified sequence
atgggctgggacctgggcaccaggctcttccagaggcaggagcagaggagccggctgagccgcatctggctggagaagaccagggtcttcctggagggcagcaccaggaccccagccctgccccactgcctcttctggctgctgcaggtgcccagcacccaggaccccctcttccctggctacggcccccagtgccctgtggacctggccggccccccctgcctgcggcccctgtttggaggcctgggcggctactggagggccctgcagaggggccgggagggccgcaccatgaccagccgggccagcgagctgagccctggccgctctgtgacagctggcatcatcatcgtgggagatgagatcctgaagggccacacccaggacaccaacaccttcttcctgtgcaggaccctgcggagcctgggcgtgcaggtgtgccgggtgtctgtggtgcctgatgaggtggccaccatcgctgctgaggtgaccagcttcagcaaccgcttcacccacgtgctgacagctgggggcatcggccccacccatgatgatgtgacctttgaggccgtggcccaggcctttggagatgagctgaagccccaccccaagctggaggccgccaccaaggccctgggcggggagggctgggagaagctgagcctggtgcccagcagcgcccggctgcactatggaacagacccctgcaccggccagcccttccgcttccccctggtgtctgtgagaaatgtgtacctgtttcctggcatccctgagctgctgcggcgggtgctggagggcatgaagggcctcttccagaacccagctgtgcagttccacagcaaggagctgtatgtggccgcagatgaggccagcatcgcccccatcctggccgaggcccaggcccacttcggccggcggctgggcctgggcagctacccagactggggcagcaactactaccaggtgaagctgaccctggacagcgaggaggagggccccctggaggagtgcctggcctacctgacagcccggctgccccagggcagcctggtgccctacatgcccaatgctgtggagcaggccagcgaggccgtgtacaagctggccgagagcggcagcagcctgggcaagaaggtggccggggccctgcagaccatcgagaccagcctggcccagtacagcctgacccagctgtgtgtgggcttcaacggcggcaaggactgcacagccctgctgcacctgttccacgccgctgtgcagaggaagctgcctgatgtgcccaaccccctgcagatcctgtacatccgcagcatcagccccttccctgagctggagcagttcctgcaggacaccatcaagcgctacaacctgcagatgctggaggccgagggctccatgaagcaggccctgggggagctgcaggcccggcacccccagctggaggccgtgctgatgggcaccaggagaacagacccctacagctgcagcctgtgccccttcagccccacagaccccggctggccagccttcatgaggatcaaccccctgctggactggacctacagagacatctgggacttcctgcggcagctgtttgtgccctactgcatcctgtatgaccggggctacaccagcctgggcagcagagaaaatacagtgagaaatcctgccctgaagtgcctgagccctgggggccaccccacctacagacctgcctacctgctggagaatgaggaggaggagaggaacagcaggacatag

SEQ ID NO: 218294 - DNA, 1473 bp, Artificial Sequence
  derived and/or modified sequence
atgaccagccgggccagcgagctgagccctggccgctctgtgacagctggcatcatcatcgtgggagatgagatcctgaagggccacacccaggacaccaacaccttcttcctgtgcaggaccctgcggagcctgggcgtgcaggtgtgccgggtgtctgtggtgcctgatgaggtggccaccatcgctgctgaggtgaccagcttcagcaaccgcttcacccacgtgctgacagctgggggcatcggccccacccatgatgatgtgacctttgaagctgtggcccaggcctttggagatgagctgaagccccaccccaagctggaggccgccaccaaggccctgggcggggagggctgggagaagctgagcctggtgcccagcagcgcccggctgcactacggcacagacccctgcaccggccagcccttccgcttccccctggtgtctgtgagaaatgtgtacctgtttcctggcatccctgagctgctgcggcgggtgctggagggcatgaagggcctcttccagaacccagctgtgcagttccacagcaaggagctgtatgtggccgcagatgaggccagcatcgcccccatcctggccgaggcccaggcccactttggaagaaggctgggcctgggcagctacccagactggggcagcaactactaccaggtgaagctgaccctggacagcgaggaggagggccccctggaggagtgcctggcctacctgacagcccggctgccccagggcagcctggtgccctacatgcccaatgctgtggagcaggccagcgaggccgtgtacaagctggccgagagcggcagcagcctgggcaagaaggtggccggggccctgcagaccatcgagaccagcctggcccagtacagcctgacccagctgtgtgtgggcttcaatggaggcaaggactgcacagccctgctgcacctgttccacgccgctgtgcagaggaagctgcctgatgtgcccaaccccctgcagatcctgtacatccgcagcatcagccccttccctgagctggagcagttcctgcaggacaccatcaagcgctacaacctgcagatgctggaggccgagggctccatgaagcaggccctgggggagctgcaggcccggcacccccagctggaggccgtgctgatgggcaccaggagaacagacccctacagctgcagcctgtgccccttcagccccacagatcctggctggccagccttcatgaggatcaaccccctgctggactggacctacagagacatctgggacttcctgcggcagctgtttgtgccctactgcatcctgtatgaccggggctacaccagcctgggcagccgggagaacacagtgaggaacccagccctgaagtgcctgagccctgggggccaccccacctacagacctgcctacctgctggagaatgaggaggaggagaggaacagcaggacatag

SEQ ID NO: 218295 - DNA, 1371 bp, Artificial Sequence
  derived and/or modified sequence
atgggctgggacctgggcaccaggctcttccagaggcaggagcagaggagccggctgagccgcatctggctggagaagaccagggtcttcctggagggcagcaccaggaccccagccctgccccactgcctcttctggctgctgcaggtgcccagcacccaggaccccctcttccctggctacggcccccagtgccctgtggacctggccggccccccctgcctgcggcccctgtttggaggcctgggcggctactggagggccctgcagaggggccgggagggccgcaccatgaccagccgggccagcgagctgagccctggccgctctgtgacagctggcatcatcatcgtgggagatgagatcctgaagggccacacccaggacaccaacaccttcttcctgtgcaggaccctgcggagcctgggcgtgcaggtgtgccgggtgtctgtggtgcctgatgaggtggccaccatcgctgctgaggtgaccagcttcagcaaccgcttcacccacgtgctgacagctgggggcatcggccccacccatgatgatgtgacctttgaggccgtggcccaggcctttggagatgagctgaagccccaccccaagctggaggccgccaccaaggccctgggcggggagggctgggagaagctgagcctggtgcccagcagcgcccggctgcactatggaacagacccctgcaccggccagcccttccgcttccccctggtgtctgtgagaaatgtgtacctgtttcctggcatccctgagctgctgcggcgggtgctggagggcatgaagggcctcttccagaacccagctgtgcagttccacagcaaggagctgtatgtggccgcagatgaggccagcatcgcccccatcctggccgaggcccaggcccacttcggccggcggctgggcctgggcagctacccagactggggcagcaactactaccaggtgaagctgaccctggacagcgaggaggagggccccctggaggagtgcctggcctacctgacagcccggctgccccagggcagcctggtgccctacatgcccaatgctgtggagcaggccagcgaggccgtgtacaagctggccgagagcggcagcagcctgggcaagaaggtggccggggccctgcagaccatcgagaccagcctggcccagtacagcctgacccagctgtgtgtgggcttcaacggcggcaaggactgcacagccctgctgcacctgttccacgccgctgtgcagaggaagctgcctgatgtgcccaaccccctgcagatcctgtacatccgcagcatcagccccttccctgagctggagcagttcctgcaggacaccatcaagcgctactag

SEQ ID NO: 218296 - DNA, 1764 bp, Artificial Sequence
  derived and/or modified sequence
atgggctgggacctgggcacccggctgttccagcggcaggagcagagatccaggctgtccagaatttggctggaaaagaccagagtgttcctggaggggagcacacggacaccggctctccctcactgtctgttctggttactgcaggttccatcaacacaggatcccctgtttcccggttatggaccacagtgtccggtggatctggccggtcctccttgcctgagacctttattcgggggccttgggggttattggagggcattacaaagaggtagggaggggcgtactatgacctcgcgcgcgtctgagttatctccaggtagatctgtaaccgccgggattattatagtgggtgatgaaatcttgaagggccatacacaggacacgaataccttttttctctgtagaactctccgttctctgggcgtgcaggtgtgccgggttagtgtggtcccggatgaggtggccacaatagcagcagaggtcacctctttctctaaccgattcacgcatgtgctgactgctggtggtatcggcccaacgcacgatgacgttaccttcgaggccgtggcccaagcatttggggacgagttgaaaccccaccctaagctggaggcggccaccaaggccctgggcggtgagggatgggaaaaactgtctcttgttccgtcgtcggctagactgcactacggaaccgacccatgcacgggccagccttttaggttccccctagttagtgtgaggaacgtatatctattcccggggattccggaactactgcgccgcgttctggaaggcatgaaaggcctgtttcagaatccagctgtacagtttcacagcaaggaactgtatgtcgctgctgatgaggcaagcattgcgcccattctggctgaagcgcaggcccacttcggacggcggcttggcctgggctcctaccccgattggggcagcaattactatcaggtgaaattgacccttgacagcgaagaagagggccccctcgaagaatgcctagcgtacttgaccgctcggttgcctcaaggtagccttgtgccatacatgccaaacgcagtcgagcaggcttccgaggccgtgtacaaactggctgagagcggcagcagcctggggaagaaggtcgctggtgccctgcaaacaatcgagacttctctggctcaatacagtctcacacaactgtgtgttgggtttaacggaggcaaggactgcacagctctattacacctgttccacgccgcagtacagcggaagctgccagacgtccccaatcctctgcagattctctacattaggtctatttctccatttccagagctggaacagttccttcaggacacaatcaaacggtataacctacagatgctagaagcggaaggctccatgaaacaagcgctcggtgagctgcaggctagacatccccaattggaagctgtgctcatggggacgcgtcgaaccgatccatattcttgtagcctctgtcctttctctcctaccgaccccggctggccagctttcatgaggataaaccctctgctggattggacatacagggatatctgggacttcctgcgtcaattattcgtgccctattgtatactctacgatagaggatataccagtctggggagcagagaaaacactgtgagaaacccggcccttaaatgtctgagccctggcggacaccccacttatcgcccggcctatctgttggagaatgaggaagaggaaagaaatagccggacttag

SEQ ID NO: 218297 - DNA, 1473 bp, Artificial Sequence
  derived and/or modified sequence
atgaccagccgggccagcgagctgagccccggccggagcgtgaccgccgggatcattatcgtgggcgacgaaattctcaaaggtcacactcaggacacaaacacattttttctctgccgaactttgagatccttaggcgtgcaggtgtgcagagtttcggtggttcctgacgaagtggccaccatcgccgcagaggtaaccagcttttccaacaggttcactcacgtgctcacagccggtggtatcggccctacgcacgacgacgtgacattcgaagccgttgctcaggcatttggagatgaactcaaacctcatcccaagctggaggccgcaactaaggcgctcggcggcgagggttgggaaaaattaagcttagtacctagttctgcacgcctgcactacgggactgacccttgcacgggccagcccttcagattccccctcgtgtctgtgcggaacgtgtacttgttccccggtattcctgagctgctgagacgcgtgctggagggaatgaaagggctctttcaaaatccagccgtccagttccacagtaaggaactctatgtggctgccgacgaggctagcattgcaccgatactagctgaggcccaagcacactttggtcgtaggctcggactcggctcatatcctgattgggggtctaattattaccaagtcaagctcacgctcgacagtgaggaggaaggccctctggaggaatgcctcgcatacctgacggcgagactgcctcagggctcccttgtcccgtacatgccaaacgctgttgaacaagcctcagaagctgtgtacaagctcgccgaatctggatctagcttggggaagaaggtggccggggccctacaaactatcgaaacttctctggctcagtacagcctcactcagctctgcgtgggcttcaacggcggcaaagattgtactgccttactgcatctgtttcatgctgcggtgcaaagaaagctccctgacgtgccaaaccccttgcagattctgtatattaggtctatctctcccttccctgaattagagcaatttctgcaggatacgataaagaggtataatctgcaaatgttggaggcggagggctccatgaaacaggccctgggagagctccaggcacgacacccccagctggaggcagtgttgatgggaacaaggagaactgatccttattcatgctcactgtgcccattttcccctacagaccccggttggcccgcttttatgagaatcaacccactgctggattggacgtatcgcgatatctgggacttcctcagacagctcttcgtgccctattgcatcctttatgacagggggtatacctccttaggcagccgggaaaataccgtgcgcaaccccgccctaaaatgcctgtctcccggggggcaccctacatatcgccccgcgtatttgttagagaacgaggaagaagagaggaactctcgtacctag

SEQ ID NO: 218298 - DNA, 1371 bp, Artificial Sequence
  derived and/or modified sequence
atgggctgggacctgggcacccggctgttccagcggcaggagcagagaagcagactctcaagaatttggctggagaaaactcgagtgttcctggagggaagcacgaggacccccgccctgccccattgcctgttttggctcctgcaggtgccctcaacccaggaccccctcttccccgggtacggacctcagtgtcccgtcgaccttgctgggccaccttgtctgaggcctctatttgggggattgggggggtactggagagcgttacagcgtgggagagagggcagaactatgacgtcccgtgcatctgagctgtcacccggcagatctgtcaccgctggcattattatcgtcggagatgaaattctaaaaggccacactcaggacacaaataccttcttcctgtgccggacactgcgctcactgggggtgcaggtctgtagagtttccgtcgtgcccgacgaagttgccaccatcgctgctgaagtgacatctttctctaaccgcttcacacatgttctgacagccgggggaattgggcctacacatgacgacgtgacgtttgaagcagtggcccaggctttcggggatgagctgaagccccatcctaagctcgaggccgccactaaagccctgggaggggagggttgggaaaagttgtcccttgtcccatcttcggccagacttcactacggcaccgacccttgtactggccagccatttcgctttcccctggttagtgtgcggaacgtatacctattccccggcatccctgagctgctgcgcagagtgctggagggcatgaagggcctgtttcaaaaccccgccgtccagtttcactccaaggaactgtatgtggcagccgatgaggctagtatcgcccctatcctcgcggaagcacaagcacacttcggtcgacggctgggcttgggctcctatccagattggggcagcaattactaccaggtgaaactgacactggactctgaagaggaaggcccactggaggaatgcttggcctatcttaccgcccgtttgccccagggtagcctcgtcccatatatgcccaacgctgtggagcaagcctcagaagccgtttataagcttgcggagtccggttcctctctagggaaaaaggtggccggggcactgcagaccatcgagacttccttggcgcagtatagtctcacccaactctgcgtcgggttcaacgggggtaaggactgcactgccttgctgcatctcttccacgccgccgtgcaaagaaaactccccgatgttccaaaccctctgcaaatcctctatattcgtagtatctcccccttccccgaactggagcaattcctgcaggatacgatcaaacgctattag

SEQ ID NO: 218299 - DNA, 1764 bp, Artificial Sequence
  derived and/or modified sequence
atgggctgggacctaggcaccaggctgttccagagacaggagcaaagatccagattgagcagaatatggctggagaagactagggtttttctagagggcagcacacgcacacccgctctcccacactgcctgttttggttactccaggtgccatccacccaagacccgctctttcctggctacggccctcagtgtcctgtcgatctggccggacccccttgtctcagaccactgtttggcggacttgggggatactggcgcgctttgcagagggggagggaggggcgaacaatgacgtcccgggcaagtgagctatctcccggaagatcggttacagccggtattattatcgtgggcgatgagatcctgaagggccatacacaggatactaacacgttcttcctctgtcggactcttagaagcttgggcgttcaggtatgccgcgtgagcgtggtgcctgatgaggtcgccacgatcgccgctgaggttaccagtttctctaaccggttcacccacgtgcttacagcaggcggtatcggacccactcatgacgatgtcactttcgaggccgtcgctcaggcgtttggcgacgagctgaagcctcaccccaaattagaagctgcaacgaaagctttaggcggagagggatgggagaaactatctttagtcccgagctcagccagactgcactacggcaccgacccttgtactggccagcctttccgattccccttggtcagtgtgcggaatgtctacctcttccctggaatccccgagctgcttaggagagtccttgaagggatgaagggcctctttcagaatcctgccgttcagttccactcaaaggagctatacgtggcagcagacgaagccagtattgccccaatattagctgaagcacaagcacacttcgggcgtcgactgggtctgggatcttacccagactggggctctaactactaccaggttaagttgacgcttgactcagaggaagaaggtcctctcgaagagtgtttggcgtacctgacagcacgactccctcaggggagtctggtgccatacatgccgaacgccgtggagcaggcctccgaagcagtgtataagctcgctgagtctgggtcctccctcggaaaaaaggtagccggagcacttcagacgatcgaaacatcgctggctcagtattctttgactcaactgtgtgtggggtttaatgggggtaaggactgtacagcgctactgcatctgtttcatgctgcggtgcaacgaaagctgcccgatgtccctaacccactgcagattctgtacattcgtagtatatctccttttccggagctcgagcaatttctgcaagacactatcaaaagatacaatcttcagatgctcgaagctgagggtagcatgaagcaggccctgggtgaactgcaggcgaggcaccctcagcttgaggctgtcctgatgggcacccggaggaccgacccatactcatgctctctgtgtcctttttccccaaccgaccctggatggcccgcattcatgaggataaatcccctgctggattggacgtatagagatatctgggatttcctgcggcagctgttcgtgccctattgcatcctgtatgacaggggctataccagcttgggatctcgggaaaacaccgtgaggaaccccgcacttaaatgtttatcccccggagggcatccaacttatcggccagcatatttactggagaatgaagaagaggagcggaacagcagaacttag

SEQ ID NO: 218300 - DNA, 1473 bp, Artificial Sequence
  derived and/or modified sequence
atgaccagtcgcgcatctgagctatctcccggacgtagtgttacagcaggaattatcattgtgggagatgaaatcttaaagggtcatacccaggatacaaacaccttcttcctctgtaggaccctgagatcattgggggtgcaggtgtgccgcgtgagcgttgttcctgacgaagtggcaacgattgccgcagaagtcacatccttttccaaccgcttcacacatgttctgacagccggaggtatcggacctacgcacgatgatgttaccttcgaggccgttgcccaggccttcggcgatgagctcaagccgcatccaaaactggaagcagcaactaaggctctcgggggagaggggtgggaaaaactgtccctggttcccagctctgcacgactacattacggtacggacccttgcacaggacaaccgttcaggttccccctggtgagcgtcagaaacgtttacctgtttccaggtattcccgagctcctacgcagagttctcgagggaatgaagggtctctttcagaatcccgcagtgcagttccatagtaaagagctctatgttgcggctgacgaagcctctattgcacctattctggcagaggctcaggcgcacttcggaaggcggcttggtctaggctcatatccagattggggcagcaattattatcaggtgaaactcacgctggactccgaagaggagggacccttggaggagtgtctggcctatttaacagctcggcttcctcagggcagcctggtgccttatatgcctaacgccgtggaacaagccagcgaggctgtgtataagctggctgagagcggcagttcgcttggtaagaaagtcgcgggagcactgcagacaattgaaacctccctggcacagtattcgcttacacaactttgtgtcggattcaatggcggaaaagactgcactgccctactccacttgttccacgccgctgtgcagcgcaagcttccggatgttcctaatccacttcagatcttatatattcgttccatctcaccttttcctgagctagagcaattcctgcaggacaccattaaaagatataacctacagatgctggaagcagaggggtctatgaaacaggccctgggtgagcttcaggctcgacacccccaattagaggccgtgctgatgggcacacggaggacggatccatactcttgctctctttgccctttcagcccgaccgatccaggatggcccgcatttatgcggatcaatcccctgctggattggacgtatcgcgacatctgggactttctgaggcagttgttcgtgccatattgtatcctgtatgaccgtggctacacctccttgggatcacgggaaaatacggtcaggaatccagcactgaaatgcttatccccgggaggccacccaacctaccggcctgcttatcttctggaaaatgaggaggaggaacgcaattcaaggacatag

SEQ ID NO: 218301 - DNA, 1371 bp, Artificial Sequence
  derived and/or modified sequence
atggggtgggatctcggtacaaggttgttccagagacaggagcagagaagccgactttctcgaatctggctggaaaagacacgggtcttcctggagggaagcacccgcactcctgccctcccccactgccttttttggcttctccaggtcccctcgacacaagatcctctatttcctggctatggtccccagtgtccagtggatcttgccggtccaccgtgtctgagacctctgttcggaggcctgggaggatactggcgagctttgcagagagggagggaagggcgaactatgacttccagggcgtcagagctctcccctggccgaagcgtgaccgcaggcattattattgtcggagatgagattctgaagggtcatactcaagacaccaataccttcttcctgtgcagaactttacgtagtctgggcgtgcaggtttgtagagtttctgtggtgcctgatgaggtggcgaccatcgcggctgaagtcacctctttttccaatcggttcacccatgtcctgaccgctgggggtattgggccaactcacgacgacgtgacatttgaggccgttgcccaagccttcggggacgaacttaaaccacatccaaagttggaggccgctacaaaagcgttaggaggcgaaggatgggagaaactctcgttagtgccatcatctgcacgcttgcactatggaacagatccttgcacggggcagcccttcagattcccactggtgtctgtcagaaacgtgtatctgttccctgggattcccgaactgcttaggagagtgcttgagggcatgaagggactctttcagaacccagctgttcagtttcattctaaggaactttacgtggctgccgacgaagccagtattgcaccgattctggcagaggcccaggcacacttcggtagacgattgggactggggtcgtatcccgattggggaagcaactactatcaggtaaaactcacattagacagcgaagaagagggtccactggaggaatgtcttgcatacctgacagcgagactccctcagggttctctggtgccctatatgcctaacgccgtggaacaggccagtgaggcagtgtataagctggcggaatcgggctcgtcattagggaagaaagtggctggcgctctgcagactattgagacctctctggcgcaatattcactcacccagttgtgcgtaggctttaatggtggaaaggattgcactgcactgctgcaccttttccacgctgcggtccaacgcaagctccctgacgtgcctaatcccctgcagattctttacattcggtctatctcaccatttccagagctcgagcaatttctccaggacacaatcaaacgctattag

SEQ ID NO: 218302 - DNA, 1764 bp, Artificial Sequence
  derived and/or modified sequence
atgggctgggacctgggcaccagactgttccagagacaggagcagagaagcagactgagcagaatctggctggagaagaccagagtgttcctggagggcagcaccagaacccccgccctgccccactgcctgttctggctgctgcaggtgcccagcacccaggaccccctgttccccggctacggcccccagtgccccgtggacctggccggccccccctgcctgagacccctgttcggcggcctgggcggctactggagagccctgcagagaggcagagagggcagaaccatgaccagcagagccagcgagctgagccccggcagaagcgtgaccgccggcatcatcatcgtgggcgacgagatcctgaagggccacacccaggacaccaacaccttcttcctgtgcagaaccctgagaagcctgggcgtgcaggtgtgcagagtgagcgtggtgcccgacgaggtggccaccatcgccgccgaggtgaccagcttcagcaacagattcacccacgtgctgaccgccggcggcatcggccccacccacgacgacgtgaccttcgaggccgtggcccaggccttcggcgacgagctgaagccccaccccaagctggaggccgccaccaaggccctgggcggcgagggctgggagaagctgagcctggtgcccagcagcgccagactgcactacggcaccgacccctgcaccggccagcccttcagattccccctggtgagcgtgagaaacgtgtacctgttccccggcatccccgagctgctgagaagagtgctggagggcatgaagggcctgttccagaaccccgccgtgcagttccacagcaaggagctgtacgtggccgccgacgaggccagcatcgcccccatcctggccgaggcccaggcccacttcggcagaagactgggcctgggcagctaccccgactggggcagcaactactaccaggtgaagctgaccctggacagcgaggaggagggccccctggaggagtgcctggcctacctgaccgccagactgccccagggcagcctggtgccctacatgcccaacgccgtggagcaggccagcgaggccgtgtacaagctggccgagagcggcagcagcctgggcaagaaggtggccggcgccctgcagaccatcgagaccagcctggcccagtacagcctgacccagctgtgcgtgggcttcaacggcggcaaggactgcaccgccctgctgcacctgttccacgccgccgtgcagagaaagctgcccgacgtgcccaaccccctgcagatcctgtacatcagaagcatcagccccttccccgagctggagcagttcctgcaggacaccatcaagagatacaacctgcagatgctggaggccgagggcagcatgaagcaggccctgggcgagctgcaggccagacacccccagctggaggccgtgctgatgggcaccagaagaaccgacccctacagctgcagcctgtgccccttcagccccaccgaccccggctggcccgccttcatgagaatcaaccccctgctggactggacctacagagacatctgggacttcctgagacagctgttcgtgccctactgcatcctgtacgacagaggctacaccagcctgggcagcagagagaacaccgtgagaaaccccgccctgaagtgcctgagccccggcggccaccccacctacagacccgcctacctgctggagaacgaggaggaggagagaaacagcagaacctag

SEQ ID NO: 218303 - DNA, 1473 bp, Artificial Sequence
  derived and/or modified sequence
atgaccagcagagccagcgagctgagccccggcagaagcgtgaccgccggcatcatcatcgtgggcgacgagatcctgaagggccacacccaggacaccaacaccttcttcctgtgcagaaccctgagaagcctgggcgtgcaggtgtgcagagtgagcgtggtgcccgacgaggtggccaccatcgccgccgaggtgaccagcttcagcaacagattcacccacgtgctgaccgccggcggcatcggccccacccacgacgacgtgaccttcgaggccgtggcccaggccttcggcgacgagctgaagccccaccccaagctggaggccgccaccaaggccctgggcggcgagggctgggagaagctgagcctggtgcccagcagcgccagactgcactacggcaccgacccctgcaccggccagcccttcagattccccctggtgagcgtgagaaacgtgtacctgttccccggcatccccgagctgctgagaagagtgctggagggcatgaagggcctgttccagaaccccgccgtgcagttccacagcaaggagctgtacgtggccgccgacgaggccagcatcgcccccatcctggccgaggcccaggcccacttcggcagaagactgggcctgggcagctaccccgactggggcagcaactactaccaggtgaagctgaccctggacagcgaggaggagggccccctggaggagtgcctggcctacctgaccgccagactgccccagggcagcctggtgccctacatgcccaacgccgtggagcaggccagcgaggccgtgtacaagctggccgagagcggcagcagcctgggcaagaaggtggccggcgccctgcagaccatcgagaccagcctggcccagtacagcctgacccagctgtgcgtgggcttcaacggcggcaaggactgcaccgccctgctgcacctgttccacgccgccgtgcagagaaagctgcccgacgtgcccaaccccctgcagatcctgtacatcagaagcatcagccccttccccgagctggagcagttcctgcaggacaccatcaagagatacaacctgcagatgctggaggccgagggcagcatgaagcaggccctgggcgagctgcaggccagacacccccagctggaggccgtgctgatgggcaccagaagaaccgacccctacagctgcagcctgtgccccttcagccccaccgaccccggctggcccgccttcatgagaatcaaccccctgctggactggacctacagagacatctgggacttcctgagacagctgttcgtgccctactgcatcctgtacgacagaggctacaccagcctgggcagcagagagaacaccgtgagaaaccccgccctgaagtgcctgagccccggcggccaccccacctacagacccgcctacctgctggagaacgaggaggaggagagaaacagcagaacctag

SEQ ID NO: 218304 - DNA, 1371 bp, Artificial Sequence
  derived and/or modified sequence
atgggctgggacctgggcaccagactgttccagagacaggagcagagaagcagactgagcagaatctggctggagaagaccagagtgttcctggagggcagcaccagaacccccgccctgccccactgcctgttctggctgctgcaggtgcccagcacccaggaccccctgttccccggctacggcccccagtgccccgtggacctggccggccccccctgcctgagacccctgttcggcggcctgggcggctactggagagccctgcagagaggcagagagggcagaaccatgaccagcagagccagcgagctgagccccggcagaagcgtgaccgccggcatcatcatcgtgggcgacgagatcctgaagggccacacccaggacaccaacaccttcttcctgtgcagaaccctgagaagcctgggcgtgcaggtgtgcagagtgagcgtggtgcccgacgaggtggccaccatcgccgccgaggtgaccagcttcagcaacagattcacccacgtgctgaccgccggcggcatcggccccacccacgacgacgtgaccttcgaggccgtggcccaggccttcggcgacgagctgaagccccaccccaagctggaggccgccaccaaggccctgggcggcgagggctgggagaagctgagcctggtgcccagcagcgccagactgcactacggcaccgacccctgcaccggccagcccttcagattccccctggtgagcgtgagaaacgtgtacctgttccccggcatccccgagctgctgagaagagtgctggagggcatgaagggcctgttccagaaccccgccgtgcagttccacagcaaggagctgtacgtggccgccgacgaggccagcatcgcccccatcctggccgaggcccaggcccacttcggcagaagactgggcctgggcagctaccccgactggggcagcaactactaccaggtgaagctgaccctggacagcgaggaggagggccccctggaggagtgcctggcctacctgaccgccagactgccccagggcagcctggtgccctacatgcccaacgccgtggagcaggccagcgaggccgtgtacaagctggccgagagcggcagcagcctgggcaagaaggtggccggcgccctgcagaccatcgagaccagcctggcccagtacagcctgacccagctgtgcgtgggcttcaacggcggcaaggactgcaccgccctgctgcacctgttccacgccgccgtgcagagaaagctgcccgacgtgcccaaccccctgcagatcctgtacatcagaagcatcagccccttccccgagctggagcagttcctgcaggacaccatcaagagatactag

SEQ ID NO: 218305 - protein, 370 aa, Artificial Sequence
  derived and/or modified sequence
MHRLIFVYTLICANFCSCRDTSATPQSASIKALRNANLRRDESNHLTDLYRRDETIQVKGNGYVQSPRFPNSYPRNLLLTWRLHSQENTRIQLVFDNQFGLEEAENDICRYDFVEVEDISETSTIIRGRWCGHKEVPPRIKSRTNQIKITFKSDDYFVAKPGFKIYYSLLEDFQPAAASETNWESVTSSISGVSYNSPSVTDPTLIADALDKKIAEFDTVEDLLKYFNPESWQEDLENMYLDTPRYRGRSYHDRKSKVDLDRLNDDAKRYSCTPRNYSVNIREELKLANVVFFPRCLLVQRCGGNCGCGTVNWRSCTCNSGKTVKKYHEVLQFEPGHIKRRGRAKTMALVDIQLDHHERCDCICSSRPPR

SEQ ID NO: 218306 - DNA, 1113 bp, Artificial Sequence
  derived and/or modified sequence
atgcacagactgatcttcgtgtacaccctgatctgcgccaacttctgcagctgcagagacaccagcgccaccccccagagcgccagcatcaaggccctgagaaacgccaacctgagaagagacgagagcaaccacctgaccgacctgtacagaagagacgagaccatccaggtgaagggcaacggctacgtgcagagccccagattccccaacagctaccccagaaacctgctgctgacctggagactgcacagccaggagaacaccagaatccagctggtgttcgacaaccagttcggcctggaggaggccgagaacgacatctgcagatacgacttcgtggaggtggaggacatcagcgagaccagcaccatcatcagaggcagatggtgcggccacaaggaggtgccccccagaatcaagagcagaaccaaccagatcaagatcaccttcaagagcgacgactacttcgtggccaagcccggcttcaagatctactacagcctgctggaggacttccagcccgccgccgccagcgagaccaactgggagagcgtgaccagcagcatcagcggcgtgagctacaacagccccagcgtgaccgaccccaccctgatcgccgacgccctggacaagaagatcgccgagttcgacaccgtggaggacctgctgaagtacttcaaccccgagagctggcaggaggacctggagaacatgtacctggacacccccagatacagaggcagaagctaccacgacagaaagagcaaggtggacctggacagactgaacgacgacgccaagagatacagctgcacccccagaaactacagcgtgaacatcagagaggagctgaagctggccaacgtggtgttcttccccagatgcctgctggtgcagagatgcggcggcaactgcggctgcggcaccgtgaactggagaagctgcacctgcaacagcggcaagaccgtgaagaagtaccacgaggtgctgcagttcgagcccggccacatcaagagaagaggcagagccaagaccatggccctggtggacatccagctggaccaccacgagagatgcgactgcatctgcagcagcagaccccccagatag

SEQ ID NO: 218307 - DNA, 1113 bp, Artificial Sequence
  derived and/or modified sequence
atgcataggcttatttttgtgtacactctgatatgtgccaacttctgcagctgcagagacacctccgcgacgcctcagagcgcgtccattaaagccttacgcaacgccaatctgcggagagatgagagtaaccatctgacagatctctataggcgggacgagaccatccaagtcaaaggaaatggctacgtgcagtccccacgattcccaaattcctacccccgaaaccttttgcttacttggaggctccacagccaggagaataccagaatccagctggtattcgataatcaattcgggctagaagaagctgagaacgacatctgtcgctatgattttgtggaggtggaagacatcagcgagacaagcaccattattaggggcagatggtgcggacataaagaagttccccctcggataaaaagtaggacaaaccagatcaaaatcacattcaaatcggatgattacttcgtggccaaacctggctttaagatatattattcactgctggaggacttccagcctgctgccgccagcgaaaccaactgggagtccgtgacaagctcaatttctggggtgtcctataattccccttccgtgaccgatcctactctcatcgccgatgcgctcgataagaagattgctgaattcgataccgtggaagatctgctgaaatacttcaatcccgaaagctggcaggaggatctcgagaatatgtatctggacactccccgataccgtggccgcagctatcacgacaggaagtctaaagtggaccttgatcgcctcaacgatgatgcaaaaagatatagctgtacccctcgaaattattcagtgaatatccgggaagaattgaagttggcgaatgtggttttttttcctagatgcctacttgtgcaacgttgtgggggaaactgcggatgtggcactgtcaactggcgaagttgtacctgcaattccggaaagacggtaaagaaatatcacgaggtgttgcagttcgaacctggccacatcaagagaaggggtcgcgccaagacaatggctcttgtggatatccagctcgaccaccatgagcgctgtgactgtatttgttcctctcgcccgccgaggtag

SEQ ID NO: 218308 - DNA, 1113 bp, Artificial Sequence
  derived and/or modified sequence
atgcacaggctcatctttgtgtacaccctcatctgtgccaacttctgcagctgccgggacaccagcgccaccccccagagcgccagcatcaaggccctgagaaatgccaacctgcggagagatgagagcaaccacctgacagacctgtacagaagagatgagaccatccaggtgaagggaaatggctacgtgcagagcccccgcttccccaacagctaccccaggaacctgctgctgacctggaggctgcacagccaggagaacacccgcatccagctggtgtttgacaaccagtttggcctggaggaggctgaaaatgacatctgccgctatgactttgtggaggtggaggacatcagcgagaccagcaccatcatccggggccgctggtgtggccacaaggaggtgcccccacgcatcaagagcaggaccaaccagatcaagatcaccttcaagagtgatgactactttgtggccaagccaggcttcaagatctactacagcctgctggaggacttccagcctgctgctgccagcgagaccaactgggagagcgtgaccagcagcatctctggagtgtcctacaacagccccagcgtgacagaccccaccctgattgctgatgccctggacaagaagattgctgagtttgacacagtggaggacctgctgaagtacttcaaccctgagagctggcaggaggacctggagaacatgtacctggacaccccccgctaccggggccgcagctaccatgacaggaagagcaaggtggacctggaccggctgaatgatgatgccaagcgctacagctgcaccccaagaaactacagcgtgaacatccgggaggagctgaagctggccaacgtggtgttcttcccccgctgcctgctggtgcagagatgtggcggcaactgtggctgcggcaccgtgaactggaggagctgcacctgcaacagcggcaagacagtgaagaagtaccacgaggtgctgcagtttgagcccggccacatcaagaggcggggccgggccaagaccatggccctggtggacatccagctggaccaccacgagcgctgtgactgcatctgcagcagccggccccccaggtag

SEQ ID NO: 218309 - DNA, 1113 bp, Artificial Sequence
  derived and/or modified sequence
atgcaccggctgatcttcgtgtacaccctgatctgcgccaacttctgctcttgccgtgatacctccgcgaccccccagtccgcgagcataaaggccctccgtaatgccaacctgagaagggatgagagcaaccacctgacagacttatatcgtcgtgatgaaacgatacaggtcaagggcaatggatacgtacagtcacctcggttcccaaatagttatccgcgcaatttactgctgacgtggagactccacagccaggagaacactcggatccagttggttttcgacaaccaatttggattggaagaggctgaaaatgatatttgtcgatacgattttgttgaggtcgaggacataagtgagacctccaccatcattcggggcagatggtgcgggcataaggaagtgcctccacgtattaaatctaggacgaaccagataaaaatcaccttcaagtcagatgattatttcgtcgcaaaacccggcttcaaaatttattacagcctattagaagattttcagcctgctgcagcctctgagactaattgggaatcagtgacctcgtcgatttctggagtcagttataacagcccatccgtgaccgacccaactctgatcgccgatgccctcgacaaaaaaatagcggaatttgatacggttgaggatctgctcaaatatttcaaccccgaatcgtggcaggaggacctggagaacatgtacctggacaccccgcggtaccggggccgatcataccacgacagaaaatccaaagttgacctcgatcgcctgaacgacgatgccaaaagatattcatgcacaccccgcaactattctgtaaacatccgcgaagaactcaagttggccaacgtcgtcttcttcccacggtgcttactggttcaacggtgcggggggaattgtggctgtggcacagtgaactggcgttcttgcacctgcaattctggaaaaactgttaagaagtaccatgaagtgttacagtttgagccggggcacatcaagcgccggggacgggctaagaccatggctttggtcgacatccagctagaccatcatgagagatgcgattgtatctgttcctcacggccccccaggtag

SEQ ID NO: 218310 - DNA, 1113 bp, Artificial Sequence
  derived and/or modified sequence
atgcacagactcattttcgtctataccctgatctgcgccaacttctgcagctgccgagacacaagcgccaccccacagtctgcctcgataaaggcactcaggaacgcgaacctgagacgggatgaatctaatcacctcactgacctgtacagacgcgatgagactatacaggtgaaggggaacgggtacgtgcagtccccaaggtttcccaacagctaccctcgcaacctattgttgacctggcgcctgcacagccaggaaaatacgagaattcaactcgtcttcgacaaccagtttgggctcgaggaggcagaaaacgatatttgccgctatgacttcgtagaagtggaggacataagcgagacctccacaattatcaggggacggtggtgtgggcacaaggaagtcccccctagaatcaagtccagaactaatcagatcaagatcacattcaagtctgatgattacttcgtcgcgaagccaggatttaagatctattactcgctgctcgaagattttcagccagccgctgccagtgagacaaactgggaatcagtgacctcctctattagcggagtatcttacaacagcccaagtgtgactgatccgaccctcattgctgacgctctggataagaagattgccgaattcgatacagtcgaggatcttctgaagtattttaaccctgaatcttggcaggaggacctggagaacatgtatttggacactccgagatacagaggcaggagctaccatgacagaaagagcaaagtggatctcgaccggctgaacgacgacgccaaaaggtacagttgcactccacggaactattcggtgaatatccgggaagagctgaaactggctaatgtcgtattcttccccaggtgtctactggttcagcggtgtggcggtaactgtgggtgtggaacagtcaactggcgctcctgcacctgtaacagcgggaaaacggtgaaaaagtaccatgaggtgctgcagtttgagcctggccacattaagagacggggtagagcaaagacgatggcgctggtcgatatacagctggatcaccatgagcggtgtgattgcatttgcagctcgcgcccaccccgttag

SEQ ID NO: 218311 - DNA, 1113 bp, Artificial Sequence
  derived and/or modified sequence
atgcaccggctgatttttgtgtatacactgatctgcgccaatttttgttcttgtcgagatacatcagccacccctcaatccgcatcgattaaagctcttagaaacgcgaatctgcgaagggacgagtccaatcatctcacagacctatataggcgggacgaaacaatccaggttaagggcaacggttacgttcaatcccccagattccccaacagttatcccagaaatctgttactcacatggagactccacagccaggaaaacacacggattcagcttgtatttgacaaccagttcgggctcgaggaagcggagaacgacatttgccgctatgactttgtcgaagtagaggacattagcgagacatcaaccatcatccgcggccgatggtgcggccacaaagaagtgcctccacggataaagagcagaacaaatcagattaagatcacctttaagtcggacgactattttgtcgcaaagccaggcttcaaaatctactatagtcttctcgaagatttccagccagccgccgccagcgagacaaactgggagagcgttacaagctccataagtggcgtctcctacaatagtccttctgtgacagatccaaccctgatcgccgacgccctggacaaaaagattgccgagttcgatacagttgaagatttgctgaagtattttaacccagagagctggcaggaggatttggagaacatgtacttggataccccccgatatagagggagatcctaccacgataggaaatccaaggtcgacctggaccgtttgaatgacgacgccaagcggtacagctgcacaccaagaaattattccgttaacattcgcgaagaactgaagttggccaatgtcgtgtttttcccaaggtgcctgctcgttcaaagatgtggaggaaattgtggatgtggcactgtgaactggaggtcgtgtacctgcaacagcggcaaaacagtgaaaaagtaccacgaggttctccagttcgagccaggacatatcaagaggagaggacgcgccaaaaccatggccttagttgacatccaactggaccaccatgagcggtgcgactgtatttgcagttcacggccaccacgatag

SEQ ID NO: 218312 - DNA, 1113 bp, Artificial Sequence
  derived and/or modified sequence
atgcatcgtttgatatttgtgtatacccttatttgcgccaacttctgcagctgccgggatacatcggctaccccccaatcagcctctataaaggccctgagaaacgccaacctgagacgagatgaaagtaatcacctcaccgatttgtacaggcgagatgaaactatccaagtgaagggcaatggttacgtacaatccccacgtttccccaattcttacccacggaatcttctattgacatggaggcttcattctcaagagaatactagaatacagctggtcttcgataaccaatttggattagaagaggccgagaacgacatttgtaggtatgacttcgtggaggtggaagacattagcgaaacctcaactattatacggggaagatggtgtggtcacaaagaggtgcccccaagaataaagtctagaacaaatcagattaaaattacattcaagtctgacgactatttcgttgccaaaccagggtttaaaatatactacagcttgctggaggacttccagccagcagccgccagtgaaacaaattgggaatctgttacttcatctatcagtggggtctcgtataatagtccttcagtgaccgacccaactcttattgctgacgctttggataagaaaattgccgagtttgacactgtggaagacctactgaaatatttcaatccagaatcttggcaggaagaccttgagaatatgtacctggatactccacgatatagaggccgcagctatcacgaccggaagtccaaggtagacttagataggcttaatgatgacgctaagaggtactcatgcaccccgaggaattactccgtaaacattagagaggaactgaaattagccaacgtcgtcttcttccctagatgcctgctcgtccagagatgcggaggaaactgtgggtgcggtacagtgaattggcggtcatgtacttgtaactctggaaaaactgtcaagaaatatcacgaggtactgcagtttgagccaggacacatcaagcggcgcggcagggcaaaaacaatggcattggtggatatacagctcgatcaccatgaaagatgtgactgcatttgctccagcaggccccctcgatag

SEQ ID NO: 218313 - DNA, 3801 bp, Artificial Sequence
  derived and/or modified sequence
acacgcgctcggaaagttcagcatgcaggaagtttggggagagctcggcgattagcacagcgacccgggccagcgcagggcgagcgcaggcggcgagagcgcagggcggcgcggcgtcggtcccgggagcagaacccggctttttcttggagcgacgctgtctctagtcgctgatcccaaatgcaccggctcatctttgtctacactctaatctgcgcaaacttttgcagctgtcgggacacttctgcaaccccgcagagcgcatccatcaaagctttgcgcaacgccaacctcaggcgagatgagagcaatcacctcacagacttgtaccgaagagatgagaccatccaggtgaaaggaaacggctacgtgcagagtcctagattcccgaacagctaccccaggaacctgctcctgacatggcggcttcactctcaggagaatacacggatacagctagtgtttgacaatcagtttggattagaggaagcagaaaatgatatctgtaggtatgattttgtggaagttgaagatatatccgaaaccagtaccattattagaggacgatggtgtggacacaaggaagttcctccaaggataaaatcaagaacgaaccaaattaaaatcacattcaagtccgatgactactttgtggctaaacctggattcaagatttattattctttgctggaagatttccaacccgcagcagcttcagagaccaactgggaatctgtcacaagctctatttcaggggtatcctataactctccatcagtaacggatcccactctgattgcggatgctctggacaaaaaaattgcagaatttgatacagtggaagatctgctcaagtacttcaatccagagtcatggcaagaagatcttgagaatatgtatctggacacccctcggtatcgaggcaggtcataccatgaccggaagtcaaaagttgacctggataggctcaatgatgatgccaagcgttacagttgcactcccaggaattactcggtcaatataagagaagagctgaagttggccaatgtggtcttctttccacgttgcctcctcgtgcagcgctgtggaggaaattgtggctgtggaactgtcaactggaggtcctgcacatgcaattcagggaaaaccgtgaaaaagtatcatgaggtattacagtttgagcctggccacatcaagaggaggggtagagctaagaccatggctctagttgacatccagttggatcaccatgaacgatgtgattgtatctgcagctcaagaccacctcgataagagaatgtgcacatccttacattaagcctgaaagaacctttagtttaaggagggtgagataagagacccttttcctaccagcaaccaaacttactactagcctgcaatgcaatgaacacaagtggttgctgagtctcagccttgctttgttaatgccatggcaagtagaaaggtatatcatcaacttctatacctaagaatataggattgcatttaataatagtgtttgaggttatatatgcacaaacacacacagaaatatattcatgtctatgtgtatatagatcaaatgttttttttggtatatataaccaggtacaccagagcttacatatgtttgagttagactcttaaaatcctttgccaaaataagggatggtcaaatatatgaaacatgtctttagaaaatttaggagataaatttatttttaaattttgaaacacaaaacaattttgaatcttgctctcttaaagaaagcatcttgtatattaaaaatcaaaagatgaggctttcttacatatacatcttagttgattattaaaaaaggaaaaatatggtttccagagaaaaggccaatacctaagcattttttccatgagaagcactgcatacttacctatgtggactataataacctgtctccaaaaccatgccataataatataagtgctttagaaattaaatcattgtgttttttatgcattttgctgaggcatgcttattcatttaacacctatctcaaaaacttacttagaaggttttttattatagtcctacaaaagacaatgtataagctgtaacagaattttgaattgtttttctttgcaaaacccctccacaaaagcaaatcctttcaagaatggcatgggcattctgtatgaacctttccagatggtgttcagtgaaagatgtgggtagttgagaacttaaaaagtgaacattgaaacatcgacgtaactggaaattaggtgggatatttgataggatccatatctaataatggattcgaactctccaaactacaccaattaatttaatgtatcttgcttttgtgttcccgtctttttgaaatatagacatggatttataatggcattttatatttggcaggccatcatagattatttacaacctaaaagcttttgtgtatcaaaaaaatcacattttattaatgtaaatttctaatcgtatacttgctcactgttctgatttcctgtttctgaaccaagtaaaatcagtcctagaggctatggttcttaatctatggagcttgctttaagaagccagttgtcaattgtggtaacacaagtttggccctgctgtcctactgtttaatagaaaactgttttacattggttaatggtatttagagtaattttttctctctgcctcctttgtgtctgttttaaaggagactaactccaggagtaggaaatgattcatcatcctccaaagcaagaggcttaagagagaaacaccgaaattcagatagctcagggactgctaacagagaactacatttttcttattgccttgaaagttaaaaggaaagcagatttcttcagtgactttgtggtcctactaactacaaccagtttgggtgacagggctggtaaagtcccagtgttagatgagtgacctaaatatacttagatttctaagtatggtgctctcaggtccaagttcaactattcttaagcagtgcaattcttcccagttatttgagatgaaagatctctgcttattgaagatgtaccttctaaaactttcctaaaagtgtctgatgtttttactcaagaggggagtggtaaaattaaatactctattgttcaattctctaaaatcccagaacacaatcagaaatagctcaggcagacactaataattaagaacgctcttcctcttcataactgctttgcaagtttcctgtgaaaacatcagtttcctgtaccaaagtcaaaatgaacgttacatcactctaacctgaacagctcacaatgtagctgtaaatataaaaaatgagagtgttctacccagttttcaataaaccttccaggctgcaataaccagcaaggttttcagttaaagccctatctgcactttttatttattagctgaaatgtaagcaggcatattcactcacttttctttgcctttcctgagagttttattaaaacttctcccttggttacctgttatcttttgcacttctaacatgtagccaataaatctatttgatagccatcaaaggaataaaaagctggccgtacaaattacatttcaaaacaaaccctaataaatccacatttccgcatggctcattcacctggaataatgccttttattgaatatgttcttatagggcaaaacactttcataagtagagttttttatgttttttgtcatatcggtaacatgcagctttttcctctcatagcattttctatagcgaatgtaatatgcctcttatcttcatgaaaaataaatattgcttttgaacaaaacta

SEQ ID NO: 218314 - DNA, 3997 bp, Artificial Sequence
  derived and/or modified sequence
tctcaggggccgcggccggggctggagaacgctgctgctccgctcgcctgccccgctagattcggcgctgcccgccccctgcagcctgtgctgcagctgccggccaccggagggggcgaacaaacaaacgtcaacctgttgtttgtcccgtcaccatttatcagctcagcaccacaaggaagtgcggcacccacacgcgctcggaaagttcagcatgcaggaagtttggggagagctcggcgattagcacagcgacccgggccagcgcagggcgagcgcaggcggcgagagcgcagggcggcgcggcgtcggtcccgggagcagaacccggctttttcttggagcgacgctgtctctagtcgctgatcccaaatgcaccggctcatctttgtctacactctaatctgcgcaaacttttgcagctgtcgggacacttctgcaaccccgcagagcgcatccatcaaagctttgcgcaacgccaacctcaggcgagatgagagcaatcacctcacagacttgtaccgaagagatgagaccatccaggtgaaaggaaacggctacgtgcagagtcctagattcccgaacagctaccccaggaacctgctcctgacatggcggcttcactctcaggagaatacacggatacagctagtgtttgacaatcagtttggattagaggaagcagaaaatgatatctgtaggtatgattttgtggaagttgaagatatatccgaaaccagtaccattattagaggacgatggtgtggacacaaggaagttcctccaaggataaaatcaagaacgaaccaaattaaaatcacattcaagtccgatgactactttgtggctaaacctggattcaagatttattattctttgctggaagatttccaacccgcagcagcttcagagaccaactgggaatctgtcacaagctctatttcaggggtatcctataactctccatcagtaacggatcccactctgattgcggatgctctggacaaaaaaattgcagaatttgatacagtggaagatctgctcaagtacttcaatccagagtcatggcaagaagatcttgagaatatgtatctggacacccctcggtatcgaggcaggtcataccatgaccggaagtcaaaagttgacctggataggctcaatgatgatgccaagcgttacagttgcactcccaggaattactcggtcaatataagagaagagctgaagttggccaatgtggtcttctttccacgttgcctcctcgtgcagcgctgtggaggaaattgtggctgtggaactgtcaactggaggtcctgcacatgcaattcagggaaaaccgtgaaaaagtatcatgaggtattacagtttgagcctggccacatcaagaggaggggtagagctaagaccatggctctagttgacatccagttggatcaccatgaacgatgtgattgtatctgcagctcaagaccacctcgataagagaatgtgcacatccttacattaagcctgaaagaacctttagtttaaggagggtgagataagagacccttttcctaccagcaaccaaacttactactagcctgcaatgcaatgaacacaagtggttgctgagtctcagccttgctttgttaatgccatggcaagtagaaaggtatatcatcaacttctatacctaagaatataggattgcatttaataatagtgtttgaggttatatatgcacaaacacacacagaaatatattcatgtctatgtgtatatagatcaaatgttttttttggtatatataaccaggtacaccagagcttacatatgtttgagttagactcttaaaatcctttgccaaaataagggatggtcaaatatatgaaacatgtctttagaaaatttaggagataaatttatttttaaattttgaaacacaaaacaattttgaatcttgctctcttaaagaaagcatcttgtatattaaaaatcaaaagatgaggctttcttacatatacatcttagttgattattaaaaaaggaaaaatatggtttccagagaaaaggccaatacctaagcattttttccatgagaagcactgcatacttacctatgtggactataataacctgtctccaaaaccatgccataataatataagtgctttagaaattaaatcattgtgttttttatgcattttgctgaggcatgcttattcatttaacacctatctcaaaaacttacttagaaggttttttattatagtcctacaaaagacaatgtataagctgtaacagaattttgaattgtttttctttgcaaaacccctccacaaaagcaaatcctttcaagaatggcatgggcattctgtatgaacctttccagatggtgttcagtgaaagatgtgggtagttgagaacttaaaaagtgaacattgaaacatcgacgtaactggaaattaggtgggatatttgataggatccatatctaataatggattcgaactctccaaactacaccaattaatttaatgtatcttgcttttgtgttcccgtctttttgaaatatagacatggatttataatggcattttatatttggcaggccatcatagattatttacaacctaaaagcttttgtgtatcaaaaaaatcacattttattaatgtaaatttctaatcgtatacttgctcactgttctgatttcctgtttctgaaccaagtaaaatcagtcctagaggctatggttcttaatctatggagcttgctttaagaagccagttgtcaattgtggtaacacaagtttggccctgctgtcctactgtttaatagaaaactgttttacattggttaatggtatttagagtaattttttctctctgcctcctttgtgtctgttttaaaggagactaactccaggagtaggaaatgattcatcatcctccaaagcaagaggcttaagagagaaacaccgaaattcagatagctcagggactgctaacagagaactacatttttcttattgccttgaaagttaaaaggaaagcagatttcttcagtgactttgtggtcctactaactacaaccagtttgggtgacagggctggtaaagtcccagtgttagatgagtgacctaaatatacttagatttctaagtatggtgctctcaggtccaagttcaactattcttaagcagtgcaattcttcccagttatttgagatgaaagatctctgcttattgaagatgtaccttctaaaactttcctaaaagtgtctgatgtttttactcaagaggggagtggtaaaattaaatactctattgttcaattctctaaaatcccagaacacaatcagaaatagctcaggcagacactaataattaagaacgctcttcctcttcataactgctttgcaagtttcctgtgaaaacatcagtttcctgtaccaaagtcaaaatgaacgttacatcactctaacctgaacagctcacaatgtagctgtaaatataaaaaatgagagtgttctacccagttttcaataaaccttccaggctgcaataaccagcaaggttttcagttaaagccctatctgcactttttatttattagctgaaatgtaagcaggcatattcactcacttttctttgcctttcctgagagttttattaaaacttctcccttggttacctgttatcttttgcacttctaacatgtagccaataaatctatttgatagccatcaaaggaataaaaagctggccgtacaaattacatttcaaaacaaaccctaataaatccacatttccgcatggctcattcacctggaataatgccttttattgaatatgttcttatagggcaaaacactttcataagtagagttttttatgttttttgtcatatcggtaacatgcagctttttcctctcatagcattttctatagcgaatgtaatatgcctcttatcttcatgaaaaataaatattgcttttgaacaaaactaaaaa

SEQ ID NO: 218315 - RNA, 1113 nt, Artificial Sequence
  derived and/or modified sequence
augcaccggcugauuuuuguguauacacugaucugcgccaauuuuuguucuugucgagauacaucagccaccccucaauccgcaucgauuaaagcucuuagaaacgcgaaucugcgaagggacgaguccaaucaucucacagaccuauauaggcgggacgaaacaauccagguuaagggcaacgguuacguucaaucccccagauuccccaacaguuaucccagaaaucuguuacucacauggagacuccacagccaggaaaacacacggauucagcuuguauuugacaaccaguucgggcucgaggaagcggagaacgacauuugccgcuaugacuuugucgaaguagaggacauuagcgagacaucaaccaucauccgcggccgauggugcggccacaaagaagugccuccacggauaaagagcagaacaaaucagauuaagaucaccuuuaagucggacgacuauuuugucgcaaagccaggcuucaaaaucuacuauagucuucucgaagauuuccagccagccgccgccagcgagacaaacugggagagcguuacaagcuccauaaguggcgucuccuacaauaguccuucugugacagauccaacccugaucgccgacgcccuggacaaaaagauugccgaguucgauacaguugaagauuugcugaaguauuuuaacccagagagcuggcaggaggauuuggagaacauguacuuggauaccccccgauauagagggagauccuaccacgauaggaaauccaaggucgaccuggaccguuugaaugacgacgccaagcgguacagcugcacaccaagaaauuauuccguuaacauucgcgaagaacugaaguuggccaaugucguguuuuucccaaggugccugcucguucaaagauguggaggaaauuguggauguggcacugugaacuggaggucguguaccugcaacagcggcaaaacagugaaaaaguaccacgagguucuccaguucgagccaggacauaucaagaggagaggacgcgccaaaaccauggccuuaguugacauccaacuggaccaccaugagcggugcgacuguauuugcaguucacggccaccacgauag

SEQ ID NO: 218316 - RNA, 1113 nt, Artificial Sequence
  derived and/or modified sequence
augcaucguuugauauuuguguauacccuuauuugcgccaacuucugcagcugccgggauacaucggcuaccccccaaucagccucuauaaaggcccugagaaacgccaaccugagacgagaugaaaguaaucaccucaccgauuuguacaggcgagaugaaacuauccaagugaagggcaaugguuacguacaauccccacguuuccccaauucuuacccacggaaucuucuauugacauggaggcuucauucucaagagaauacuagaauacagcuggucuucgauaaccaauuuggauuagaagaggccgagaacgacauuuguagguaugacuucguggagguggaagacauuagcgaaaccucaacuauuauacggggaagaugguguggucacaaagaggugcccccaagaauaaagucuagaacaaaucagauuaaaauuacauucaagucugacgacuauuucguugccaaaccaggguuuaaaauauacuacagcuugcuggaggacuuccagccagcagccgccagugaaacaaauugggaaucuguuacuucaucuaucaguggggucucguauaauaguccuucagugaccgacccaacucuuauugcugacgcuuuggauaagaaaauugccgaguuugacacuguggaagaccuacugaaauauuucaauccagaaucuuggcaggaagaccuugagaauauguaccuggauacuccacgauauagaggccgcagcuaucacgaccggaaguccaagguagacuuagauaggcuuaaugaugacgcuaagagguacucaugcaccccgaggaauuacuccguaaacauuagagaggaacugaaauuagccaacgucgucuucuucccuagaugccugcucguccagagaugcggaggaaacugugggugcgguacagugaauuggcggucauguacuuguaacucuggaaaaacugucaagaaauaucacgagguacugcaguuugagccaggacacaucaagcggcgcggcagggcaaaaacaauggcauugguggauauacagcucgaucaccaugaaagaugugacugcauuugcuccagcaggcccccucgauag

SEQ ID NO: 218317 - protein, 836 aa, Artificial Sequence
  derived and/or modified sequence
MSKLSFRARALDASKPLPVFRCEDLPDLHEYASINRAVPQMPTGMEKEEESEHHLQRAISAQQVYGEKRDNMVIPVPEAESNIAYYESIYPGEFKMPKQLIHIQPFSLDAEQPDYDLDSEDEVFVNKLKKKMDICPLQFEEMIDRLEKGSGQQPVSLQEAKLLLKEDDELIREVYEYWIKKRKNCRGPSLIPSVKQEKRDGSSTNDPYVAFRRRTEKMQTRKNRKNDEASYEKMLKLRRDLSRAVTILEMIKRREKSKRELLHLTLEIMEKRYNLGDYNGEIMSEVMAQRQPMKPTYAIPIIPITNSSQFKHQEAMDVKEFKVNKQDKADLIRPKRKYEKKPKVLPSSAAATPQQTSPAALPVFNAKDLNQYDFPSSDEEPLSQVLSGSSEAEEDNDPDGPFAFRRKAGCQYYAPHLDQTGNWPWTSPKDGGLGDVRYRYCLTTLTVPQRCIGFARRRVGRGGRVLLDRAHSDYDSVFHHLDLEMLSSPQHSPVNQFANTSETNTSDKSFSKDLSQILVNIKSCRWRHFRPRTPSLHDSDNDELSCRKLYRSINRTGTAQPGTQTCSTSTQSKSSSGSAHFAFTAEQYQQHQQQLALMQKQQLAQIQQQQANSNSSTNTSQNLASNQQKSGFRLNIQGLERTLQGFVSKTLDSASAQFAASALVTSEQLMGFKMKDDVVLGIGVNGVLPASGVYKGLHLSSTTPTALVHTSPSTAGSALLQPSNITQTSSSHSALSHQVTAANSATTQVLIGNNIRLTVPSSVATVNSIAPINARHIPRTLSAVPSSALKLAAAANCQVSKVPSSSSVDSVPRENHESEKPALNNIADNTVAMEVT

SEQ ID NO: 218318 - DNA, 2511 bp, Artificial Sequence
  derived and/or modified sequence
atgagtaaactttctttccgagcgcgggcgctcgacgcctcaaaacccttaccggtctttcggtgtgaggatctgcccgacttgcatgaatatgcatccattaacagagctgtgcctcagatgcctaccggcatggagaaggaggaggagtctgaacaccatttgcaacgcgctatctctgcacaacaagtgtatggcgagaaacgggataacatggtgataccagtccctgaagccgagagcaacattgcttactacgagagcatctaccccggggagtttaagatgcctaagcagttgattcacatccagccattctccctggacgcagagcagcctgattatgaccttgattcagaagatgaggtgttcgtaaacaagcttaagaagaagatggatatctgcccactgcagttcgaggagatgatcgatcggctcgagaaaggctcaggacagcaacctgtctctctgcaggaggccaagcttctccttaaagaagacgacgagcttataagagaagtttacgagtattggattaaaaagaggaaaaattgtagaggaccaagccttataccctccgtgaagcaggaaaaacgagacggatcctctacaaacgatccctatgtcgctttcagaagaaggactgagaaaatgcagacacgtaagaataggaaaaatgatgaagcctcatacgagaaaatgcttaagctgaggagagatctgtctcgtgctgtgacaatcctggagatgatcaagagaagggagaagtccaaaagagaactgctccacttgacgttggaaatcatggagaagaggtataacctcggagactataacggggagatcatgagtgaagtcatggcccagcggcagcccatgaagcccacctatgccatccctattatccctatcaccaatagtagtcagtttaagcaccaggaggcgatggatgtcaaggagttcaaggtgaataagcaggacaaggctgatctgattcggcccaagcggaaatacgagaaaaaacccaaggtcctaccaagcagtgctgcagccactcctcaacagacttctcctgcagcgttgcctgtgttcaatgcgaaagatctaaaccagtacgatttcccctcctcagacgaagaacccctgagccaggtcctttccgggagctcggaggccgaggaagacaacgatcccgatggccccttcgcattcaggaggaaggcgggctgccaatactatgcccctcacctcgaccagacaggcaactggccctggacatcgcctaaggacgggggactgggggatgtgaggtatagatactgcttgaccacactgactgttccgcagagatgtataggctttgccagacgacgggtgggacgtgggggcagagtcctgcttgatagagcccattcagactacgactccgtctttcaccacctggaccttgaaatgctgtcaagtccccaacattcgcctgtcaaccagtttgcaaacacaagcgagaccaatacatctgacaaatccttctctaaagacctctcgcagatactagtcaacatcaaatcttgtaggtggcgccattttagaccccgaactcccagtctccacgattccgataatgatgagttatcgtgccgaaaactctatagatccatcaataggactgggaccgctcaacccggcactcaaacctgcagcacctccacccagtcaaaatcttctagcggctctgcacactttgctttcaccgcagagcagtaccagcagcaccagcagcagcttgccctgatgcagaagcagcagttggcccagattcagcagcagcaagccaacagcaactcatcaactaacacaagccaaaacttagcctctaaccagcagaagtctggattccggctgaacatccagggcctcgaaaggaccctacaggggtttgtctcaaagacactcgatagcgccagcgcgcagtttgctgcttccgcattggtgacgtcagagcaactgatgggtttcaagatgaaggatgacgtcgtgcttggcatcggcgtcaacggcgtactacctgcaagtggcgtgtacaaaggcctgcacctgtctagcactacacccacagccttggttcatacctctccctctaccgccgggagcgccctgctccaaccttctaatattacacagacaagctccagtcactccgccttaagccatcaggttaccgcagccaactctgccactactcaagttctcataggaaataatatacgcctaaccgttcccagctccgtggccaccgtgaacagtatagcacccatcaatgctaggcacatcccccggaccctgtcagccgttcctagttccgccctcaaactggctgccgcagcaaactgccaagtgtccaaggtcccgtccagctcatccgtggacagtgtccctcgtgagaatcacgaatccgaaaaacctgctttaaacaatatcgcggacaacaccgttgccatggaggttacatag

SEQ ID NO: 218319 - DNA, 2511 bp, Artificial Sequence
  derived and/or modified sequence
atgagcaagctgtccttccgggcccgggccctggatgccagcaagcccctgcccgtcttccgctgtgaggacctgcctgacctgcatgaatatgccagcatcaacagagctgtgccccagatgcccaccggcatggagaaggaggaggagagcgagcaccacctgcagagggccatcagcgcccagcaggtgtatggagagaagagggacaacatggtgattcctgtgcctgaggccgagagcaacatcgcctactatgagagcatctacccaggagagttcaagatgcccaagcagctgatccacatccagcccttcagcctggatgctgagcagcctgactatgacctggacagtgaagatgaggtgtttgtgaacaagctgaagaagaagatggacatctgccccctgcagtttgaggagatgattgaccggctggagaagggcagcggccagcagcctgtgtccctgcaggaggccaagctgctgctgaaggaggatgatgagctgatccgggaggtgtatgagtactggatcaagaagaggaagaactgccggggccccagcctcatccccagcgtgaagcaggagaagagagatggcagcagcaccaatgacccctacgtggccttcagaagaagaacagagaagatgcagaccaggaagaacaggaagaatgatgaggccagctatgagaagatgctgaagctgcggcgggacctgagcagagctgtgaccatcctggagatgatcaagagaagagagaagagcaagcgggagctgctgcacctgaccctggagatcatggagaagcgctacaacctgggggactacaatggagagatcatgtctgaggtgatggcccagaggcagcccatgaagcccacctacgccatccccatcatccccatcaccaacagcagccagttcaagcaccaggaggccatggatgtgaaggagttcaaggtgaacaagcaggacaaggctgacctgatccggcccaagaggaaatatgagaagaagcccaaggtgctgcccagcagcgctgctgccaccccccagcagaccagccctgctgccctgcccgtcttcaatgccaaggacctgaaccagtatgacttccccagcagtgatgaggagcccctgagccaggtgctgagcggcagcagcgaggccgaggaggacaatgaccctgatggcccctttgccttccggaggaaggccggctgccagtactatgccccccacctggaccagacaggcaactggccctggaccagccccaaggatggcggcctgggagatgtgcgctaccgctactgcctgaccaccctgactgtgccccagcgctgcatcggctttgccaggagaagagtgggccggggcggccgggtgctgctggaccgggcccacagcgactatgacagcgtcttccaccacctggacctggagatgctgagcagcccccagcacagccctgtgaaccagtttgccaacaccagcgagaccaacaccagtgacaagagcttcagcaaggacctgagccagatcctggtgaacatcaagagctgccgctggaggcacttccggcccaggacccccagcctgcatgacagcgacaatgatgagctgagctgcaggaagctgtaccgcagcatcaacagaactggaacagcccagcccggcacccagacctgcagcaccagcacccagagcaagagcagcagcggcagcgcccactttgccttcaccgctgagcagtaccagcagcaccagcagcagctggccctgatgcagaagcagcagctggcccagatccagcagcagcaggccaacagcaacagcagcaccaacaccagccagaacctggccagcaaccagcagaagagcggcttccggctgaacatccagggcctggagaggaccctgcagggctttgtgtccaagaccctggacagcgccagcgcccagtttgctgccagcgccctggtgaccagcgagcagctgatgggcttcaagatgaaggatgatgtggtgctgggcatcggcgtgaatggagtgctgcctgccagcggcgtgtacaagggcctgcacctgagcagcaccacccccacagccctggtgcacaccagccccagcacagctggcagcgccctgctgcagcccagcaacatcacccagaccagcagcagccacagcgccctgagccaccaggtgacagctgccaacagcgccaccacccaggtgctgattggcaacaacatccggctgactgtgcccagctctgtggccaccgtgaacagcatcgcccccatcaatgcccggcacatccccaggaccctgtctgctgtgcccagcagcgccctgaagctggccgccgccgccaactgccaggtgtccaaggtgcccagcagcagctctgtggacagcgtgccccgggagaaccacgagagcgagaagccagccctgaacaacattgctgacaacacagtggccatggaggtgacctag

SEQ ID NO: 218320 - DNA, 2511 bp, Artificial Sequence
  derived and/or modified sequence
atgagcaagctgagcttccgggcccgggccctggacgccagcaagcccttaccggtcttccgatgtgaggacctcccagacctgcatgagtacgcctccatcaatcgagcagtgcctcagatgcccactggaatggaaaaagaggaagagtcagagcaccacctccagagggcgatctccgcacagcaggtgtacggtgaaaagagggacaatatggtcatccccgttccagaggccgaatctaacatcgcttactatgagtcgatatatcccggcgaatttaagatgcctaagcaattaatacatatccagccttttagcctcgatgctgagcagcctgattatgacctggattcggaagatgaagttttcgtcaataagctcaaaaaaaagatggatatttgccctcttcagttcgaagagatgatcgatcgcctcgaaaaggggtcggggcagcaacccgtctcccttcaagaagccaagctgctgctgaaggaggacgatgagctgattcgcgaagtttacgagtattggattaaaaagcgtaagaactgtcgcgggccttccctgattcctagcgtcaaacaggaaaaaagagacggatcctccacaaacgacccgtacgttgcatttagaagaaggaccgagaagatgcagactcggaaaaacaggaaaaacgacgaagcatcatacgaaaagatgcttaagctaaggcgagatctgtctagagccgttaccatcctggagatgattaaacggagagaaaagtcgaagcgcgagctactgcacctgactctggagattatggagaaacgatataatctaggtgactataacggtgaaattatgtccgaggtgatggcacaaaggcagcccatgaagcctacatacgcaatcccgattattcccataaccaacagctcgcagttcaaacaccaggaggctatggatgttaaagagtttaaggtaaacaagcaggacaaggctgacctgattcgccccaaaagaaagtacgaaaaaaagccaaaagtgctcccttcctcagccgcggccacgcctcaacagacatctcccgccgcactgccagtatttaatgccaaggacctgaaccagtacgacttcccaagctccgacgaggagcccctaagccaggtcttgtcaggctctagtgaggccgaagaggacaacgaccctgatggacccttcgctttccgccgtaaggccggctgtcaatactatgccccacatctcgaccagacaggaaactggccgtggacatcacccaaagacgggggcctgggtgatgtcaggtataggtactgcctgaccactttgaccgtgccacaacggtgcatcgggtttgcgcgcagaagagtcggtagaggcggtcgagtcttgctggacagagcacactccgattacgattccgtgttccaccacctcgatctcgaaatgcttagtagccctcagcattctccagtcaatcaattcgcaaacacatcagaaacaaataccagcgataaatcgttctctaaggacctatctcagatcttagtcaacatcaagagctgtcggtggcgccactttagacctagaaccccctccttgcatgacagtgataatgatgaattatcatgtcgaaaactctatagatccataaaccgaacgggaactgcccagcccggaacccaaacatgttcaacctcaacgcaatccaagagctcgtctggaagcgcccacttcgccttcactgccgaacaataccagcagcatcaacagcagctggctctgatgcagaaacagcagttagcgcagatccaacaacagcaggccaacagtaactcttctactaatacctcccaaaatctcgcgagtaatcagcagaaaagtggttttcgcctgaatattcagggactggaaagaaccctccagggatttgtgtcaaagaccctagactctgcaagcgctcagttcgccgcaagtgcactggtcacatcagaacagctcatggggtttaaaatgaaagacgacgtggtcttggggatcggcgtaaatggcgtactgcccgccagtggggtgtacaaagggctgcaccttagctccacaacacctaccgccctagtgcatacatctccatcaactgcagggtccgctcttttacagccctccaatatcacacagacgtcatcaagccacagcgcattgtcacatcaggtaaccgccgccaactcggccaccactcaagttctgattggtaacaatataaggctgaccgtgcctagctccgtggctacagtcaattcaattgcccctatcaacgcccgccatattccacgaactctctcagctgtcccatcaagcgctctgaaactcgcagcagccgcgaattgccaagtgtctaaggtgcccagctctagtagtgtggattcggtgcccagagaaaatcatgagagcgaaaaaccagccttgaataacattgccgacaacacggttgccatggaagtgacttag

SEQ ID NO: 218321 - DNA, 2511 bp, Artificial Sequence
  derived and/or modified sequence
atgtccaagctgagctttcgcgcacgcgcactcgacgcatctaaacctctgccagttttcaggtgtgaggacctccccgacttacacgaatatgcaagcattaatcgtgctgtccctcagatgcccacaggtatggaaaaagaagaagagtctgagcatcacctccagcgggcaatttctgcacagcaggtttatggtgaaaaaagggataatatggttattccagtgccagaagcagaaagcaacatagcctattatgaaagcatataccctggcgaatttaagatgcccaagcagttgatacacatccagccatttagcttagatgccgagcagcccgactatgaccttgattcagaagacgaggttttcgtgaataaactaaagaaaaagatggatatctgcccccttcagttcgaggagatgattgatcgacttgagaaagggtccggacagcagcctgtgtcgctgcaggaagccaaattgctcttgaaggaggatgatgagctgatcagagaggtgtacgaatattggatcaaaaaacgcaaaaattgtcgaggcccaagtttaatcccttccgttaagcaggagaaacgggatggcagcagcacaaatgacccctacgtggcctttcgacggaggacagaaaagatgcagacgagaaaaaatcgaaagaacgatgaggcctcatacgaaaagatgcttaaactgcgcagggacctctcacgtgcagttacaatccttgaaatgattaagcggagagagaagagcaaaagagaactcttacaccttaccctggaaattatggaaaaaagatacaacctgggcgattacaatggtgagatcatgtctgaagtaatggcccagagacagcccatgaagcccacgtatgctatccccataatccccatcaccaacagtagccaatttaaacatcaggaggctatggatgtgaaggagtttaaagtcaacaagcaggacaaagcagatctgatcagaccaaagcgcaagtacgaaaaaaagcctaaggtgctcccctcctccgcagctgccacccctcagcaaaccagccctgcagctctcccagtattcaatgccaaggatctgaaccaatacgattttccctcatcagatgaggagcctctgtctcaagtgttaagcggatccagcgaggcagaagaggacaatgatccagacggcccattcgctttcagaaggaaagcaggatgccagtattacgctccacaccttgatcaaacgggaaactggccatggactagccccaaggacggaggactgggagacgtgcggtatagatattgcttgactactcttacggtgccacagcggtgcattggttttgcacggcgaagggttggacggggaggcagagttctgcttgatcgcgctcatagcgactacgacagcgtgtttcatcacctggatctcgagatgctcagcagcccacagcactcccccgttaatcagtttgcgaataccagcgagacaaatacatctgacaaatcatttagtaaggatttatcacagatcctggttaatatcaaaagttgtcggtggcgacatttccgtccacgcaccccatctctgcacgactctgataacgacgaactgtcttgtaggaaattgtaccgttccatcaaccgaacaggcacagctcagcccggaacccagacctgctccacatctacacagagcaaatcctcctctggtagcgcccatttcgccttcacagcagagcagtatcaacagcatcaacagcagttagcactcatgcagaagcagcaactggcccagattcagcagcagcaagcaaattccaactcttccaccaataccagccaaaacctggcttccaaccagcaaaagtctggcttccgcctgaacattcagggactggaacgcactctgcaaggattcgtgtcaaagaccttggactccgccagcgctcagttcgcagcaagtgcactggtgactagtgagcaactgatgggtttcaagatgaaggacgacgtggtattaggcataggcgtcaatggcgtgcttcctgcttccggcgtttacaaaggtttgcacctctcaagtacgacgcctaccgctttagtccacacgagcccatccacggccggtagtgcacttctacagccttcaaatataacacagactagtagcagccactcagcgctgtctcaccaagtgaccgccgctaattcagccaccactcaagtgctgatcggaaacaacattcgactgaccgttcctagctctgtggctacggttaattccatagcgcctattaatgctaggcatatccccaggacgttaagcgcagtgccatcatcagccttaaaattagccgctgctgccaactgccaagtgagcaaagtaccctcctctagcagtgtggattccgtgccaagagagaaccacgagagcgagaagccagccctaaacaatatcgccgacaataccgtagcaatggaagtgacatag

SEQ ID NO: 218322 - DNA, 2511 bp, Artificial Sequence
  derived and/or modified sequence
atgagcaagctgagcttcagagccagagccctggacgccagcaagcccctgcccgtgttcagatgcgaggacctgcccgacctgcacgagtacgccagcatcaacagagccgtgccccagatgcccaccggcatggagaaggaggaggagagcgagcaccacctgcagagagccatcagcgcccagcaggtgtacggcgagaagagagacaacatggtgatccccgtgcccgaggccgagagcaacatcgcctactacgagagcatctaccccggcgagttcaagatgcccaagcagctgatccacatccagcccttcagcctggacgccgagcagcccgactacgacctggacagcgaggacgaggtgttcgtgaacaagctgaagaagaagatggacatctgccccctgcagttcgaggagatgatcgacagactggagaagggcagcggccagcagcccgtgagcctgcaggaggccaagctgctgctgaaggaggacgacgagctgatcagagaggtgtacgagtactggatcaagaagagaaagaactgcagaggccccagcctgatccccagcgtgaagcaggagaagagagacggcagcagcaccaacgacccctacgtggccttcagaagaagaaccgagaagatgcagaccagaaagaacagaaagaacgacgaggccagctacgagaagatgctgaagctgagaagagacctgagcagagccgtgaccatcctggagatgatcaagagaagagagaagagcaagagagagctgctgcacctgaccctggagatcatggagaagagatacaacctgggcgactacaacggcgagatcatgagcgaggtgatggcccagagacagcccatgaagcccacctacgccatccccatcatccccatcaccaacagcagccagttcaagcaccaggaggccatggacgtgaaggagttcaaggtgaacaagcaggacaaggccgacctgatcagacccaagagaaagtacgagaagaagcccaaggtgctgcccagcagcgccgccgccaccccccagcagaccagccccgccgccctgcccgtgttcaacgccaaggacctgaaccagtacgacttccccagcagcgacgaggagcccctgagccaggtgctgagcggcagcagcgaggccgaggaggacaacgaccccgacggccccttcgccttcagaagaaaggccggctgccagtactacgccccccacctggaccagaccggcaactggccctggaccagccccaaggacggcggcctgggcgacgtgagatacagatactgcctgaccaccctgaccgtgccccagagatgcatcggcttcgccagaagaagagtgggcagaggcggcagagtgctgctggacagagcccacagcgactacgacagcgtgttccaccacctggacctggagatgctgagcagcccccagcacagccccgtgaaccagttcgccaacaccagcgagaccaacaccagcgacaagagcttcagcaaggacctgagccagatcctggtgaacatcaagagctgcagatggagacacttcagacccagaacccccagcctgcacgacagcgacaacgacgagctgagctgcagaaagctgtacagaagcatcaacagaaccggcaccgcccagcccggcacccagacctgcagcaccagcacccagagcaagagcagcagcggcagcgcccacttcgccttcaccgccgagcagtaccagcagcaccagcagcagctggccctgatgcagaagcagcagctggcccagatccagcagcagcaggccaacagcaacagcagcaccaacaccagccagaacctggccagcaaccagcagaagagcggcttcagactgaacatccagggcctggagagaaccctgcagggcttcgtgagcaagaccctggacagcgccagcgcccagttcgccgccagcgccctggtgaccagcgagcagctgatgggcttcaagatgaaggacgacgtggtgctgggcatcggcgtgaacggcgtgctgcccgccagcggcgtgtacaagggcctgcacctgagcagcaccacccccaccgccctggtgcacaccagccccagcaccgccggcagcgccctgctgcagcccagcaacatcacccagaccagcagcagccacagcgccctgagccaccaggtgaccgccgccaacagcgccaccacccaggtgctgatcggcaacaacatcagactgaccgtgcccagcagcgtggccaccgtgaacagcatcgcccccatcaacgccagacacatccccagaaccctgagcgccgtgcccagcagcgccctgaagctggccgccgccgccaactgccaggtgagcaaggtgcccagcagcagcagcgtggacagcgtgcccagagagaaccacgagagcgagaagcccgccctgaacaacatcgccgacaacaccgtggccatggaggtgacctag

SEQ ID NO: 218323 - DNA, 2913 bp, Artificial Sequence
  derived and/or modified sequence
gaatggctggggttggctgaagagcgcacagtggagttttaatgtccgccatgttggccatggcgtattgaagagagcgagcgagagaggagcggagcggcacagcctcccaccctcccggctggtgttagtgcccggacggcgggctctgcgctccgcccctcaagtccccggcagcggttggcgagtggggaccgaacccccggttctccatgatcccgctggccggggccgtttccccagagcggagaggtatctgctgcgcctgagatgagtaaactgtcgtttcgggcgcgggcgctagacgcctcgaagccgctgccggttttccgctgtgaggatctgcccgacctgcacgaatacgcctcgataaacagggccgtgccgcagatgcccaccggaatggagaaggaagaggagtcggaacatcatcttcagcgggctatttcagcacagcaggtgtatggcgagaagagggataatatggttataccggtcccagaggcagaaagtaatattgcttactatgagtctatatatcctggggaatttaagatgccaaagcagctcattcacatacagccttttagtttggatgctgaacagcctgattatgatttggattctgaagatgaagtatttgtgaataaactgaaaaagaaaatggacatctgcccattgcaatttgaggagatgattgaccgcctagaaaaaggcagtggtcagcagccagtcagtctgcaggaagccaaactactgctaaaagaagatgatgaactaattagagaagtttatgaatattggattaaaaagagaaaaaactgtcgagggccatctcttattccatcagtaaaacaagagaagcgagatggttccagcacaaatgatccttatgtggcttttagaaggcgtactgaaaaaatgcagactcgaaaaaatcgcaaaaatgatgaagcctcttacgaaaaaatgcttaagctgcgacgagatctaagtcgagctgttactattctagagatgataaaaagaagagaaaaaagtaaaagagagctattgcacttaacactggaaattatggaaaagaggtataatttgggcgactacaatggagagatcatgtctgaggttatggcacagagacagccaatgaaacctacttatgccatccccatcatccctattactaatagcagtcaatttaaacaccaggaagcaatggatgtgaaggagttcaaagttaataagcaagataaagccgatcttatccgaccgaaacggaaatatgaaaagaagcccaaagtcttaccatcgtctgccgctgctactccccaacagacgagtcctgctgcactgccagtcttcaatgctaaagatctgaatcagtatgactttcccagctcagacgaagaacctctctcccaggttttgtctggctcttcggaagctgaggaagacaatgatcctgatggtccttttgctttccgtaggaaagcaggctgtcagtactatgctcctcacttagaccaaactggcaactggccttggactagtcctaaagatggaggattaggggatgtgcgatatagatactgcttaactactctcaccgtaccccaaaggtgtattggatttgcacgaagacgggttgggcgcggtggaagggtcttactggacagagctcattcagactatgacagtgtgtttcaccatctggatttggaaatgctttcctcaccacaacattctccagtcaatcagtttgccaatacctcagaaacaaatacctcggacaaatctttctctaaagacctcagtcagatactagtcaatatcaaatcatgtagatggcggcattttaggcctcggacaccatccctacatgacagtgacaatgatgaactctcctgtagaaaattatataggagtataaaccgaacaggaacagcacaacctgggacccagacatgcagtacctctacgcaaagtaaaagtagcagtggttcagcacactttgcatttacagccgaacaataccagcaacatcaacagcaactggcactcatgcagaaacagcagcttgcacaaattcagcaacagcaagcaaatagtaattcctccaccaacacatcacagaaccttgcatctaaccagcagaaaagtggctttcgcctgaatatacagggtttagaaagaacactacagggttttgtttctaagactttggattctgctagtgcacagtttgctgcttctgctttggtgacatcagaacaactgatgggattcaagatgaaggatgatgtggtgcttggaatcggggtgaatggcgtccttccagcctcaggagtatacaagggcttacacctcagtagtactacaccaacagcacttgtacatacaagtccatcaacggcaggttcagctttgttacagccttcaaatattacacagacttcaagttcccacagtgcactgagtcatcaagtaactgctgccaattctgcaacaactcaggttctgattgggaacaacattcgattaactgtaccttcatcagttgccactgtaaactctattgccccaataaatgcacgacatatacctaggactttaagtgctgttccatcatctgccttaaagctggccgctgcagcaaactgtcaagtttccaaggtcccatcttcatcctctgtagattcagttccaagggaaaatcatgaatcagaaaagccagcactgaacaacatagcagacaacacagtagcgatggaggtgacgtagcttcctccgagtggaactgcagcctggggacttgattaggtgctatgcatcagtagcattttgaatgcaagggatgatggaaagcagcacatgcgtttctgtggcagctgtggggacttgacagcaatgctc

SEQ ID NO: 218324 - protein, 198 aa, Artificial Sequence
  derived and/or modified sequence
MHHRNDSQRLGKAGCPPEPSLQMANTNFLSTLSPEHCRPLAGECMNKLKCGAAEAEIMNLPERVGTFSAIPALGGISLPPGVIVMTALHSPAAASAAVTDSAFQIANLADCPQNHSSSSSSSSGGAGGANPAKKKRKRCGVCVPCKRLINCGVCSSCRNRKTGHQICKFRKCEELKKKPGTSLERTPVPSAEAFRWFF

SEQ ID NO: 218325 - DNA, 597 bp, Artificial Sequence
  derived and/or modified sequence
atgcaccaccgcaatgattcccagcgactcggaaaggccgggtgccctccagagccatccctgcagatggccaatacaaacttcttgagcaccctgagtccagaacattgccggcctcttgctggcgagtgcatgaacaagcttaaatgtggggcagcggaagccgagatcatgaacttgccagaacgggtgggaacgtttagtgcaattcccgccctgggtggaatatctttgccccccggagtcatcgtgatgaccgctctccattcccctgccgccgcaagtgctgcagtgaccgactcggccttccagattgctaatctggccgattgccctcagaaccattccagttctagctctagttcttctggaggcgcaggcggagcgaaccccgctaaaaagaaacgcaagcgatgcggagtatgtgtaccttgcaagagattaatcaactgtggggtatgctccagttgcaggaatcggaaaacagggcaccagatttgcaagttcaggaaatgtgaagagctgaagaaaaagcccggaacttcactagagagaactccggtgccatcggccgaggcattcaggtggttcttctag

SEQ ID NO: 218326 - DNA, 597 bp, Artificial Sequence
  derived and/or modified sequence
atgcatcacaggaacgactctcagagacttggtaaggctggctgtcccccagagccgagcctccaaatggcgaacactaactttctgagcactctgtcacccgaacattgtcgccctctggcaggcgaatgcatgaacaagctcaagtgcggcgcggctgaggccgaaatcatgaaccttcccgaaagggtagggactttctcagccattccggcgttggggggtatcagcctgccccccggggtgattgtgatgaccgccctgcactctcctgctgccgcgagcgcagcagtcaccgatagtgccttccagatcgccaacctggccgattgcccccagaaccactcctcttcaagctcgtcctcatctggtggcgcagggggtgctaatcctgccaagaagaaacggaagcgctgcggcgtttgtgtgccgtgtaagaggttgattaattgtggggtgtgttctagctgtagaaatcgcaagaccggacaccagatatgtaagttccgcaagtgcgaggagcttaagaaaaagccaggcacatctctggagcgcacgccggtgcccagtgcagaagcctttcgctggtttttctag

SEQ ID NO: 218327 - DNA, 597 bp, Artificial Sequence
  derived and/or modified sequence
atgcaccacagaaatgacagccagaggctgggcaaggccggctgccccccagagcccagcctgcagatggccaacaccaacttcctgagcaccctgagccctgagcactgccggcccctggccggggagtgcatgaacaagctgaagtgtggggctgctgaggccgagatcatgaacctgcctgagcgggtgggcaccttcagcgccatcccagccctgggcggcatcagcctgcccccaggagtgattgtgatgacagccctgcacagccctgctgctgccagcgctgctgtgacagattctgccttccagatcgccaacctggccgactgcccccagaaccacagcagcagcagcagcagcagcagtggaggagctgggggcgccaacccagccaagaagaagaggaagagatgtggggtgtgtgtgccctgcaagaggctcatcaactgtggggtgtgcagcagctgcaggaacaggaagacaggccaccagatctgcaagttcagaaaatgtgaggagctgaagaagaagccaggcaccagcctggagaggacccctgtgcccagcgctgaggccttccgctggttcttctag

SEQ ID NO: 218328 - DNA, 597 bp, Artificial Sequence
  derived and/or modified sequence
atgcaccaccggaacgacagccagcggctgggcaaggccggctgccctccagagccatcactgcagatggccaatactaatttcctgtcaaccctgagtcccgagcattgccggcccctagcaggcgagtgtatgaacaaactcaaatgcggggcagcagaagcagagattatgaaccttcctgaaagagtgggcactttcagtgccatccccgctctcggtggtatttcacttccccctggagtcatcgtgatgacagctctccactctcctgccgctgcctctgccgctgtcacagatagcgcatttcagatcgcgaatctggcggattgccctcaaaatcacagcagtagttcatcctctagctcaggcggagctggaggagccaaccctgccaagaagaaacgtaaacgatgcggcgtctgcgtcccttgcaaaaggttgatcaattgtggggtttgttcttcgtgtcgcaatcggaagaccggacaccagatttgtaagttccgaaaatgcgaagagctgaaaaagaagcctggtaccagtctggagcggacgcccgtcccatcagccgaggcatttcggtggttcttctag

SEQ ID NO: 218329 - DNA, 597 bp, Artificial Sequence
  derived and/or modified sequence
atgcaccaccggaacgacagccagcggctgggcaaggccggctgccctccagaaccctccctccagatggcaaatactaattttctgtccacgctatcaccagagcactgcaggccgctggcgggggagtgtatgaacaagctgaaatgcggggctgccgaggccgaaatcatgaacctgccagaaagggtggggacctttagtgcaattcccgctctgggcggaatttctctcccaccaggagtcatcgtaatgaccgcccttcacagcccggcagcagctagcgccgctgtaacagactcagccttccagattgctaatctcgccgattgtcctcagaaccattctagtagcagttcttcatcctctgggggagctggtggcgcaaatcccgctaagaagaaacggaagagatgtggagtctgcgtcccctgcaagagacttatcaattgcggagtgtgctccagttgccggaataggaaaacagggcaccagatctgcaaatttagaaagtgtgaagagctcaagaaaaagcccggcacaagtctcgaacgcacacccgtgccgagcgccgaggctttcagatggtttttctag

SEQ ID NO: 218330 - DNA, 597 bp, Artificial Sequence
  derived and/or modified sequence
atgcaccacagaaatgacagtcagcggttaggtaaggctgggtgtcctcccgaaccaagcctccagatggccaacaccaatttccttagcactttgtcccccgagcattgccgccctctcgccggtgaatgcatgaacaaactgaaatgtggggctgctgaagctgaaataatgaacctccccgaaagggtgggaactttcagcgccatccccgctctgggaggcataagcctgccccctggcgttatagtcatgacagccttgcatagcccagccgcagcgagcgccgcagtcacggactccgcttttcaaatcgcaaatctggcagactgcccccagaatcatagctcctcctcttccagttcaagcgggggagcaggaggtgctaacccggcaaaaaaaaaacgaaaaagatgcggcgtatgcgtcccctgcaagcggctgataaattgcggggtgtgttcctcctgcagaaatagaaaaaccggacatcagatttgtaaattccgaaagtgcgaggaacttaaaaaaaagcccggtacctcgcttgaaagaacccccgtcccatccgccgaagccttcaggtggttcttttag

SEQ ID NO: 218331 - DNA, 597 bp, Artificial Sequence
  derived and/or modified sequence
atgcaccaccgaaacgacagtcagcgcctggggaaggctggatgtccgccagaaccttcgctacagatggccaatacaaactttctgtcgacgcttagcccagagcactgccgtcccctcgcgggtgaatgcatgaataaactgaaatgcggcgcagccgaggccgagatcatgaatcttccggaaagagttggtacgttttcagcaattccggcattaggtggcatttcacttccccctggtgttattgtgatgactgctctgcattctcctgcagcagcttccgctgctgttacagactcggcgttccagattgcgaacctcgccgattgccctcagaatcactcatcgtcttcatcatcctccagcgggggagccggtggggcaaatcctgcaaaaaaaaagaggaaacggtgcggggtttgcgtgccttgcaagcgattgattaattgcggggtctgctctagttgtagaaatcggaaaacaggccaccagatttgcaagtttcgcaagtgtgaggagttgaagaaaaagcccggtacgagtctggaaaggaccccggtgcctagcgccgaggcctttcgatggtttttctag

SEQ ID NO: 218332 - DNA, 5565 bp, Artificial Sequence
  derived and/or modified sequence
gcacacagcgactggagacggacggagagcaacgcgctgggagaggagagaccaccgacaacagacccgcgctctcacacatacactcacactcgactctttcctctccccccacctcctcctccttccacccccaccactaacaccatctcctcctccttctctctgcaacaagaaaaaaaagccatttacagttgtaacagttggaggataatgcaaaggaagacgctgcctgggaattcaccgtctgtggaaatgagccccagagaggaataaagcagccctcaccttgctctccccacccgaacccactttccccacccgcctcggcccccaccccaacaccaccatcactcccttccctcccccccacctttcccccttttccacccaggtgtcggaccaggcggtccccacttccaccctgcaccccttcttccccccctgcaccatgaacaccaatgtctgcgtggagcccgggccgagcccggaggccccgggcttgcccaaggaaagccacttgcccgagggggctctgaacagccttgtggattacaactcggaaatggagcgctaccgctcctttgccacctccttctacaagaccaacgggggcgccttcccacaggcggccaagatcgcgcgcatcaccacccccatcttccccagcagcgccgccgccgccgcggccgccgcgcgcatcggcatgtccccctggaactgcgacaacgcggccaccgccgccgccgccaccgccatgctctggggcagcggcgggggcgggggcggcggcggggggggtggcggcggcggcggcggcggcggaggcgggggcgggggtggtgggggcggcaggaaatcctcctccgccgccgcctcctcctccgcctcctcctcctcggcgatcctccccgccggcggtggcggcggcggcggcggcggcggcagcaggaccagcatgcaccaccgaaacgactcccagaggctggggaaagctggctgcccgccagagccgtcgttgcaaatggcaaatactaatttcctctccaccttatcccctgaacactgcagacctttggcgggggaatgcatgaacaagctcaaatgcggcgctgctgaagcagagataatgaatctccccgagcgcgtggggactttttccgctatcccggctttagggggcatctcattacctccaggggtcatcgtcatgacagcccttcactcccccgcagcagcctcagcagccgtcacagacagtgcgtttcaaattgccaatctggcagactgcccgcagaatcattcctcctcctcctcgtcctcctcagggggagctggcggagccaacccagccaagaagaagaggaaaaggtgtggggtctgcgtgccctgcaagaggctcatcaactgtggcgtctgcagcagttgcaggaaccgcaaaacgggacaccagatctgcaaatttagaaaatgtgaagagctaaagaaaaaacctggcacttcactagagagaacacctgttcccagcgctgaagcattccgatggttcttttaaagcagtagtatatcttattttcaaggcatttggaaatgaagggcaaactaatgtcttgttttaagaaactgcttagtccaccactgaagaaaatatccagaaattattttcattttatgtatagggctttcttcaaaaaaaaaaaaaaagaggaaaagaaaagaaaaagacataaaaataatgtgagagcttggagaattggccagtctatttactttcaatacgctgattctttctttgatgtaatttagctatagtagtgaagttgttgtctattttgaaagtggctgtaaaaaataagtttgggtaaacccctgctgtaaaatcatgtatctttgcaaagtacatatctatacttcattttcaaatatatgtgtttcagtactgtaaactgtacagatagcagcttgtattttgtgtgtttagacacaaggagacaatcatgtctgagcatctatggagattaacagtttgtacacaacagtatggttctgcaagttaaatctggagcaataaattttagctttaactattttttgccagtggtttagaagcagcaacagcactggcaccattttgccatgcatctttccatagagacttgatgccaagttttacaagactaaaagattatgatgcatccaccaattaccttcagttttattgttataagaggggaagatgttatgaaagtttcaattaatcttttgagcactatattagagtagtggttatgcacttgcattgcttacaaacgagctgtacagaagggtatacctcccaaatacttagtgtagttgacttgtcttgggttgcactgtaaggcagagtactcagagtagttggaaaatgcagaatcagttgtataatttttttttataaaaacggtgttttttaggctaaagaataaagtatcatatcttaggaggggaaaatttataactgacattttttccccagcccaatatgggctgtatacgttttattgtttcttaatttttttcttattttttctgtaggaaaaaatcttaataaaaactaccccaatgttttaacttcatgtatgatattaaatgggtagttttaacacttgaatatgttgagggcttctgccttgaggcagggcttgatatatttttaatttacaaagaattaaacatattcataaaagtgaggcattttatctctttttattttcttttctcatagccacccagttggactagtggtcttcccctggtccttcagtaaaatgctccattgctgccatttccattgttgttacttgatgctttcattcctgagaaggcagggctacagtctctggaatttcataaatgcatgacatacccctccccccacaacctacacacaaaggatctaatgcttcatagaacctgtgctaccttttcatgttggagttggttttcttatcacagtcagggttcttaaggccgtcccatcaggacaaatatttaccttccattttatttctgtttgtcccaattataaagactattttcagtttcaggagtagaacagggtttagcaaaaatatgtagagtatcaaagttacctactgcaactttttgttctttgtccactagccaggtgatttaacccactaaatccattagcttgctgaaaaatgttagcaaagtaaatcacgagaagaaagataatttgagaagagaaatggtatggtacaatgaaagaagctgtaaagattaggaaagactagtaagtgaatatttttaaaaatttagttgtagatttcaatgggatacgataggacagaaaagattttttaaaaagcagaaagagtgtttcatggtgaaagtactgggggagggtggacaaagcatgcacacatgccaatttgaaaatcaagtgtgacttacctcacgtagagtatgaatacatggtccacagttatggtcaacaagcgttttcaagaaaaactcatgatgtgttacacccatccatatttagagatgagaattaaatgattacaagctaaaatgtgctgtatactgtattaattttgagatagctttctacttgatgtatatttctttgagggtttctatctagttagaatttcagcttctgctgtgggaccaatgagagctgtatgagtttttttttttttttccttttccattattttattttttgttttttgtttaccaatttgctaattaattacaagtaagtgaaaacttactttcacacttgaatgataagcttgccttgctctttggaaaatgatgattgttattacagaagtgaaacaaacttctattcaggctacagtaggcatacaataacctaaagatctcatagaagtatactgagagtctaaaatacattctagtagtgcatgtcttggtgtgcttttgtttgtttgctttctaaaagaactaatgaatctgtatattgtaaactgtggtgttttacatgtcaattcatttttttaatgaaagaaaatttgttgattactgaaatgagaaagtgtagcttttcattaattctcttatgttttttattcttgatattgttcttttataccacccactttttaatgtttttggttaaactccatttatataatgtaggatgcatataaagttctcattggtgatgttgaagaaagagatgactcttctggcctttctctagttttcttcctcatatgtccctgtactgagaacttctaaagcttatcattataaacctaaggcagtgatttgaaagtttacatttttcatgattttcaaataccaatgaaatgtaacttttaaatattcctcactgtgtgttttatattcactgtcaagaaaattcagaatgtagattgtgtggacagctatacacaacttaataattatatatcagataaactgaataaaaaactttgtaagagtggtctacgcacacaggatcttgtcctccctaggcgtggatagagagatgccataatctgccagcatttggggagatcatggtaaatacttgaggcgttgatacatagtgcagtgagccaatttccttttcagttgtcactcagcaccataacatcacgaagaacatcattaatgcaaacctctcactaagccttcagaccaaagtggctttctgatggactctgcctgtctgtctacaagtggagtcagattcaaagtagaaatgtatccatccttgggaaagaaaataggaagtcttcccccactgtaggagtatataaaaatgtctcctggttgcttaattcccaacactcaatttccttcttctaaacacatttataaggagcaagagatggtgcacttattatgaattaatattaagcaatcactaaaagaaaggaatattctcttcctttcaatcagaaaccctgatatgtaagttgtgcaattaatgctaaagcatataaagtctttaagctgataagtatctgtaatcaaataatgaaaaaaggaaagcagttaaatgaacacactattcagggtcaaatatgttcagcaaaaagccgtagcgggtctttgatcatggttagattcacagtgatatcaaacagttggttctcatgtaacagctaaatgtttcagtttttttttttttattaaatttggcatttcacactgagatctgtattcctagtgaataaaagacagctactatattaggagggattccattttcacaattgcaaaacagatatttcaggaacatgggccacaaaatgtactcctttcacagtgttctcctcttctgaactgtgcagttatctattaaattttctaatagatatttgtgtaaggtgtatgtatgcttgtgcaattatttaaaaaacggttttggaaaacagtgtatttattaaagaaaattacttatggggcatgtacaaaactgtaaaaaaaaaaaaaaagtaaaaaaaatcacattcaatttgcccagtaaagttgtttttgtgaaatttctgtgttgttgaataaaggactttagtactc

SEQ ID NO: 218333 - DNA, 746 bp, Artificial Sequence
  derived and/or modified sequence
ggcagcaggaccagcatgcaccaccgaaacgactcccagaggctggggaaagctggctgcccgccagagccgtcgttgcaaatggcaaatactaatttcctctccaccttatcccctgaacactgcagacctttggcgggggaatgcatgaacaagctcaaatgcggcgctgctgaagcagagataatgaatctccccgagcgcgtggggactttttccgctatcccggctttagggggcatctcattacctccaggggtcatcgtcatgacagcccttcactcccccgcagcagcctcagcagccgtcacagacagtgcgtttcaaattgccaatctggcagactgcccgcagaatcattcctcctcctcctcgtcctcctcagggggagctggcggagccaacccagccaagaagaagaggaaaaggtgtggggtctgcgtgccctgcaagaggctcatcaactgtggcgtctgcagcagttgcaggaaccgcaaaacgggacaccagatctgcaaatttagaaaatgtgaagagctaaagaaaaaacctggcacttcactagagagaacacctgttcccagcgctgaagcattccgatggttcttttaaagcagtagtatatcttattttcaaggcatttggaaatgaagggcaaactaatgtcttgttttaagaaactgcttagtccaccactgaagaaaatatccagaaattattttcattttatgtatagggctttcttc

SEQ ID NO: 218334 - DNA, 597 bp, Artificial Sequence
  derived and/or modified sequence
atgcaccacagaaacgacagccagagactgggcaaggccggctgcccccccgagcccagcctgcagatggccaacaccaacttcctgagcaccctgagccccgagcactgcagacccctggccggcgagtgcatgaacaagctgaagtgcggcgccgccgaggccgagatcatgaacctgcccgagagagtgggcaccttcagcgccatccccgccctgggcggcatcagcctgccccccggcgtgatcgtgatgaccgccctgcacagccccgccgccgccagcgccgccgtgaccgacagcgccttccagatcgccaacctggccgactgcccccagaaccacagcagcagcagcagcagcagcagcggcggcgccggcggcgccaaccccgccaagaagaagagaaagagatgcggcgtgtgcgtgccctgcaagagactgatcaactgcggcgtgtgcagcagctgcagaaacagaaagaccggccaccagatctgcaagttcagaaagtgcgaggagctgaagaagaagcccggcaccagcctggagagaacccccgtgcccagcgccgaggccttcagatggttcttctag

SEQ ID NO: 218335 - protein, 678 aa, Artificial Sequence
  derived and/or modified sequence
MLMARDGTREDNHKLHKRWLRHQAFMAELAQNKEWLEKIEREGQQLMQEKPELAASVRKKLGEIRQCWAELESTTQAKARQLFEASKADQLVQSFAELDKKLLHMESQLQDVDPGGDLATVNSQLKKLQSMESQVEEWYREVGELQAQTAALPLEPASKELVGERQNAVGERLVRLLEPLQERRRLLLASKELHQVAHDLDDELAWVQERLPLAMQTERGNGLQAVQQHIKKNQGLRREIQAHGPRLEEVLERAGALASLRSPEAEAVRRGLEQLQSAWAGLREAAERRQQVLDAAFQVEQYYFDVAEVEAWLGEQELLMMSEDKGKDEQSTLQLLKKHLQLEQGVENYEESIAQLSRQCRALLEMGHPDSEQISRRQSQVDRLYVALKELGEERRVALEQQYWLYQLSRQVSELEHWIAEKEVVAGSPELGQDFEHVSVLQEKFSEFASETGMAGRERLAAVNQMVDELIECGHTAAATMAEWKDGLNEAWAELLELMGTRAQLLAASRELHKFFSDARELQGQIEEKRRRLPRLTTPPEPRPSASSMQRTLRAFEHDLQLLVSQVRQLQEGAAQLRTVYAGEHAEAIASREQEVLQGWKELLSACEDARLHVSSTADALRFHSQVRDLLSWMDGIASQIGAADKPRCPSSLLGLPASPWWPTPATPSPLTAPFSME

SEQ ID NO: 218336 - DNA, 2037 bp, Artificial Sequence
  derived and/or modified sequence
atgctgatggccagagacggcaccagagaggacaaccacaagctgcacaagagatggctgagacaccaggccttcatggccgagctggcccagaacaaggagtggctggagaagatcgagagagagggccagcagctgatgcaggagaagcccgagctggccgccagcgtgagaaagaagctgggcgagatcagacagtgctgggccgagctggagagcaccacccaggccaaggccagacagctgttcgaggccagcaaggccgaccagctggtgcagagcttcgccgagctggacaagaagctgctgcacatggagagccagctgcaggacgtggaccccggcggcgacctggccaccgtgaacagccagctgaagaagctgcagagcatggagagccaggtggaggagtggtacagagaggtgggcgagctgcaggcccagaccgccgccctgcccctggagcccgccagcaaggagctggtgggcgagagacagaacgccgtgggcgagagactggtgagactgctggagcccctgcaggagagaagaagactgctgctggccagcaaggagctgcaccaggtggcccacgacctggacgacgagctggcctgggtgcaggagagactgcccctggccatgcagaccgagagaggcaacggcctgcaggccgtgcagcagcacatcaagaagaaccagggcctgagaagagagatccaggcccacggccccagactggaggaggtgctggagagagccggcgccctggccagcctgagaagccccgaggccgaggccgtgagaagaggcctggagcagctgcagagcgcctgggccggcctgagagaggccgccgagagaagacagcaggtgctggacgccgccttccaggtggagcagtactacttcgacgtggccgaggtggaggcctggctgggcgagcaggagctgctgatgatgagcgaggacaagggcaaggacgagcagagcaccctgcagctgctgaagaagcacctgcagctggagcagggcgtggagaactacgaggagagcatcgcccagctgagcagacagtgcagagccctgctggagatgggccaccccgacagcgagcagatcagcagaagacagagccaggtggacagactgtacgtggccctgaaggagctgggcgaggagagaagagtggccctggagcagcagtactggctgtaccagctgagcagacaggtgagcgagctggagcactggatcgccgagaaggaggtggtggccggcagccccgagctgggccaggacttcgagcacgtgagcgtgctgcaggagaagttcagcgagttcgccagcgagaccggcatggccggcagagagagactggccgccgtgaaccagatggtggacgagctgatcgagtgcggccacaccgccgccgccaccatggccgagtggaaggacggcctgaacgaggcctgggccgagctgctggagctgatgggcaccagagcccagctgctggccgccagcagagagctgcacaagttcttcagcgacgccagagagctgcagggccagatcgaggagaagagaagaagactgcccagactgaccaccccccccgagcccagacccagcgccagcagcatgcagagaaccctgagagccttcgagcacgacctgcagctgctggtgagccaggtgagacagctgcaggagggcgccgcccagctgagaaccgtgtacgccggcgagcacgccgaggccatcgccagcagagagcaggaggtgctgcagggctggaaggagctgctgagcgcctgcgaggacgccagactgcacgtgagcagcaccgccgacgccctgagattccacagccaggtgagagacctgctgagctggatggacggcatcgccagccagatcggcgccgccgacaagcccagatgccccagcagcctgctgggcctgcccgccagcccctggtggcccacccccgccacccccagccccctgaccgcccccttcagcatggagtag

SEQ ID NO: 218337 - DNA, 2037 bp, Artificial Sequence
  derived and/or modified sequence
atgctcatggctagggatggcacccgggaggataaccataagctgcacaagcggtggctgagacatcaggcattcatggccgagctggctcaaaacaaggaatggttagagaaaatcgagcgcgagggccaacaactgatgcaggaaaagccagaactcgcggcgagcgtaaggaaaaagctcggcgaaatacgtcaatgttgggccgagttggaatcaactacccaggcaaaggcaagacagttatttgaagcctctaaagcagaccaactggtgcagagctttgcagaactggataagaaacttctgcacatggaatcccagctgcaagacgtggacccaggaggcgaccttgctacagtcaactctcagctgaaaaagctgcagtctatggaatcccaggtcgaagaatggtatagagaagtgggggaacttcaagctcagaccgcggccttgccactggagcctgctagcaaagagcttgtgggagagagacaaaacgcggtcggagaaagactcgtgcggctccttgagccactgcaggaaagaaggcggctgttgcttgcctcaaaggaactgcatcaggtggcccatgacctggacgatgagcttgcatgggttcaggaaaggctcccactcgctatgcagactgaaagaggcaatggtttgcaggcagtgcaacagcacattaaaaaaaaccagggactgagaagggagatccaggcacacgggcccaggcttgaggaggtccttgagcgagcaggcgcccttgcttctctccgctctccagaggctgaggcggtgcggcgaggactggaacagctccagtccgcctgggctgggctgcgagaggctgcagagaggaggcaacaggtgttggacgctgccttccaggttgagcagtactattttgatgtggcggaggttgaagcttggttgggcgaacaggagctgctgatgatgagtgaggacaagggtaaagacgagcagtcaactctgcagctgctcaaaaagcatctgcagctggagcagggcgtggagaactacgaggagtccatagcccagctcagccgtcagtgccgcgcacttctagaaatgggccaccccgattcagaacagatctccagacgacaatcccaagtggaccgcctttacgtggcccttaaggaactgggcgaggagaggagggtcgctctggagcagcagtattggctctatcagctatcacggcaggtcagtgagctggaacactggattgccgaaaaggaagtagttgcgggctcgccagagctgggacaggacttcgagcacgtaagtgtgctgcaggagaaatttagcgaattcgcctcagagacaggcatggccgggagggagaggctggcagccgtgaaccaaatggtggacgagcttatcgaatgtggccacaccgccgcggcaacaatggcagagtggaaagatggactgaatgaggcgtgggcagagctgttggaactcatgggcacgcgagctcagctgttggcggcatccagagaactgcataaattcttcagtgacgcgcgtgaactgcaaggtcagatcgaggaaaagagacgccgcctgccccgactgaccacaccaccggaacctaggccctccgcttctagtatgcagcgcactctgagggccttcgagcacgacctgcagttgctcgtgtcccaggtcagacagctgcaagaaggtgctgcccaactccgcacggtttacgctggggagcatgcggaggcgattgcttcacgagagcaagaagtcctgcagggttggaaggaactgttatcagcatgtgaagacgccaggctacatgtgtcgtctacggccgatgccctgcggtttcacagccaggttagagatctgctgagctggatggatgggatagcctctcagatcggagccgcagacaaaccccgctgcccatcaagcttgttggggctgccagcatccccgtggtggccaacgcctgctacgccatcccccctgacagccccctttagtatggagtag

SEQ ID NO: 218338 - DNA, 2037 bp, Artificial Sequence
  derived and/or modified sequence
atgctgatggccagagatggcacccgggaggacaaccacaagctgcacaagcgctggctgcggcaccaggccttcatggccgagctggcccagaacaaggagtggctggagaagattgagcgggagggccagcagctgatgcaggagaagccagagctggccgcctctgtgaggaagaagctgggggagatccggcagtgctgggccgagctggagagcaccacccaggccaaggcccggcagctgtttgaggccagcaaggctgaccagctggtgcagagctttgctgagctggacaagaagctgctgcacatggagagccagctgcaggatgtggaccccggcggggacctggccaccgtgaacagccagctgaagaagctgcagagcatggagagccaggtggaggagtggtaccgggaggtgggggagctgcaggcccagacagctgccctgcccctggagcccgccagcaaggagctggtgggggagcggcagaatgctgtgggggagcggctggtgcggctgctggagcccctgcaggagcggcggcggctgctgctggccagcaaggagctgcaccaggtggcccatgacctggatgatgagctggcctgggtgcaggagcggctgcccctggccatgcagacagaaagaggaaatggcctgcaggccgtgcagcagcacatcaagaagaaccagggcctgcggcgggagatccaggcccacggcccccggctggaggaggtgctggagcgggccggggccctggccagcctgcggagccctgaggccgaggccgtgagaagaggcctggagcagctgcagagcgcctgggccggcctgcgggaggccgctgagcggcggcagcaggtgctggatgctgccttccaggtggagcagtactactttgatgtggccgaggtggaggcctggctgggggagcaggagctgctgatgatgtctgaagataaaggcaaggatgagcagagcaccctgcagctgctgaagaagcacctgcagctggagcagggcgtggagaactatgaggagagcatcgcccagctgagccggcagtgccgggccctgctggagatgggccacccagattctgagcagatcagccggcggcagagccaggtggaccggctgtatgtggccctgaaggagctgggggaggagaggagagtggccctggagcagcagtactggctgtaccagctgagccggcaggtgtctgagctggagcactggattgctgagaaggaggtggtggccggcagccctgagctgggccaggactttgaacatgtgtctgtgctgcaggagaagttcagcgagtttgccagcgagaccggcatggccggccgggagcggctggccgctgtgaaccagatggtggatgagctgattgaatgtggccacacagctgctgccaccatggccgagtggaaggatggcctgaatgaggcctgggccgagctgctggagctgatgggcacccgggcccagctgctggccgccagccgggagctgcacaagttcttcagtgatgcccgggagctgcagggccagatcgaggagaagagaagaaggctgccccggctgaccaccccacctgagccccggcccagcgccagctccatgcagaggaccctgcgggcctttgaacatgacctgcagctgctggtgtcccaggtgcggcagctgcaggagggcgccgcccagctgaggacagtgtatgctggggagcacgccgaggccatcgccagccgggagcaggaggtgctgcagggctggaaggagctgctgagcgcctgtgaagatgcccggctgcacgtgagcagcacagcagatgccctgcgcttccacagccaggtgcgggacctgctgtcctggatggatggcatcgccagccagattggagctgctgacaagccccgctgccccagcagcctgctgggcctgcctgccagcccctggtggcccaccccagccacccccagccccctgacagcccccttctccatggagtag

SEQ ID NO: 218339 - DNA, 2037 bp, Artificial Sequence
  derived and/or modified sequence
atgctgatggcccgggacggcacccgggaggacaaccacaagctgcataaaaggtggctgcgccaccaggcttttatggcggagttggcacagaacaaggaatggctagagaaaatcgaaagagaaggccagcaattgatgcaggaaaaacccgaacttgctgcctctgtccggaaaaagctcggagaaattcggcagtgctgggccgaactcgaaagcaccacacaggccaaagcccgacagctgttcgaggcatctaaggcggatcagctcgtccagtctttcgctgaactcgacaaaaagttacttcacatggagtcacagcttcaggatgtcgacccaggcggggacctggccactgttaattcacaattaaaaaagttgcaaagcatggagagccaggtcgaggaatggtatcgagaagtgggcgagctccaggctcagaccgccgcactgcctttggagcctgcctcgaaagagctggtaggtgagcgtcagaatgcggttggtgagagactggtgcggcttttggagccactgcaggagagacggagactactgctggcctcgaaggaactgcatcaggtggcacatgacttggatgatgaactggcatgggtccaggagcgcctgcccctggcaatgcagaccgaaagggggaatgggctgcaggctgttcagcaacacatcaaaaagaaccagggcctgagacgcgaaatccaggcacatggcccaaggctggaggaggtgctagagagagcgggcgctttggcctctttacgcagtcctgaggccgaggctgtccggcgtgggctggagcagctgcagtccgcttgggctggccttcgggaggctgccgagcgaagacagcaggttctagacgcagccttccaggttgagcagtattattttgacgtagccgaggtggaggcatggctcggggagcaggagctgctaatgatgtccgaggataaggggaaagacgagcagagcaccctgcagctcctgaagaaacacctccaactggagcagggtgtggaaaactacgaggagagtattgcgcagctttcgaggcagtgcagagcactgcttgagatgggacaccccgacagcgagcaaatcagcagaaggcagagtcaagtggaccggctttatgtagccctgaaggagctgggcgaagaacgacgggtggcacttgaacaacagtattggctgtatcagctgtctcgacaggtgtccgaactggagcattggatcgcagagaaagaagtggttgctggatctccagagctgggccaggactttgagcatgtgagcgtgctccaggaaaagttctctgagttcgcaagcgaaaccggaatggccggacgagagagactggccgccgtcaaccagatggtggacgagttaatagagtgcggccacacagccgctgccaccatggctgaatggaaggacgggctcaacgaggcctgggccgagctacttgagctcatggggaccagagcacagctacttgccgcctctagggaactgcacaaattcttcagtgatgctagggaactgcagggacagattgaagagaagcggcggaggctgcctcgactcactacccctccagagccccggccgtccgctagtagcatgcagcgtaccctgcgtgcttttgaacacgacctgcaactcttggtgagtcaggtgagacagcttcaggagggcgctgcccagctgcgcactgtttatgctggtgagcacgccgaagccatagcctcacgcgagcaggaggtgctgcaaggctggaaggaactcctttccgcctgtgaggacgcacgtcttcacgtgtcgagtactgccgacgcattgcgatttcattcccaggtacgtgatctcctgtcttggatggatggaatagcatctcagattggcgccgccgacaagccccgctgcccatccagcttgctgggtctacctgcaagtccttggtggccaacacctgctacacccagccccctgacagctcctttctccatggaatag

SEQ ID NO: 218340 - DNA, 2037 bp, Artificial Sequence
  derived and/or modified sequence
atgttgatggcgagggatgggacacgggaagataaccataaacttcacaaaaggtggctgagacaccaggcattcatggcagagttggcgcagaataaggagtggctggagaagatcgagcgagaaggccagcagctgatgcaggaaaaaccagagctggctgcctccgtacgaaagaaactgggggagattagacagtgttgggctgaactggagtcaacaactcaggccaaagcgagacagctgttcgaggccagcaaggcagatcaactggtgcagagtttcgcagagttggataaaaaattgctacacatggagagccaattgcaggacgtggatcctggaggggatttagccaccgtgaactcacagctgaagaaactccaatccatggagtcccaggtcgaagagtggtaccgcgaagtgggtgagctccaggcacagacagcagccttgccgttagagcccgcaagcaaggaacttgttggcgaacgccagaatgctgtgggcgagagattggtaagactactggagcccctgcaggaaagaagacggctcctgctggcctcaaaggaactgcatcaggtggctcatgacttggacgatgagctcgcatgggtccaggagcggcttccactggccatgcagacagaacggggaaatgggcttcaggccgtgcaacagcacatcaagaaaaaccaggggctgaggcgggagatccaggcccacggaccacgccttgaggaagtgcttgaacgagccggagcacttgcgtccttgagatcccctgaggcagaggctgtgaggcgcggattggaacagctccaatctgcctgggccggactaagagaagctgcggagaggcggcagcaggtgctcgatgccgcattccaggttgagcagtattatttcgatgtggctgaggtagaggcatggcttggcgaacaggagctgttaatgatgagcgaagacaaggggaaagacgagcagagtactcttcagctgctgaagaaacacctccagctcgaacaaggcgtggaaaactatgaggagtcgattgcccagttgagcaggcagtgtagagcattgctcgaaatggggcacccggacagcgagcagatttcccgcaggcagagtcaggttgacagactctatgtcgcccttaaagaactgggagaggagaggagagttgccttggagcaacagtactggctttatcaattatcaaggcaagtgtccgagctggagcattggattgcagagaaggaggttgtggctggatcgcccgaactggggcaggatttcgagcatgtgtcagtgcttcaggagaaatttagcgaattcgcgtctgagacaggaatggccggaagggagcgcctggcagctgttaaccagatggtggacgagctgatcgaatgcggacatacagcagctgcaactatggccgagtggaaggatggtctcaacgaggcatgggctgagctcctagagctgatgggcacccgagcccaattactggccgcttctcgtgagctgcataagttcttcagcgatgcaagggagctgcaagggcaaattgaagaaaagagacgcaggttacctcgacttactaccccgccagagcccagaccgtctgcgagctccatgcagcggaccctgagggcctttgaacacgacctacagctgctcgtgtcccaggtccggcagctgcaagaaggcgcagcgcaactgcggactgtgtacgctggcgagcatgctgaagccattgccagcagggaacaggaggtgctgcagggttggaaagagctactgtcagcttgcgaggacgccagactgcacgtgtcctctacagccgatgccctgagattccacagtcaagtccgcgacctactgtcgtggatggatggtatcgccagtcagatcggagccgcagacaagcccagatgtccatcttccttgttgggacttcctgcgtctccatggtggcctacccctgccacacccagtcctcttactgctcctttctccatggagtag

SEQ ID NO: 218341 - protein, 427 aa, Artificial Sequence
  derived and/or modified sequence
MGLQLRALLGAFGRWTLRLGPRPSCSPRMAGNAEPPPAGAACPQDRRSCSGRAGGDRVWEDGEHPAKKLKSGGDEERREKPPKRKIVLLMAYSGKGYHGMQRNVGSSQFKTIEDDLVSALVRSGCIPENHGEDMRKMSFQRCARTDKGVSAAGQVVSLKVWLIDDILEKINSHLPSHIRILGLKRVTGGFNSKNRCDARTYCYLLPTFAFAHKDRDVQDETYRLSAETLQQVNRLLACYKGTHNFHNFTSQKGPQDPSACRYILEMYCEEPFVREGLEFAVIRVKGQSFMMHQIRKMVGLVVAIVKGYAPESVLERSWGTEKVDVPKAPGLGLVLERVHFEKYNQRFGNDGLHEPLDWAQEEGKVAAFKEEHIYPTIIGTERDERSMAQWLSTLPIHNFSATALTAGGTGAKVPSPLEGSEGDGDTD

SEQ ID NO: 218342 - DNA, 1284 bp, Artificial Sequence
  derived and/or modified sequence
atgggactgcagctgagggccttactcggtgccttcggcagatggaccctaaggttagggcctcgacccagctgttctccgcggatggcaggcaacgctgagcccccccctgcaggagccgcgtgtccccaggatcgtagatcatgctccggtcgtgccggcggcgatagagtatgggaggatggggaacatcctgccaagaagctgaaaagcggcggcgacgaagaaagacgagaaaagcccccaaagcgcaagattgtcctactaatggcctattcgggtaagggctaccatggcatgcagcggaatgtaggtagttctcaattcaaaaccatagaagacgatctggtgtccgcccttgttagatccggctgcatccccgagaaccatggcgaggatatgcggaagatgtcgttccagcgctgtgctcgcacggacaagggcgtgtcagcagcgggacaggtcgtgagcctgaaagtgtggctgatcgacgatatcctggaaaaaataaatagccatctgccaagccatatccgaatattgggacttaaacgcgttacaggcggctttaactccaaaaaccgttgcgatgctagaacttactgctacctgctgcccacatttgccttcgcccacaaagaccgcgacgtgcaggacgaaacatatcgactgtccgccgagactctgcaacaggtcaatagactgctcgcctgttataagggcacccacaacttccacaacttcacttcacagaagggaccacaggaccccagtgcctgtagatacatcttagagatgtactgtgaagaaccatttgtgcgagaagggttagagttcgccgtaataagggtcaaaggtcagtccttcatgatgcaccagatcaggaagatggtggggctggtagttgccattgtgaagggctatgcacccgaatcagtcctggagagatcttggggaactgagaaagtggatgttcctaaagcgcctgggttgggcctggtacttgagcgggtgcacttcgagaaatacaatcagcggttcggcaacgatggactgcacgagcctctcgactgggcccaggaggaaggaaaagtggccgctttcaaagaggagcacatttatcccactattatcgggaccgagagagatgaacgcagtatggcccagtggctatcgactttacccatccacaactttagcgcgacagccctgaccgccggtggcaccggtgccaaagtcccttcaccactggagggaagcgagggtgatggagacacagattag

SEQ ID NO: 218343 - DNA, 1284 bp, Artificial Sequence
  derived and/or modified sequence
atgggcctgcagctgcgggccctgctgggcgccttcggccgctggaccctgcggctgggcccccggcccagctgcagccccaggatggctggaaatgctgagcccccacctgctggggccgcctgcccccaggaccggcgcagctgcagcggccgggccggcggggacagagtgtgggaggatggagagcacccagccaagaagctgaagtctggaggagatgaggagcggcgggagaagccacccaagaggaagatcgtgctgctgatggcctacagcggcaagggctaccacggcatgcagagaaatgtgggcagcagccagttcaagaccattgaagatgacctggtgtctgccctggtgcgcagcggctgcatccctgagaaccacggggaggacatgaggaagatgtccttccagagatgtgccaggacagacaagggcgtgtctgctgctggccaggtggtgtccctgaaggtgtggctgattgatgacatcctggagaagatcaacagccacctgcccagccacatccgcatcctgggcctgaagagggtgactggaggcttcaacagcaagaacagatgtgatgcccggacctactgctacctgctgcccacctttgcctttgcccacaaggacagagatgtgcaggatgagacctaccgcctgtctgctgagaccctgcagcaggtgaaccggctgctggcctgctacaagggcacccacaacttccacaacttcaccagccagaagggcccccaggaccccagcgcctgccgctacatcctggagatgtactgtgaggagccctttgtgcgggagggcctggagtttgctgtgatccgggtgaagggccagagcttcatgatgcaccagatcaggaagatggtgggcctggtggtggccatcgtgaagggctacgcccctgagagcgtgctggagaggtcctggggcacagagaaggtggatgtgcccaaggcccctggcctgggcctggtgctggagcgggtgcactttgagaagtacaaccagagatttggaaatgatggcctgcacgagcccctggactgggcccaggaggagggcaaggtggccgccttcaaggaggagcacatctaccccaccatcatcggcacagaaagagatgagaggtccatggcccagtggctgagcaccctgcccatccacaacttcagcgccacagccctgacagctgggggcactggagccaaggtgcccagccccctggagggctctgaaggagatggagacacagactag

SEQ ID NO: 218344 - DNA, 1284 bp, Artificial Sequence
  derived and/or modified sequence
atgggcctgcagctgcgggccctgctgggcgccttcggccggtggactttgcgtcttgggccaagaccctcttgctctcccaggatggccggaaatgccgagccccctccagctggcgctgcatgtccacaggatcgtcgctcatgttctggacgggctggtggcgaccgcgtctgggaggacggggagcatcccgcaaaaaagctgaagtctggaggggatgaggagcgccgcgagaaacccccaaagagaaagatcgtgttgctgatggcttatagcggtaagggatatcacggcatgcagagaaacgtcggatcttctcaattcaagaccattgaggatgatcttgtgtcagccctggtgcggtccggctgcatcccggagaatcacggagaagacatgagaaagatgtccttccaacgatgcgccaggactgataaaggagtcagtgctgccggccaggttgtgtccttgaaagtctggctgatcgacgacattctggaaaagataaactcccacctgccatctcacataaggatcttgggcctgaaacgagtaaccgggggctttaattcaaaaaacagatgcgacgcccgaacctattgctacctgttgccaactttcgccttcgcccacaaagaccgtgacgtgcaagatgagacttaccggctctctgcagagaccctgcagcaggtaaatcgactgctagcctgttataagggtacccacaactttcataacttcaccagtcaaaagggacctcaggacccctcagcctgtagatacatccttgaaatgtattgcgaagagccattcgtccgagaaggcctcgagtttgctgtgatccgtgtcaaaggtcaatccttcatgatgcaccagatccgcaaaatggtgggcctggtcgtcgctatcgttaaaggttatgcaccagagtccgtgttggagcgaagctggggtacagagaaagtggatgttccgaaggcccctggactaggactcgtgctagaaagagttcacttcgaaaaatacaatcagcgattcggcaatgacggactgcacgaacccctggactgggcgcaggaggaggggaaggtggccgcttttaaagaggaacacatttatccgaccataatcgggactgaacgggatgaacggagcatggcgcagtggctaagtacactgcctattcataatttttctgctaccgccttgacggccggaggtaccggcgccaaggtgccatcccctctggaggggagcgaaggcgacggagatactgactag

SEQ ID NO: 218345 - DNA, 1284 bp, Artificial Sequence
  derived and/or modified sequence
atgggtctccagttacgcgcattgttaggcgcttttggccgatggactctgcgattagggccacgcccatcttgtagcccaaggatggccggaaacgcagagccacctcctgctggcgctgcctgtccccaggaccgcaggtcttgttccggccgtgcaggcggtgacagggtctgggaagatggtgagcatcccgcaaagaagctcaagtctggcggtgatgaagaacggagggagaaacccccaaagagaaaaatcgtgctgctgatggcatatagcgggaaggggtaccacggaatgcagcgcaatgtgggaagctcacagttcaagactattgaggacgacttagtgagcgccttggtgcgtagcggatgcatccctgagaaccacggagaagatatgcgcaaaatgagttttcagcgatgtgccaggacagataagggcgtatccgcagcgggtcaggtcgtctctttgaaggtatggctgatcgacgacattcttgaaaagatcaactcccatctgccatcacacataaggatcttggggctcaaacgggttacaggcggatttaacagcaaaaataggtgcgatgcacgaacatactgttatctcttaccaacgttcgcttttgcacacaaagatagagatgtgcaagatgagacataccgcttatcagccgagacactccagcaagtgaaccggctgttagcttgctataagggtacccacaattttcacaactttacctctcagaaagggccacaagacccatcagcctgcagatacatcctggaaatgtattgcgaggagccctttgtcagagaaggcctagagttcgccgtcatccgcgtcaagggtcagagctttatgatgcatcagattaggaagatggttggactcgtcgtcgcaattgtgaaaggctatgcgccagaaagcgtcttggaacggtcctggggcaccgaaaaggtagatgtgcctaaagctcctggactcggcttagtactggagcgggtgcactttgagaaatacaatcagaggtttgggaacgatgggctgcatgagcctctggactgggctcaggaagagggaaaggtggccgctttcaaagaggagcatatctaccccaccattattggaacagagagggacgaacgttcaatggcacagtggctcagcacactgcctatccataacttttctgccactgctttgacagctggtggcacaggcgcaaaggtgccttcccccttggagggatctgagggggatggcgatacagactag

SEQ ID NO: 218346 - DNA, 1207 bp, Artificial Sequence
  derived and/or modified sequence
ttccgccttcgcccacgtggtccggctccggctcagtcagccgcctcgccgcgcatggccgggaacgcggagccgccgcccgccggagccgcatgcccccaggaccggaggtcctgcagcggccgggccgggggcgaccgcgtctgggaggacggagaacatccggcgaagaagctcaagagcggtggcgacgaggagcggcgcgagaagccgcccaagcggaagatcgtgctgctcatggcctattcgggcaagggctaccacggcatgcagaggaatgtcgggtcctcacaattcaaaacaattgaagatgacttggtgtccgccctcgtccggtcaggctgtattcctgaaaatcatggtgaggacatgaggaaaatgtccttccagcgctgcgcccggacagacaagggtgtgtccgcagccggccaggtggtatccctgaaggtgtggctgattgacgacattctagaaaagatcaacagccaccttccctctcacattcggattctgggactgaagcgggtcacgggcgggtttaactccaagaacagatgtgatgccaggacctattgctacctgctgcccacgtttgcctttgcgcacaaggaccgggacgttcaggatgagacctaccgcctgagcgccgagacgctgcagcaggtcaacaggctcctggcctgctacaagggcacgcacaacttccacaatttcacctcgcagaaggggccgcaggatcccagtgcctgccgctacatcctggagatgtactgcgaggaaccctttgtgcgggagggcctggagtttgcggtgatcagggtgaagggccagagcttcatgatgcatcagatccggaagatggtcggcctggtggtggccattgtgaagggttatgcccctgagagcgtgctggagcgcagctggggcacagagaaggtggacgtgcccaaggcgcccggactcggcctggtcctggagagggtgcacttcgagaagtacaaccagcgctttggcaacgatgggctgcatgagccgctggactgggcgcaggaggaaggaaaggtcgcagccttcaaggaggagcacatctaccccaccatcatcggcaccgagcgggacgaacgctccatggcccagtggctgagcaccttgcccatccacaacttcagtgccaccgctctcacggcaggtggcacgggcgccaagg

SEQ ID NO: 218347 - DNA, 2057 bp, Artificial Sequence
  derived and/or modified sequence
gtgcagtcggtcgttccacttccgccttcgcccacgtggtccggctccggctcagtcagccgcgtcgcgaatggggcaggagcgagcctctctggtcccgacgcgggtggcccgggtctcctcgactcctgaggaaagcccaccgggcggggcgggaggtgaagaggctggggaagtcagaggttaacctgggcgtcaggggacgttggagttgatccgtcagggtcccggggcggtctgggggcagtagagacggggcttgggcgcggggcctgagaggtcaggggtcagcaggagtgaggctggggcgtccaggtccgagaggtcaggggtcagctggagaggggctggggcgccggtttcccggaggtcaggggtcagaaggaacagggctgcagcgtcagggtccgagaggttaggggtcggcagaggcggagctggggcactgggggtcaggggtcggggatcagggcggggtcgggtgcactggtagcctgcgcatgggcctccagcttcgcgcgctgttgggagccttcggacggtggaccctgcgcctgggaccgcgtccgtcctgctcgccgcgcatggccgggaacgcggagccgccgcccgccggagccgcatgcccccaggaccggaggtcctgcagcggccgggccgggggcgaccgcgtctgggaggacggagaacatccggcgaagaagctcaagagcggtggcgacgaggagcggcgcgagaagccgcccaagcggaagatcgtgctgctcatggcctattcgggcaagggctaccacggcatgcagaggaatgtcgggtcctcacaattcaaaacaattgaagatgacttggtgtccgccctcgtccggtcaggctgtattcctgaaaatcatggtgaggacatgaggaaaatgtccttccagcgctgcgcccggacagacaagggtgtgtccgcagccggccaggtggtatccctgaaggtgtggctgattgacgacattctagaaaagatcaacagccaccttccctctcacattcggattctgggactgaagcgggtcacgggcgggtttaactccaagaacagatgtgatgccaggacctattgctacctgctgcccacgtttgcctttgcgcacaaggaccgggacgttcaggatgagacctaccgcctgagcgccgagacgctgcagcaggtcaacaggctcctggcctgctacaagggcacgcacaacttccacaatttcacctcgcagaaggggccgcaggatcccagtgcctgccgctacatcctggagatgtactgcgaggaaccctttgtgcgggagggcctggagtttgcggtgatcagggtgaagggccagagcttcatgatgcatcagatccggaagatggtcggcctggtggtggccattgtgaagggttatgcccctgagagcgtgctggagcgcagctggggcacagagaaggtggacgtgcccaaggcgcccggactcggcctggtcctggagagggtgcacttcgagaagtacaaccagcgctttggcaacgatgggctgcatgagccgctggactgggcgcaggaggaaggaaaggtcgcagccttcaaggaggagcacatctaccccaccatcatcggcaccgagcgggacgaacgctccatggcccagtggctgagcaccttgcccatccacaacttcagtgccaccgctctcacggcaggtggcacgggcgccaaggtgcccagtcccctggaaggcagtgaaggggacggagacactgactgaggcgatgggagctgcccaccagagtgcctctgagcagctcacagtgtgtgcccagatgtgccacccctgtgggcagcaagaagctgggatcgctgcagccatgttttcccggccatgccggcgttgtaacctcaggaccttcccttgtaggaacagcctttctcgaatctgttttcagctcttgcattgcatagatgaacctcagcatgtaaagaactatttttttaaagaagtgattttcttattaaacaagtacaaattttgcttagtcaa

SEQ ID NO: 218348 - DNA, 1637 bp, Artificial Sequence
  derived and/or modified sequence
cccacgtggtccggctccggctcagtcagccgcgtcgcgaatggggcaggagcgagcctctctggtcccgacgcgggtggcccgggtctcctcgactcctgaggaaagcccaccgggcggggcgggaggtgaagaggctggggaagtcagagctcgccgcgcatggccgggaacgcggagccgccgcccgccggagccgcatgcccccaggaccggaggtcctgcagcggccgggccgggggcgaccgcgtctgggaggacggagaacatccggcgaagaagctcaagagcggtggcgacgaggagcggcgcgagaagccgcccaagcggaagatcgtgctgctcatggcctattcgggcaagggctaccacggcatgcagaggaatgtcgggtcctcacaattcaaaacaattgaagatgacttggtgtccgccctcgtccggtcaggctgtattcctgaaaatcatggtgaggacatgaggaaaatgtccttccagcgctgcgcccggacagacaagggtgtgtccgcagccggccaggtggtatccctgaaggtgtggctgattgacgacattctagaaaagatcaacagccaccttccctctcacattcggattctgggactgaagcgggtcacgggcgggtttaactccaagaacagatgtgatgccaggacctattgctacctgctgcccacgtttgcctttgcgcacaaggaccgggacgttcaggatgagacctaccgcctgagcgccgagacgctgcagcaggtcaacaggctcctggcctgctacaagggcacgcacaacttccacaatttcacctcgcagaaggggccgcaggatcccagtgcctgccgctacatcctggagatgtactgcgaggaaccctttgtgcgggagggcctggagtttgcggtgatcagggtgaagggccagagcttcatgatgcatcagatccggaagatggtcggcctggtggtggccattgtgaagggttatgcccctgagagcgtgctggagcgcagctggggcacagagaaggtggacgtgcccaaggcgcccggactcggcctggtcctggagagggtgcacttcgagaagtacaaccagcgctttggcaacgatgggctgcatgagccgctggactgggcgcaggaggaaggaaaggtcgcagccttcaaggaggagcacatctaccccaccatcatcggcaccgagcgggacgaacgctccatggcccagtggctgagcaccttgcccatccacaacttcagtgccaccgctctcacggcaggtggcacgggcgccaaggtgcccagtcccctggaaggcagtgaaggggacggagacactgactgaggcgatgggagctgcccaccagagtgcctctgagcagctcacagtgtgtgcccagatgtgccacccctgtgggcagcaagaagctgggatcgctgcagccatgttttcccggccatgccggcgttgtaacctcaggaccttcccttgtaggaacagcctttctcgaatctgttttcagctcttgcattgcatagatgaacctcagcatgtaaagaactatttttttaaagaagtgattttcttattaaacaagtacaaattttgcttagtcaatc

SEQ ID NO: 218349 - DNA, 1664 bp, Artificial Sequence
  derived and/or modified sequence
agttttgtccgcgctcggccgccgtgcagtcggtcgttccacttccgccttcgcccacgtggtccggctccggctcagtcagccgcgtcgcgaatggggcaggagcgagcctctctggtcccgacgcgggtggcccgggtctcctcgactcctgaggaaagcccaccgggcggggcgggagctcgccgcgcatggccgggaacgcggagccgccgcccgccggagccgcatgcccccaggaccggaggtcctgcagcggccgggccgggggcgaccgcgtctgggaggacggagaacatccggcgaagaagctcaagagcggtggcgacgaggagcggcgcgagaagccgcccaagcggaagatcgtgctgctcatggcctattcgggcaagggctaccacggcatgcagaggaatgtcgggtcctcacaattcaaaacaattgaagatgacttggtgtccgccctcgtccggtcaggctgtattcctgaaaatcatggtgaggacatgaggaaaatgtccttccagcgctgcgcccggacagacaagggtgtgtccgcagccggccaggtggtatccctgaaggtgtggctgattgacgacattctagaaaagatcaacagccaccttccctctcacattcggattctgggactgaagcgggtcacgggcgggtttaactccaagaacagatgtgatgccaggacctattgctacctgctgcccacgtttgcctttgcgcacaaggaccgggacgttcaggatgagacctaccgcctgagcgccgagacgctgcagcaggtcaacaggctcctggcctgctacaagggcacgcacaacttccacaatttcacctcgcagaaggggccgcaggatcccagtgcctgccgctacatcctggagatgtactgcgaggaaccctttgtgcgggagggcctggagtttgcggtgatcagggtgaagggccagagcttcatgatgcatcagatccggaagatggtcggcctggtggtggccattgtgaagggttatgcccctgagagcgtgctggagcgcagctggggcacagagaaggtggacgtgcccaaggcgcccggactcggcctggtcctggagagggtgcacttcgagaagtacaaccagcgctttggcaacgatgggctgcatgagccgctggactgggcgcaggaggaaggaaaggtcgcagccttcaaggaggagcacatctaccccaccatcatcggcaccgagcgggacgaacgctccatggcccagtggctgagcaccttgcccatccacaacttcagtgccaccgctctcacggcaggtggcacgggcgccaaggtgcccagtcccctggaaggcagtgaaggggacggagacactgactgaggcgatgggagctgcccaccagagtgcctctgagcagctcacagtgtgtgcccagatgtgccacccctgtgggcagcaagaagctgggatcgctgcagccatgttttcccggccatgccggcgttgtaacctcaggaccttcccttgtaggaacagcctttctcgaatctgttttcagctcttgcattgcatagatgaacctcagcatgtaaagaactatttttttaaagaagtgattttcttattaaacaagtacaaattttgcttagtcaa

SEQ ID NO: 218350 - DNA, 632 bp, Artificial Sequence
  derived and/or modified sequence
ccgcgtcgcgaatggggcaggagcgagcctctctggtcccgacgcgggtggcccgggtctcctcgactcctgaggaaagcccaccgggcggggcgggagcttcgcgcgctgttgggagccttcggacggtggaccctgcgcctgggaccgcgtccgtcctgctcgccgcgcatggccgggaacgcggagccgccgcccgccggagccgcatgcccccaggaccggaggtcctgcagcggccgggccgggggcgaccgcgtctgggaggacggagaacatccggcgaagaagctcaagagcggtggcgacgaggagcggcgcgagaagccgcccaagcggaagatcgtgctgctcatggcctattcgggcaagggctaccacggcatgcagaggaatgtcgggtcctcacaattcaaaacaattgaagatgacttggtgtccgccctcgtccggtcaggctgtattcctgaaaatcatggtgaggacatgaggaaaatgtccttccagcgctgcgcccggacagacaagggtgtgtccgcagccggccaggtggtatccctgaaggtgtggctgattgacgacattctagaaaagatcaacagccaccttccctctcacattcggattctggg

SEQ ID NO: 218351 - DNA, 1284 bp, Artificial Sequence
  derived and/or modified sequence
atgggcctgcagctgagagccctgctgggcgccttcggcagatggaccctgagactgggccccagacccagctgcagccccagaatggccggcaacgccgagcccccccccgccggcgccgcctgcccccaggacagaagaagctgcagcggcagagccggcggcgacagagtgtgggaggacggcgagcaccccgccaagaagctgaagagcggcggcgacgaggagagaagagagaagccccccaagagaaagatcgtgctgctgatggcctacagcggcaagggctaccacggcatgcagagaaacgtgggcagcagccagttcaagaccatcgaggacgacctggtgagcgccctggtgagaagcggctgcatccccgagaaccacggcgaggacatgagaaagatgagcttccagagatgcgccagaaccgacaagggcgtgagcgccgccggccaggtggtgagcctgaaggtgtggctgatcgacgacatcctggagaagatcaacagccacctgcccagccacatcagaatcctgggcctgaagagagtgaccggcggcttcaacagcaagaacagatgcgacgccagaacctactgctacctgctgcccaccttcgccttcgcccacaaggacagagacgtgcaggacgagacctacagactgagcgccgagaccctgcagcaggtgaacagactgctggcctgctacaagggcacccacaacttccacaacttcaccagccagaagggcccccaggaccccagcgcctgcagatacatcctggagatgtactgcgaggagcccttcgtgagagagggcctggagttcgccgtgatcagagtgaagggccagagcttcatgatgcaccagatcagaaagatggtgggcctggtggtggccatcgtgaagggctacgcccccgagagcgtgctggagagaagctggggcaccgagaaggtggacgtgcccaaggcccccggcctgggcctggtgctggagagagtgcacttcgagaagtacaaccagagattcggcaacgacggcctgcacgagcccctggactgggcccaggaggagggcaaggtggccgccttcaaggaggagcacatctaccccaccatcatcggcaccgagagagacgagagaagcatggcccagtggctgagcaccctgcccatccacaacttcagcgccaccgccctgaccgccggcggcaccggcgccaaggtgcccagccccctggagggcagcgagggcgacggcgacaccgactag

SEQ ID NO: 218352 - protein, 417 aa, Artificial Sequence
  derived and/or modified sequence
MGSAHPRPWLRLRPQPQPRPALWVLLFFLLLLAAAMPRSAPNDILDLRLPPEPVLNANTVCLTLPGLSRRQMEVCVRHPDVAASAIQGIQIAIHECQHQFRDQRWNCSSLETRNKIPYESPIFSRGFRESAFAYAIAAAGVVHAVSNACALGKLKACGCDASRRGDEEAFRRKLHRLQLDALQRGKGLSHGVPEHPALPTASPGLQDSWEWGGCSPDMGFGERFSKDFLDSREPHRDIHARMRLHNNRVGRQAVMENMRRKCKCHGTSGSCQLKTCWQVTPEFRTVGALLRSRFHRATLIRPHNRNGGQLEPGPAGAPSPAPGAPGPRRRASPADLVYFEKSPDFCEREPRLDSAGTVGRLCNKSSAGSDGCGSMCCGRGHNILRQTRSERCHCRFHWCCFVVCEECRITEWVSVCK

SEQ ID NO: 218353 - DNA, 1254 bp, Artificial Sequence
  derived and/or modified sequence
atgggcagcgcccaccccagaccctggctgagactgagaccccagccccagcccagacccgccctgtgggtgctgctgttcttcctgctgctgctggccgccgccatgcccagaagcgcccccaacgacatcctggacctgagactgccccccgagcccgtgctgaacgccaacaccgtgtgcctgaccctgcccggcctgagcagaagacagatggaggtgtgcgtgagacaccccgacgtggccgccagcgccatccagggcatccagatcgccatccacgagtgccagcaccagttcagagaccagagatggaactgcagcagcctggagaccagaaacaagatcccctacgagagccccatcttcagcagaggcttcagagagagcgccttcgcctacgccatcgccgccgccggcgtggtgcacgccgtgagcaacgcctgcgccctgggcaagctgaaggcctgcggctgcgacgccagcagaagaggcgacgaggaggccttcagaagaaagctgcacagactgcagctggacgccctgcagagaggcaagggcctgagccacggcgtgcccgagcaccccgccctgcccaccgccagccccggcctgcaggacagctgggagtggggcggctgcagccccgacatgggcttcggcgagagattcagcaaggacttcctggacagcagagagccccacagagacatccacgccagaatgagactgcacaacaacagagtgggcagacaggccgtgatggagaacatgagaagaaagtgcaagtgccacggcaccagcggcagctgccagctgaagacctgctggcaggtgacccccgagttcagaaccgtgggcgccctgctgagaagcagattccacagagccaccctgatcagaccccacaacagaaacggcggccagctggagcccggccccgccggcgcccccagccccgcccccggcgcccccggccccagaagaagagccagccccgccgacctggtgtacttcgagaagagccccgacttctgcgagagagagcccagactggacagcgccggcaccgtgggcagactgtgcaacaagagcagcgccggcagcgacggctgcggcagcatgtgctgcggcagaggccacaacatcctgagacagaccagaagcgagagatgccactgcagattccactggtgctgcttcgtggtgtgcgaggagtgcagaatcaccgagtgggtgagcgtgtgcaagtag

SEQ ID NO: 218354 - DNA, 1254 bp, Artificial Sequence
  derived and/or modified sequence
atggggagcgcccacccgagaccctggcttcgcctgcgaccgcagcctcagccccggccagcgctgtgggtgctccttttcttcctgttgctgctggctgctgccatgccaaggtccgcgcccaacgacatccttgatctgcggttgcctcccgaacctgtgctgaatgccaatacagtgtgcttgacgttgccaggattatcacggagacagatggaagtttgcgtgcggcaccctgatgtagcagccagcgcgattcagggaatccagattgcaattcatgagtgtcaacaccagttccgtgatcagagatggaattgctcctctctggagacccgcaataagattccttatgagtcacctatctttagccgagggtttagggaatcagctttcgcctacgctattgcagctgccggcgtggttcacgcagtgtccaatgcatgcgctctaggcaagctgaaagcatgtgggtgcgacgccagccgacggggagatgaggaggcctttagacgcaagctgcaccggctgcagctagatgccctgcagcgaggaaaagggctttcccacggcgtacccgaacacccggcgcttccgacagcctccccagggctgcaggattcatgggagtgggggggttgtagtccggatatgggcttcggagaacgcttcagcaaagacttcttggatagccgagagccccatcgagatatacacgcccgcatgcgcctgcacaataatcgagtcgggagacaagctgtgatggagaacatgagacggaaatgtaaatgccatggcacgtctggatcctgccagctaaagacatgctggcaagtgacccccgaatttcgcaccgttggtgctctgctgcggtcgaggtttcacagggctaccttgattagacctcacaatagaaacggaggacaacttgagcccggaccggctggggctccatcccctgcccctggtgcccctggaccacgcaggagagcaagtcccgctgacctggtttattttgaaaagagccctgacttctgcgagagggaaccccgacttgatagtgcaggaacggtgggtcgcctgtgtaacaagtctagcgctggatccgatggatgcggcagtatgtgttgcggcaggggacacaacatcctccgccaaacgagaagtgaacgctgtcattgtcgcttccactggtgctgttttgttgtgtgcgaggaatgtcgcataactgagtgggtctccgtctgtaaatag

SEQ ID NO: 218355 - DNA, 1254 bp, Artificial Sequence
  derived and/or modified sequence
atgggcagcgcccacccccggccctggctgcggctgcggccccagccccagcccaggcctgccctgtgggtgctgctcttcttcctgctgctgctggccgccgccatgcccaggtctgccccaaatgacatcctggacctgcggctgcccccagagcctgtgctgaatgccaacacagtgtgcctgaccctgcccggcctgagccggcggcagatggaggtgtgtgtgcgccacccagatgtggccgccagcgccatccagggcatccagatcgccatccacgagtgccagcaccagttccgggaccagcgctggaactgcagcagcctggagaccaggaacaagatcccctatgagagccccatcttcagccggggcttccgggagagcgcctttgcctatgccatcgctgctgctggggtggtgcatgctgtgtccaatgcctgtgccctgggcaagctgaaggcctgtggctgtgatgccagcagaagaggagatgaggaggccttccggaggaagctgcaccggctgcagctggatgccctgcagaggggcaagggcctgagccacggcgtgcctgagcacccagccctgcccacagccagccctggcctgcaggacagctgggagtggggcggctgcagcccagacatgggctttggagagcgcttcagcaaggacttcctggacagccgggagccccaccgggacatccacgccaggatgaggctgcacaacaacagagtgggccggcaggccgtgatggagaacatgagaagaaaatgtaaatgtcatggcaccagcggcagctgccagctgaagacctgctggcaggtgaccccagagttcagaacagtgggcgccctgctgcggagccgcttccaccgggccaccctcatccggccccacaacagaaatggaggccagctggagcccggccctgctggggcccccagccctgcccctggggcccctggccccaggagaagagccagccctgctgacctggtgtactttgagaagagcccagacttctgtgagcgggagccccggctggacagcgctggcaccgtgggccgcctgtgcaacaagagcagcgctggcagtgatggctgcggctccatgtgctgcggccggggccacaacatcctgcggcagaccaggtctgagcgctgccactgccgcttccactggtgctgctttgtggtgtgtgaggagtgccgcatcacagagtgggtgtctgtgtgcaagtag

SEQ ID NO: 218356 - DNA, 1254 bp, Artificial Sequence
  derived and/or modified sequence
atgggcagcgcccacccccggccctggctgcggctgcggccccagcctcagcctaggccagccctctgggtgctgttgtttttcctgcttctgctggcggctgccatgccaaggtccgccccaaatgatatactcgatttacggctgccacctgagccagtcctgaacgccaacacagtatgtctaaccctgcccgggcttagtagacgacagatggaagtgtgcgtgcggcatcctgatgtggcggcctccgctatacaggggatacagatcgccattcacgaatgtcaacatcagtttagagaccaaagatggaattgctcttctctcgagactagaaacaagattccctatgaatcaccgatattctcacgaggattcagggagtctgcctttgcttatgccattgccgccgccggggttgtgcatgcggtgagtaatgcatgcgcactagggaagctcaaggcttgtgggtgcgatgctagccggaggggggatgaggaggcattcaggaggaagctccacagactccagcttgacgcactccagagaggcaaaggactcagccacggggtccccgaacatccggccctgcccactgcctctcccggccttcaggattcgtgggagtggggcggatgtagccccgacatgggcttcggcgagcgctttagcaaggattttctggacagcagagagccacacagagatatccatgcaaggatgcgcttacacaataatagggtgggccggcaagcggttatggagaatatgagaagaaaatgtaaatgtcacggaacctcggggtcttgtcaattaaaaacctgctggcaagttacacctgagttccggactgtgggcgccctcttgcgtagccgattccacagagctactctcatcaggccacacaacaggaacggaggccagctggaaccaggacctgctggtgcgcctagtcccgccccgggtgctcccggcccccgacggcgtgccagtcccgccgatctcgtgtactttgaaaagtcccctgacttctgcgagcgggaacccagactggattccgcaggaacagtgggccgactttgcaataaatcttcagccggcagcgacggttgtgggtccatgtgctgcggtaggggacataacatcctccgacaaaccagatcagagcgttgccattgtcggttccattggtgctgttttgtggtatgcgaggagtgtaggatcacggaatgggtgagcgtatgcaaatag

SEQ ID NO: 218357 - DNA, 1254 bp, Artificial Sequence
  derived and/or modified sequence
atgggctcggcgcacccgcgtccatggctgcgattgagaccccagcctcagcccagaccagccctttgggtgttgttattttttctcctcctcctggctgccgcaatgcctcggtccgcccctaacgacattctcgatctcagactcccacccgagccagtgctaaatgctaatacagtgtgcctgacattacccggtctgtcccgcagacagatggaagtgtgtgttcgtcatccagacgtggcggcttccgctatccaagggatccagattgccatacacgagtgtcagcatcagtttcgcgatcagcgctggaattgttcctctctcgagacacgcaacaagataccatacgagagcccaatcttcagcaggggtttccgagagtccgcatttgcctacgccattgctgccgcaggcgtcgtccacgctgtgtccaatgcctgcgctcttggcaagctgaaggcatgcggatgcgatgcttctcgacgcggagacgaggaagcttttcgacgcaagctgcacagactccagctggatgcacttcagaggggcaaggggctgagccacggggtccccgaacaccctgccctccctacagcgtctccaggcctccaagattcgtgggagtggggaggatgctcacccgatatgggctttggagagagattttcaaaagacttcctggatagtcgcgagcctcaccgtgacattcacgcacggatgcggctgcacaacaaccgggtgggcaggcaagccgtgatggagaacatgcggaggaaatgcaaatgccacgggacatccggctcctgccagcttaaaacatgttggcaggtgacccccgaatttcggactgtgggcgcactcctgcgcagtcgatttcaccgagctaccttgatccgccctcacaacaggaatgggggtcagctggagcctggtccggctggcgctccgtcaccagccccaggtgcgcctgggcctcgaagaagagccagccctgccgacctagtctactttgaaaagagtcccgacttctgcgaacgtgaaccacggctcgattcagcaggtacagttggtagactgtgtaacaagtcttcagcaggtagtgacggatgtggctcaatgtgttgcggcagaggacacaacatccttagacagacaagatcagaaagatgtcactgccgattccactggtgctgctttgttgtatgcgaagagtgccgtattactgaatgggtgtccgtctgcaagtag

SEQ ID NO: 218358 - DNA, 2547 bp, Artificial Sequence
  derived and/or modified sequence
cctcagcagggacgctcccacccccagtccccagcggacgcagtggcctcgggactcgtacacgcctccacgccccgccgcgtgacgtcacgtggggtagagccctgagacactaaatggcgggggggtggggggaggaaagggaaggcggcagagctccccgagccgggacagtcacttactctacaggcagtggggcccgacacagacagcgccgcccccgccagccagcctcgcacgccctcggaagcgcaggctcccggcgctgcgctggagggttccccggcaccccagcctcccgtccccagcccgctgcacctccgggccccccttacccttgagaggcaccgggagttgtcgcgggggggcctcgggaaattccccggacccctgtgccaggaggtgcccggttcgcccgctcttcaccccccgccccccccgagggcggtgcccgggggtgctgccccatggagcggggaggcgggcgccgtctgctccgggagccctgacccgagtcggagctgtgtgtcgcagccgccccgaccccccgccgatcatgcgccggcgcccctggctctccagtcccactgggctgtgagccccccactcccagcccgtcagggcctgcgcgccatgggcagcgcccaccctcgcccctggctgcggctccgaccccagccccagccgcggccagcgctctgggtgctcctgttcttcctactgctgctggctgctgccatgcccaggtcagcacccaatgacattctggacctccgcctccccccggagcccgtgctcaatgccaacacagtgtgcctaacattgccaggcctgagccggcggcagatggaggtgtgtgtgcgtcaccctgatgtggctgcctcagccatacagggcatccagatcgccatccacgaatgccaacaccaattcagggaccagcgctggaactgctcaagcctggagactcgcaacaagatcccctatgagagtcccatcttcagcagaggtttccgagagagcgcttttgcctacgccatcgcagcagctggcgtggtgcacgccgtgtccaatgcgtgtgccctgggcaaactgaaggcctgtggctgtgatgcgtcccggcgaggggacgaggaggccttccgtaggaagctgcaccgcttacaactggatgcactgcagcgtggtaagggcctgagccatggggtcccggaacacccagccctgcccacagccagcccaggcctgcaggactcctgggagtggggcggctgcagccccgacatgggcttcggggagcgcttttctaaggactttctggactcccgggagcctcacagagacatccacgcgagaatgaggcttcacaacaaccgagttgggaggcaggcagtgatggagaacatgcggcggaagtgcaagtgccacggcacgtcaggcagctgccagctcaagacgtgctggcaggtgacgcccgagttccgcaccgtgggggcgctgctgcgcagccgcttccaccgcgccacgctcatccggccgcacaaccgcaacggcggccagctggagccgggcccagcgggggcaccctcgccggctccgggcgctcccgggccgcgccgacgggccagccccgccgacctggtctacttcgaaaagtctcccgacttctgcgagcgcgagccgcgcctggactcggcgggcaccgtgggccgcctgtgcaacaagagcagcgccggctcggatggctgcggcagcatgtgctgcggccgcggccacaacatcctgcgccagacgcgcagcgagcgctgccactgccgcttccactggtgctgtttcgtggtctgcgaagagtgccgcatcaccgagtgggtcagcgtctgcaagtgagcggcccggggtcccctgggccctgatcgaggtcccctcctggagcctggccctctgaggcttacggtcttggcaaggcagcatcgccttggctcttgggaagaggagattggaccacatgatcttataggaacccctcagctctgaggtctgtgatcgccggacagtccaggcctgtctgaaccccaccactcacttctgtgggctctaggactgactgggttcttcctccctccccgaagcccagacagttcagttgggctgggggttgctccacaccctaaaacaagcctcagccaggcaacccgtcagtctgtctccatcctttcaccccttccctggagatgggaggtggggaatgaatggaagctgacgggcagagagaggaggattaaaaaaaagaaatagacataactgagctgaagtaattccataaagggcccagacagcctcctccaccattcccttcatcattcatttaacaaatatttattttgcactctctttgcggcactctgggggcggtggggtgcgtgggggtggcaatgcaaggcactgaggccacagatgtgagtaagcgagacacaacacttgtcctcttggaggttacattcttgctggggggaggcatgggcaataaacaagtaaatatacaaacaa

SEQ ID NO: 218359 - protein, 246 aa, Artificial Sequence
  derived and/or modified sequence
MAAAAATKILLCLPLLLLLSGWSRAGRADPHSLCYDITVIPKFRPGPRWCAVQGQVDEKTFLHYDCGNKTVTPVSPLGKKLNVTTAWKAQNPVLREVVDILTEQLRDIQLENYTPKEPLTLQARMSCEQKAEGHSSGSWQFSFDGQIFLLFDSEKRMWTTVHPGARKMKEKWENDKVVAMSFHYFSMGDCIGWLEDFLMGMDSTLEPSAGAPLAMSSGTTQLRATATTLILCCLLIILPCFILPGI

SEQ ID NO: 218360 - DNA, 741 bp, Artificial Sequence
  derived and/or modified sequence
atggccgccgccgccgccaccaagatcctgctgtgcctgcccctgctgctgctgctgagcggctggagcagagccggcagagccgacccccacagcctgtgctacgacatcaccgtgatccccaagttcagacccggccccagatggtgcgccgtgcagggccaggtggacgagaagaccttcctgcactacgactgcggcaacaagaccgtgacccccgtgagccccctgggcaagaagctgaacgtgaccaccgcctggaaggcccagaaccccgtgctgagagaggtggtggacatcctgaccgagcagctgagagacatccagctggagaactacacccccaaggagcccctgaccctgcaggccagaatgagctgcgagcagaaggccgagggccacagcagcggcagctggcagttcagcttcgacggccagatcttcctgctgttcgacagcgagaagagaatgtggaccaccgtgcaccccggcgccagaaagatgaaggagaagtgggagaacgacaaggtggtggccatgagcttccactacttcagcatgggcgactgcatcggctggctggaggacttcctgatgggcatggacagcaccctggagcccagcgccggcgcccccctggccatgagcagcggcaccacccagctgagagccaccgccaccaccctgatcctgtgctgcctgctgatcatcctgccctgcttcatcctgcccggcatctag

SEQ ID NO: 218361 - DNA, 741 bp, Artificial Sequence
  derived and/or modified sequence
atggcagcagcagcggcaacaaagatcctgctgtgtctgcccctgcttctgctgctcagtgggtggagcagagcagggcgagcagaccctcactctctatgttacgacattactgtgatacctaagttccgcccgggtcctaggtggtgcgccgtacagggacaggtagatgagaagacttttctccattatgactgtggcaacaaaactgttactcctgtctcgccactgggcaagaaattgaatgtgacaaccgcatggaaggcacagaatccagtgctgagggaggtcgttgatatcctgactgagcagttacgggatatccagctcgagaactatacccccaaggagcctctgaccctgcaggccaggatgagctgcgaacagaaagctgagggccattcttccggctcctggcagttcagtttcgacgggcagatctttctcctattcgattccgaaaaaagaatgtggacgactgtgcatccgggcgcgcgtaaaatgaaagagaagtgggagaacgacaaagtagtcgctatgtccttccactatttctctatgggagactgcatcgggtggctcgaagacttcctgatgggaatggattcaaccctggagccatccgcaggcgccccgctggcaatgagttctggaactacccagttgcgcgcgaccgccacaacattgattctgtgttgtctcttgattatcctaccctgctttatcctgccagggatatag

SEQ ID NO: 218362 - DNA, 741 bp, Artificial Sequence
  derived and/or modified sequence
atggctgctgctgctgccaccaagatcctgctgtgcctgcccctgctgctgctgctgagcggctggagcagagctggccgggctgacccccacagcctgtgctatgacatcaccgtcatccccaagttccggcccggcccccgctggtgtgctgtgcagggccaggtggatgagaagaccttcctgcactatgactgtggcaacaagacagtgacccctgtgagccccctgggcaagaagctgaatgtgaccacagcctggaaggcccagaaccctgtgctgcgggaggtggtggacatcctgacagagcagctgcgggacatccagctggagaactacacccccaaggagcccctgaccctgcaggccaggatgagctgtgagcagaaggccgagggccacagcagcggctcctggcagttctcctttgatggccagatcttcctgctgtttgattctgagaagaggatgtggaccaccgtgcaccctggggccaggaagatgaaggagaagtgggagaatgacaaggtggtggccatgtccttccactacttctccatgggagactgcatcggctggctggaggacttcctgatgggcatggacagcaccctggagcccagcgctggggcccccctggccatgagcagcggcaccacccagctgcgggccacagccaccaccctcatcctgtgctgcctgctgatcatcctgccctgcttcatcctgcccggcatctag

SEQ ID NO: 218363 - DNA, 741 bp, Artificial Sequence
  derived and/or modified sequence
atggccgccgccgccgccaccaagatcctgctgtgcctgcccctgctgctgctacttagtgggtggagccgagccggacgcgccgacccacattccctctgctatgatatcacagtcatccctaagtttaggcctggcccccgctggtgcgcggtgcagggccaggtggacgaaaagacctttctgcattatgactgtggcaataaaacggtaacaccagtgagccccctaggcaaaaaactgaatgtgacgaccgcttggaaggcccaaaaccccgtcctgcgcgaggtcgtggatatcctgaccgaacagttgagagatattcaactcgagaactatacaccaaaggagccgctgacgctacaggcaagaatgagctgtgaacagaaggctgagggccactccagtggctcatggcagttcagcttcgacggacaaatttttttgctgtttgactccgaaaagcgcatgtggacaacagtgcaccccggagcccggaaaatgaaagaaaagtgggaaaacgacaaggttgttgcgatgtccttccactacttctctatgggggactgtatcggatggctcgaagacttccttatgggaatggactcaaccctagagccttcagctggcgccccactagccatgtcctctggaaccacacaattgcgtgctacagccaccacacttattttgtgctgtctcctaattatcctgccgtgttttatccttcccgggatctag

SEQ ID NO: 218364 - DNA, 741 bp, Artificial Sequence
  derived and/or modified sequence
atggcagccgctgccgcaacaaagatactactatgtttgccactcctgctcctgttgagtggatggtcacgtgcaggccgtgctgatccccactccctatgctacgacattaccgtgattcccaaatttcgccctggcccacggtggtgcgctgttcagggtcaagtggacgaaaaaacattcctgcactatgattgcggtaacaagaccgtcacccctgtgtcccccctcgggaaaaagctgaacgtgacaaccgcgtggaaggcgcagaaccctgtactacgtgaggttgtggacatccttaccgaacagctccgcgacattcagctggagaattataccccgaaagaaccgttaacactccaagcccgtatgagttgcgaacagaaggccgagggccactcgtctgggtcatggcagtttagctttgacggccaaatctttctcctgttcgacagcgagaagaggatgtggactacagtgcatccaggagcaagaaaaatgaaagaaaagtgggagaacgacaaggtcgtggcaatgagcttccattatttcagcatgggagattgtatcggatggttagaagatttccttatgggaatggactctactctcgagccaagcgcgggtgcccctctggccatgtccagcggaacaacccagttgcgagcaaccgcgacaactttaatactgtgttgtctcttaattatcctgccctgctttatcctgcccggtatctag

SEQ ID NO: 218365 - DNA, 1349 bp, Artificial Sequence
  derived and/or modified sequence
aaaaccttgaggtgattcatcttccaggctctccttccatcaagtctctcatccctagcgctctgggtccttaatggcagcagccgccgctaccaagatccttctgtgcctcccgcttctgctcctgctgtccggctggtcccgggctgggcgagccgaccctcactctctttgctatgacatcaccgtcatccctaagttcagacctggaccacggtggtgtgcggttcaaggccaggtggatgaaaagacttttcttcactatgactgtggcaacaagacagtcacacctgtcagtcccctggggaagaaactaaatgtcacaacggcctggaaagcacagaacccagtactgagagaggtggtggacatacttacagagcaactgcgtgacattcagctggagaattacacacccaaggaacccctcaccctgcaggcaaggatgtcttgtgagcagaaagctgaaggacacagcagtggatcttggcagttcagtttcgatgggcagatcttcctcctctttgactcagagaagagaatgtggacaacggttcatcctggagccagaaagatgaaagaaaagtgggagaatgacaaggttgtggccatgtccttccattacttctcaatgggagactgtataggatggcttgaggacttcttgatgggcatggacagcaccctggagccaagtgcaggagcaccactcgccatgtcctcaggcacaacccaactcagggccacagccaccaccctcatcctttgctgcctcctcatcatcctcccctgcttcatcctccctggcatctgaggagagtcctttagagtgacaggttaaagctgataccaaaaggctcctgtgagcacggtcttgatcaaactcgcccttctgtctggccagctgcccacgacctacggtgtatgtccagtggcctccagcagatcatgatgacatcatggacccaatagctcattcactgccttgattccttttgccaacaattttaccagcagttatacctaacatattatgcaattttctcttggtgctacctgatggaattcctgcacttaaagttctggctgactaaacaagatatatcattttctttcttctctttttgtttggaaaatcaagtacttctttgaatgatgatctctttcttgcaaatgatattgtcagtaaaataatcacgttagacttcagacctctggggattctttccgtgtcctgaaagagaatttttaaattatttaataagaaaaaatttatattaatgattgtttcctttagtaatttattgttctgtactgatatttaaataaagagttctatttcccaaaaa

SEQ ID NO: 218366 - DNA, 144 bp, Artificial Sequence
  derived and/or modified sequence
atgagacagctgaagggcaagcccaagaaggagaccagcaaggacaagaaggagagaaagcaggccatgcaggaggccagacagcagatcaccaccgtggtgctgcccaccctggccgtggtggtgctgctgatcgtggtgtag

SEQ ID NO: 218367 - protein, 244 aa, Artificial Sequence
  derived and/or modified sequence
MAAAASPAFLLCLPLLHLLSGWSRAGWVDTHCLCYDFIITPKSRPEPQWCEVQGLVDERPFLHYDCVNHKAKAFASLGKKVNVTKTWEEQTETLRDVVDFLKGQLLDIQVENLIPIEPLTLQARMSCEHEAHGHGRGSWQFLFNGQKFLLFDSNNRKWTALHPGAKKMTEKWEKNRDVTMFFQKISLGDCKMWLEEFLMYWEQMLDPTKPPSLAPGTTQPKAMATTLSPWSLLIIFLCFILAGR

SEQ ID NO: 218368 - DNA, 735 bp, Artificial Sequence
  derived and/or modified sequence
atggccgccgccgcatcacctgcctttctgctgtgcctgccactgctccatttgctatccggctggagcagggccggctgggtcgacacgcattgcctgtgctatgactttatcatcacacctaaatcgcgacccgagccacagtggtgcgaggtgcagggtctcgtcgacgagcggccgttcttacattacgactgcgtgaaccacaaggccaaggccttcgcatcactgggaaagaaggtaaatgtgactaaaacgtgggaagagcagactgagacactccgtgacgttgtggactttttgaagggtcaactcttggacattcaggttgaaaaccttattcccatcgaacccttaacgcttcaggctcgcatgagctgtgagcatgaagcgcacggccacgggcggggctcttggcagttcctgtttaatggccagaagttcctgctgtttgactcgaacaatagaaagtggacagctctgcacccgggcgcaaaaaaaatgacggaaaagtgggaaaagaacagagatgtcactatgttcttccaaaaaatttctctgggcgactgtaagatgtggcttgaagagttccttatgtactgggagcagatgttggatcccacaaagcccccaagccttgcacccggcacaacgcagcctaaggctatggctaccacccttagcccttggtccctccttattatcttcctgtgcttcatcttggccggccgctag

SEQ ID NO: 218369 - DNA, 735 bp, Artificial Sequence
  derived and/or modified sequence
atggccgccgccgctagccctgcgttcctcctctgtctgccactgctgcacctgctctcagggtggtcccgcgctggatgggtggatacacactgcctttgctacgactttataattacccccaaatccagacctgaacctcagtggtgcgaagtgcagggtcttgtagacgagaggccatttctccactacgactgcgtcaaccacaaggcgaaagcctttgcctctctggggaagaaggtgaacgtcactaagacgtgggaagagcagacggaaactcttagggatgtggtggatttcctgaaaggccagctcctggacatacaggttgagaatctcattcccatcgagccgctgaccctgcaggcccggatgagctgcgaacacgaagcacacggccacgggaggggaagctggcagttcctgtttaatggtcaaaaattcctgctgttcgactccaacaaccgaaagtggaccgcactgcacccaggggccaagaagatgactgagaaatgggaaaagaaccgtgacgtgactatgttttttcaaaaaatctctctcggagattgcaaaatgtggttggaggagttcctcatgtactgggaacagatgctggacccaacaaagcctccgagtcttgcacctggcaccactcagccaaaagcaatggctactaccctttccccttggtccctcttgataatttttctgtgcttcattttggcaggcagatag

SEQ ID NO: 218370 - DNA, 735 bp, Artificial Sequence
  derived and/or modified sequence
atggctgctgctgccagccctgccttcctgctgtgcctgcccctgctgcacctgctgagcggctggagcagagctggctgggtggacacccactgcctgtgctatgacttcatcatcacccccaagagcaggcctgagccccagtggtgtgaggtgcagggcctggtggatgagcggcccttcctgcactatgactgtgtgaaccacaaggccaaggcctttgccagcctgggcaagaaggtgaatgtgaccaagacctgggaggagcagacagagaccctgagagatgtggtggacttcctgaagggccagctgctggacatccaggtggagaacctgatccccatcgagcccctgaccctgcaggccaggatgagctgtgaacatgaggcccacggccacggccggggctcctggcagttcctgttcaacggccagaagttcctgctgtttgacagcaacaacaggaagtggacagccctgcaccctggggccaagaagatgacagagaagtgggagaagaacagagatgtgaccatgttcttccagaagatcagcctgggggactgcaagatgtggctggaggagttcctgatgtactgggagcagatgctggaccccaccaagccacccagcctggcccctggcaccacccagcccaaggccatggccaccaccctgagcccctggagcctgctgatcatcttcctgtgcttcatcctggccggccgctag

SEQ ID NO: 218371 - DNA, 735 bp, Artificial Sequence
  derived and/or modified sequence
atggccgccgccgccagccccgccttcctgctgtgcctgcccctgctgcaccttttgtccggctggagtagggctggttgggtcgatacccactgcctttgttacgattttattattacgcccaaaagccgcccagagccccagtggtgtgaggttcaggggctcgttgacgaacgacctttccttcattacgactgcgtgaatcacaaggccaaagccttcgccagcctgggtaaaaaggtaaacgttactaagacatgggaggaacagactgaaacactgcgcgacgtcgttgatttcttaaagggccaactgctagatatccaggttgagaacctgattccgatcgaaccactgactttgcaagccaggatgtcttgtgaacacgaagcccatggacatggcaggggatcctggcagttcctgttcaacgggcagaaattcctcctgtttgactcgaataaccgtaaatggacggcactccatcccggcgccaaaaagatgactgagaagtgggagaagaatcgcgatgtgacaatgttcttccagaaaatttctctgggagattgtaaaatgtggctcgaggaattcctgatgtactgggaacagatgctcgaccccacgaaacctccgtcccttgccccggggactacgcagccaaaggccatggccactactctatccccctggtccctgctcatcatattcttatgtttcatactcgccgggcggtag

SEQ ID NO: 218372 - DNA, 735 bp, Artificial Sequence
  derived and/or modified sequence
atggccgccgccgccagccccgccttcctgctgtgcctgcccctgctgcacctcctgtcgggatggtcacgagcagggtgggtggatactcattgtctctgctatgacttcatcatcacacctaagagcaggccagagccacaatggtgtgaagtccaggggctcgtggatgaaaggccattccttcattacgactgcgttaaccacaaagctaaggcgttcgcatcccttggtaagaaggtgaatgtaacgaaaacctgggaggagcagacagaaacactgagggacgttgtcgattttctcaagggtcagttgttagacattcaggttgagaacctcattcccatcgaacccctgaccctgcaggctcggatgagttgcgagcacgaggcgcacggccatggccgcggcagctggcaattcctgtttaacgggcagaaatttcttctgtttgactcaaacaacagaaagtggaccgccctgcacccgggggctaagaaaatgactgagaagtgggagaagaaccgcgatgtgacaatgttcttccaaaaaatctccctcggagactgcaagatgtggttagaagagttcctaatgtactgggaacagatgctcgaccccaccaaaccaccttccctggctcctgggaccacccagccaaaggcgatggccaccactctttccccctggtctctcttgatcatatttctctgcttcattcttgctggcagatag

SEQ ID NO: 218373 - DNA, 735 bp, Artificial Sequence
  derived and/or modified sequence
atggctgctgccgcatcgcccgctttcctgttgtgtctcccgctcctgcatctgctgtcaggctggtcccgcgcaggctgggtggacacccactgcctgtgctacgatttcatcattactcctaaaagccgtccagaacctcagtggtgtgaggtgcagggcctcgttgacgagcgtccattcctgcactatgactgtgtgaaccacaaggccaaagctttcgcctctctgggaaaaaaggtaaatgtgactaaaacctgggaggagcagacagaaacccttcgcgatgttgtggattttctcaagggccaactgctcgacattcaggtagagaacctgatacctatcgagccgcttacccttcaggcccgtatgtcatgcgagcacgaagcacacgggcatggtagaggctcctggcagtttctttttaatggccagaaattcttactcttcgattctaataataggaaatggactgcccttcatcccggagccaagaagatgaccgagaagtgggaaaagaatcgcgacgtgacgatgttcttccagaagatctctctgggcgactgtaagatgtggctagaagaattcctgatgtattgggagcagatgctagacccaacaaagcccccttcactcgctcctggcaccactcagcccaaggctatggctacaacccttagtccttggtccttattgattatctttctgtgctttattctcgcaggacgatag

SEQ ID NO: 218374 - DNA, 735 bp, Artificial Sequence
  derived and/or modified sequence
atggccgctgcagcatcacctgctttccttctgtgtttgccactgctgcatcttttgtcagggtggtccagggctggctgggtcgatacgcattgtttatgttatgactttatcatcactccaaagtccaggcccgaaccccagtggtgcgaggtgcagggactggtggatgagagacccttcctccattacgattgcgtcaaccataaagccaaggcattcgcctcactcgggaagaaagtaaacgtgactaaaacttgggaggagcaaactgagacattgcgagacgtagtggatttcctgaaaggacagctgctagacattcaggtggaaaatctgattcctatagaacctctaaccctgcaggctcggatgagttgcgagcacgaggctcatggccatggacgaggcagctggcagttcttgtttaacggccagaagttcctcctttttgacagcaataatcgcaagtggacagccctccatcccggtgctaaaaagatgacagaaaagtgggagaagaatagggacgtcacaatgtttttccaaaaaatcagccttggcgattgcaagatgtggctggaagagtttttgatgtactgggaacagatgctggatcccacaaaacctccgagcttggcacctgggaccacacaaccaaaagctatggctaccactttgtctccctggagtctcctgattatcttcctctgttttattctggcgggtaggtag

SEQ ID NO: 218375 - DNA, 3140 bp, Artificial Sequence
  derived and/or modified sequence
gggaaccatcagcgcctcctgtccacggagctccaggtctacaatggcagcggccgccagccccgcgttccttctgtgcctcccgcttctgcacctgctgtctggctggtcccgggcaggatgggtcgacacacactgtctttgctatgacttcatcatcactcctaagtccagacctgaaccacagtggtgtgaagttcaaggcctggtggatgaaaggccttttcttcactatgactgtgttaaccacaaggccaaagcctttgcttctctggggaagaaagtcaatgtcacaaaaacctgggaagaacaaactgaaacactaagagacgtggtggatttccttaaagggcaactgcttgacattcaagtggagaatttaatacccattgagcccctcaccctgcaggccaggatgtcttgtgagcatgaagcccatggacacggcagaggatcttggcagttcctcttcaatggacagaagttcctcctctttgactcaaacaacagaaagtggacagcacttcatcctggagccaagaagatgacagagaagtgggagaagaacagggatgtgaccatgttcttccagaagatttcactgggggattgtaagatgtggcttgaagaatttttgatgtactgggaacaaatgctggatccaacaaaaccaccctctctggccccaggcacaacccaacccaaggccatggccaccaccctcagtccctggagccttctcatcatcttcctctgcttcattctagctggcagatgaggagagttgtttagagtgacaggtggaaagtgatatcaagaagcctctgttagcctggtctgggtcctgctctcccttcagggaggccgcctgtctactcaccactgtgcctttctggaaagcaggagttcaagccttagcaagcccagaggcccccagcagacgatgaggacattgtcggctcaacatctcaggccactcattaccttcgctcatgatcccagcagccatttttcttaacaccttctgccactttctgtcggtgctaatggatggaactcctgcacaagttttaactgaacaagaaatcccagcaaaaggcatttttttttctacttctttgattgtagaaaagcagacacttctctgaaacatgaccttattcttccaaacagtatcgctagtaaaatagcatgctggacttcagacctcagggatccttttgatgcactgaccaggaattgtgataatccttttcatttttatggctttttacagtttctcattctgtcaaccatattgaagtgaagtggcatagtcttcactcactgtaatctccagctcctgggctcaagtgatcctctagactcagcctctagaatagctgggactacaggcacatgccaccaggactggcaaactgttttatttttaggtagaggtagggtcttcctatgttgcccaggatggtcttcaaatcttggtctcgagcaatgctaccaccttggcctcccaatgctctgggattacagacatgaaccacagtgcctgttgtagaaatttttaattatttaatatgaaaatattacattcatgattattttatttagtaaataaaataatagagagcccagaaatcaacctgcacacctaccgccatctaatcttcaatagaaatgggcaatgtgggaaagactccctattcgaaaattagtgctggaatatctggccaaccatatgcagaagaatgaaactgaacccctacttctccccatatatgtaaaataattcaatatggatgaaagatttaaatataagtactaaaactgtaaaaatcctggaatataacctaagaaataccaatgtggacatagggcctggcaaagatttcatgaagaagacactaaaaacaattgcaacaaaaacagaaattgacaaatggggcctcattaaactaaagagcttctgcacagaaaaagaaactagcaacacagtaaacagacagcctgtagaatggggaaaactatttgcaaactctgcatctgatgaaggtccaatatccagaatctacaaggaacttaaacaattcaacaagcaagaagaaaaaacccaattaaaattgggcaaaggcatgaacagacacttttcaaaagaagacctacaattggccaacaaacatgaaaaaatgctcagtatcactaatcatcagataagtgcaaatcaaaactgcaatgagttaccatctcttaccagtcacaaagtcagagatggtggtgaggctgcagagcaaaagaaacagacactgttggtgggaaagcaaacttgttcagccactatggaaagcagtttggagatttctccaagaacttaaaatagaactaccattcaatcccgcaatcccactactcgggatatacccacaggaaaagaattcattttatcaaaaagacacctgcaccaatatgttcattacagtgctattctcaccagcaaggacagagaatcaatctaagtgcccaacaacagtaaattcaatgaaaaaaaatgtggtacatagatacgatggaaaactatgcagccatgaaacacaagaaaatcatgtccttttcagcaacatggatgcaactagaggctattatcctaagcaacctaatgcaagaacagaaaaccacatactgcatcttcccattggaaagtggcagctaaacattaaattcgcatgaaccacagatgctggagatcaccagaccggggagagaagaggggcacctgggctgaaaaacacacctgttgggtatcatgcttactgtctgggcgatgggatcattgggacaccaagcctcagcttctcaaattctacccatgtaacaaacctgtatatgtaccttgtattatataggttgaaattaaagatgaataaataaaataaaatgacacaaggccaaaaacaaatgggtttaactgaccagagcgagagaactctgcactatgaacccaaacccagctcaaaaagataaaatctagtcatttaagataatcataagttgtatgatgataattgtataaaaatttgtatgatgataattgtataataattatacatgaaagtgccaaaaccctacaattaaacactgtataatgg

SEQ ID NO: 218376 - DNA, 1621 bp, Artificial Sequence
  derived and/or modified sequence
gggaaccatcagcgcctcctgtccacggagctccaggtctacaatggcagcggccgccagccccgcgttccttctgtgcctcccgcttctgcacctgctgtctggctggtcccgggcaggatgggtcgacacacactgtctttgctatgacttcatcatcactcctaagtccagacctgaaccacagtggtgtgaagttcaaggcctggtggatgaaaggccttttcttcactatgactgtgttaaccacaaggccaaagcctttgcttctctggggaagaaagtcaatgtcacaaaaacctgggaagaacaaactgaaacactaagagacgtggtggatttccttaaagggcaactgcttgacattcaagtggagaatttaatacccattgagcccctcaccctgcaggccaggatgtcttgtgagcatgaagcccatggacacggcagaggatcttggcagttcctcttcaatggacagaagttcctcctctttgactcaaacaacagaaagtggacagcacttcatcctggagccaagaagatgacagagaagtgggagaagaacagggatgtgaccatgttcttccagaagatttcactgggggattgtaagatgtggcttgaagaatttttgatgtactgggaacaaatgctggatccaacaaaaccaccctctctggccccaggcacaacccaacccaaggccatggccaccaccctcagtccctggagccttctcatcatcttcctctgcttcattctagctggcagatgagtggaaagtgatatcaagaagcctctgttagcctggtctgggtcctgctctcccttcagggaggccgcctgtctactcaccactgtgcctttctggaaagcaggagttcaagccttagcaagcccagaggcccccagcagacgatgaggacattgtcggctcaacatctcaggccactcattaccttcgctcatgatcccagcagccatttttcttaacaccttctgccactttctgtcggtgctaatggatggaactcctgcacaagttttaactgaacaagaaatcccagcaaaaggcatttttttttctacttctttgattgtagaaaagcagacacttctctgaaacatgaccttattcttccaaacagtatcgctagtaaaatagcatgctggacttcagacctcagggatccttttgatgcactgaccaggaattgtgataatccttttcatttttatggctttttacagtttctcattctgtcaaccatattgaagtgaagtggcatagtcttcactcactgtaatctccagctcctgggctcaagtgatcctctagactcagcctctagaatagctgggactacaggcacatgccaccaggactggcaaactgttttatttttaggtagaggtagggtcttcctatgttgcccaggatggtcttcaaatcttggtctcgagcaatgctaccaccttggcctcccaatgctctgggattacagacatgaaccacagtgcctgttgtagaaatttttaattatttaatatgaaaatattacattcatgattattttatttagtaaataaaataatagagagcccagaaatcaacctg

SEQ ID NO: 218377 - DNA, 735 bp, Artificial Sequence
  derived and/or modified sequence
atggccgccgccgccagccccgccttcctgctgtgcctgcccctgctgcacctgctgagcggctggagcagagccggctgggtggacacccactgcctgtgctacgacttcatcatcacccccaagagcagacccgagccccagtggtgcgaggtgcagggcctggtggacgagagacccttcctgcactacgactgcgtgaaccacaaggccaaggccttcgccagcctgggcaagaaggtgaacgtgaccaagacctgggaggagcagaccgagaccctgagagacgtggtggacttcctgaagggccagctgctggacatccaggtggagaacctgatccccatcgagcccctgaccctgcaggccagaatgagctgcgagcacgaggcccacggccacggcagaggcagctggcagttcctgttcaacggccagaagttcctgctgttcgacagcaacaacagaaagtggaccgccctgcaccccggcgccaagaagatgaccgagaagtgggagaagaacagagacgtgaccatgttcttccagaagatcagcctgggcgactgcaagatgtggctggaggagttcctgatgtactgggagcagatgctggaccccaccaagccccccagcctggcccccggcaccacccagcccaaggccatggccaccaccctgagcccctggagcctgctgatcatcttcctgtgcttcatcctggccggcagatag

SEQ ID NO: 218378 - protein, 198 aa, Artificial Sequence
  derived and/or modified sequence
MADQRQRSLSTSGESLYHVLGLDKNATSDDIKKSYRKLALKYHPDKNPDNPEAADKFKEINNAHAILTDATKRNIYDKYGSLGLYVAEQFGEENVNTYFVLSSWWAKALFVFCGLLTCCYCCCCLCCCFNCCCGKCKPKAPEGEETEFYVSPEDLEAQLQSDEREATDTPIVIQPASATETTQLTADSHPSYHTDGFN

SEQ ID NO: 218379 - protein, 167 aa, Artificial Sequence
  derived and/or modified sequence
MADQRQRSLSTSGESLYHVLGLDKNATSDDIKKSYRKLALKYHPDKNPDNPEAADKFKEINNAHAILTDATKRNIYDKYGSLGLYVAEQFGEENVNTYFVLSSWWAKALFVFCGLLTCCYCCCCLCCCFNCCCGKCKPKAPEGEETEFYVSPEDLEAQLQSDERGGH

SEQ ID NO: 218380 - DNA, 77 bp, Artificial Sequence
  derived and/or modified sequence
gtcatatttgggatttatcatctgtttctattgttgttgttttagtacacacaaagccacaataaatattctaggct

SEQ ID NO: 218381 - DNA, 597 bp, Artificial Sequence
  derived and/or modified sequence
atggctgatcagagacagagatcactgtcaacatctggcgaaagcctttaccacgtgttgggcctagataaaaacgccactagtgacgatattaagaagtcttatcgaaaactagccctgaaataccaccctgacaaaaatcctgacaacccagaggccgctgacaagtttaaggagatcaataatgcacacgctatattgaccgatgctactaagcgtaacatctacgacaagtacggcagtttgggattatacgtcgctgagcaatttggcgaggagaacgtgaacacctatttcgtgcttagttcatggtgggccaaggctttatttgtgttttgtggcctgttgacatgctgttactgctgctgctgcctctgttgctgttttaactgttgctgcggcaagtgcaagcccaaggctccagaaggagaggagactgagttttatgtgtccccggaagatttggaagctcagctgcagagtgatgaacgagaggcaaccgacacaccgattgtaatccaacccgcgagcgctaccgaaactacacagttgactgcagactcccatccatcctatcacacagacgggttcaactag

SEQ ID NO: 218382 - DNA, 504 bp, Artificial Sequence
  derived and/or modified sequence
atggctgaccagcgccaacggtcactgagcacctccggggaaagcctatatcacgttcttgggttagacaagaatgccacttctgacgatatcaagaaatcttaccgcaagttagcactgaaatatcatcctgataaaaatccggacaaccccgaggctgctgataaattcaaggaaattaacaacgctcatgctattctgacagacgcaacaaagcggaacatatatgataagtatgggtcacttggactatacgtggctgagcagtttggggaggagaatgtcaatacttattttgtcttgtcttcctggtgggcgaaagctctgttcgtgttctgcggactgttgacttgttgctattgttgttgttgcctgtgttgctgtttcaattgttgctgcgggaaatgcaagccaaaagccccagagggggaagagaccgagttttatgtctcacccgaagatttggaggctcagcttcagtcagacgaaaggggcggacactag

SEQ ID NO: 218383 - DNA, 597 bp, Artificial Sequence
  derived and/or modified sequence
atggctgaccagaggcagaggagcctgagcaccagcggggagagcctgtaccacgtgctgggcctggacaagaatgccaccagtgatgacatcaagaagagctacaggaagctggccctgaagtaccacccagacaagaacccagacaaccctgaggccgctgacaagttcaaggagatcaacaatgcccacgccatcctgacagatgccaccaagaggaacatctatgacaagtatggcagcctgggcctgtatgtggccgagcagtttggagaagaaaatgtgaacacctactttgtgctgagctcctggtgggccaaggccctgtttgtgttctgtggcctgctgacctgctgctactgctgctgctgcctgtgctgctgcttcaactgctgctgcggcaagtgcaagcccaaggcccctgagggggaggagacagagttctacgtgtccccagaggacctggaggcccagctgcagagtgatgagcgggaggccacagacacccccatcgtcatccagcctgccagcgccacagagaccacccagctgacagctgacagccaccccagctaccacacagatggcttcaactag

SEQ ID NO: 218384 - DNA, 504 bp, Artificial Sequence
  derived and/or modified sequence
atggctgaccagaggcagaggagcctgagcaccagcggggagagcctgtaccacgtgctgggcctggacaagaatgccaccagtgatgacatcaagaagagctacaggaagctggccctgaagtaccacccagacaagaacccagacaaccctgaggccgctgacaagttcaaggagatcaacaatgcccacgccatcctgacagatgccaccaagaggaacatctatgacaagtatggcagcctgggcctgtatgtggccgagcagtttggagaagaaaatgtgaacacctactttgtgctgagctcctggtgggccaaggccctgtttgtgttctgtggcctgctgacctgctgctactgctgctgctgcctgtgctgctgcttcaactgctgctgcggcaagtgcaagcccaaggcccctgagggggaggagacagagttctacgtgtccccagaggacctggaggcccagctgcagagtgatgagcggggcggccactag

SEQ ID NO: 218385 - DNA, 597 bp, Artificial Sequence
  derived and/or modified sequence
atggccgaccagcggcagcggagcctgagcaccagcggcgagagcctataccatgtgctgggtctggacaagaacgctacctctgatgatattaagaagagctacaggaagctggctctgaaatatcatccggacaaaaaccctgacaaccctgaagccgccgataagtttaaggagatcaacaacgcacacgcaatcttaaccgacgctactaaacggaacatctacgataaatatggctcactgggtctttatgtggccgaacagttcggggaggaaaatgtgaatacctactttgtactgtcgtcttggtgggccaaagcactctttgttttttgtggcctattgacctgctgttattgttgctgctgcctgtgctgctgtttcaactgttgctgtgggaaatgtaaacctaaagcgccagaaggcgaggaaaccgagttctatgtaagcccagaggacctcgaagcgcaactacagagtgatgaacgcgaggcgacagatactccaatagtcatccagcctgcctccgctacagagactacgcagttaactgccgactcccatccctcgtatcataccgacggattcaactag

SEQ ID NO: 218386 - DNA, 504 bp, Artificial Sequence
  derived and/or modified sequence
atggccgaccagcggcagcggagcctgagcaccagcggcgagagcctgtaccatgtcctggggctggataagaatgccactagcgacgacatcaaaaaatcttacagaaagctggcccttaaatatcatcccgataagaatccggataatcctgaggccgctgacaaattcaaagagatcaataacgcgcatgcgatactgacggacgcaacaaagcggaatatttacgataagtatggtagtctgggcctttacgtggcggaacagtttggcgaggagaacgtaaacacctacttcgtgctctcgagttggtgggcaaaggctttgtttgtgttttgcgggctgctcacatgttgctattgttgctgttgtctgtgttgttgctttaactgctgctgtggaaaatgtaaacctaaggcccctgagggcgaggaaactgaattctatgtgtctcccgaagacctcgaggcccagctgcagagcgatgaacgcggcggacactag

SEQ ID NO: 218387 - DNA, 597 bp, Artificial Sequence
  derived and/or modified sequence
atggcagatcagaggcagcgttcactgagtacatcaggggagtcgttgtatcatgtactgggcctcgacaagaacgcaacttctgacgacatcaagaagtcctataggaaactggccctcaagtatcaccctgataaaaacccagacaaccctgaagccgctgacaaatttaaggaaataaataatgcccatgctatcttaacagacgccactaaacgcaatatctatgacaaatacggtagcctggggctttatgtggccgagcagtttggagaagaaaatgtgaatacatatttcgtgctgagcagctggtgggccaaggctctgtttgtattttgcggtctgcttacatgctgttactgctgctgttgcctgtgctgctgttttaactgctgctgcggaaagtgcaaaccaaaggctccggaaggtgaagagactgaattctacgtgagtcctgaagatttggaggctcagctacagtcggatgagagagaggccaccgacactcccatcgtgatacagccagccagtgcgactgagacaactcagctgactgctgattcacatccatcttaccatacagatggctttaattag

SEQ ID NO: 218388 - DNA, 504 bp, Artificial Sequence
  derived and/or modified sequence
atggccgaccaacggcaacggtcgctctctactagcggcgagtcactttaccacgtattagggctggataaaaacgcaacttccgacgacatcaaaaagagttacagaaagctggctctgaagtaccacccagacaagaatcctgacaatcccgaagccgctgataagtttaaggaaatcaataacgcccatgcaatcttaacagacgccaccaaaaggaatatttacgacaaatacgggagccttggcttgtatgtagcagagcagttcggagaagagaacgtgaatacttactttgtgcttagttcatggtgggccaaggccctatttgtgttctgtggactgcttacatgttgctattgttgttgctgtctctgttgttgctttaactgttgctgcgggaaatgcaaacccaaagcacctgaaggcgaggagacagagttttatgtcagcccggaagacctggaggcacagcttcagtctgatgagcgcggaggccattag

SEQ ID NO: 218389 - DNA, 597 bp, Artificial Sequence
  derived and/or modified sequence
atggccgaccagagacagagaagcctgagcaccagcggcgagagcctgtaccacgtgctgggcctggacaagaacgccaccagcgacgacatcaagaagagctacagaaagctggccctgaagtaccaccccgacaagaaccccgacaaccccgaggccgccgacaagttcaaggagatcaacaacgcccacgccatcctgaccgacgccaccaagagaaacatctacgacaagtacggcagcctgggcctgtacgtggccgagcagttcggcgaggagaacgtgaacacctacttcgtgctgagcagctggtgggccaaggccctgttcgtgttctgcggcctgctgacctgctgctactgctgctgctgcctgtgctgctgcttcaactgctgctgcggcaagtgcaagcccaaggcccccgagggcgaggagaccgagttctacgtgagccccgaggacctggaggcccagctgcagagcgacgagagagaggccaccgacacccccatcgtgatccagcccgccagcgccaccgagaccacccagctgaccgccgacagccaccccagctaccacaccgacggcttcaactag

SEQ ID NO: 218390 - DNA, 504 bp, Artificial Sequence
  derived and/or modified sequence
atggccgaccagagacagagaagcctgagcaccagcggcgagagcctgtaccacgtgctgggcctggacaagaacgccaccagcgacgacatcaagaagagctacagaaagctggccctgaagtaccaccccgacaagaaccccgacaaccccgaggccgccgacaagttcaaggagatcaacaacgcccacgccatcctgaccgacgccaccaagagaaacatctacgacaagtacggcagcctgggcctgtacgtggccgagcagttcggcgaggagaacgtgaacacctacttcgtgctgagcagctggtgggccaaggccctgttcgtgttctgcggcctgctgacctgctgctactgctgctgctgcctgtgctgctgcttcaactgctgctgcggcaagtgcaagcccaaggcccccgagggcgaggagaccgagttctacgtgagccccgaggacctggaggcccagctgcagagcgacgagagaggcggccactag

SEQ ID NO: 218391 - DNA, 5213 bp, Artificial Sequence
  derived and/or modified sequence
acccgcgccctctgccgccgccgccgccgccgcccggggtctccaggctgaggagtgcgtcggccgctgcccagcagcgccgcgaatcggggagcggagccgcggagccggcgggagggcgggcgggcgggcggacgggcagaatagcctaacatggcagaccagagacagcgctcactgtctacctctggggagtcattgtaccacgtccttgggttggacaagaacgcaacctcagatgacattaaaaagtcctatcggaagcttgccttgaaatatcaccccgacaagaaccccgacaacccggaggccgcggacaagtttaaggagatcaacaacgcgcacgccatcctcacggacgccacaaaaaggaacatctacgacaagtacggctcgctgggtctctacgtggccgagcagtttggggaagagaacgtgaacacctacttcgtgctgtccagctggtgggccaaggccctgtttgtcttctgcggcctcctcacgtgctgctactgctgctgctgtctgtgctgctgcttcaactgctgctgcgggaagtgtaagcccaaggcgcctgaaggcgaggagacggagttctacgtgtcccccgaggatctggaggcacagctgcagtctgacgagagggaggccacagacacgccgatcgtcatacagccggcatccgccaccgagaccacccagctcacagccgactcccaccccagctaccacactgacgggttcaactaaatccaggaggagctgtggtcagaggaggagccggcgcctggccacgccaaccttagaatcatgaactgtagtcacagagatgggaaggcagcctcctgcctgccctggccttgctggggcccctcctgcctccacgcccacccagcgtcgacccttgacccacgaagtgcgtagcatgcagtatttaaagcagtgtagctacggtcttctgtttttttcccttttttaatagcatgtatggggttctgttccatgtctgtgttgtggacattccgcggcatgaccgcgtgaactgcacggtggagctgcctcagggctgtcggtcaggttggtccagtgaggggtgactgcagccggtcaggtgggcgaggagaaggggggctgcccctttcctacctgtgcttgaggggccggaggcaggtgctgcctggcagagctgtgttaccgtcttggcctcggggtctggtccacactctgtgctcccagccttgaggctgcagtaggactctgatctcacctgccagaagagaggcggggccgcgtcctcctggcgtcaccggcgtcactgtcattccttggtgtctgtgctgggcatggttggcttgggggtctgtggtttcctgggccttgtggcagggtttctcccgtgggagaatttggtgtggaaagcataggaggccccttccgaggttgacaccgtgtcctccgcggtgtttctcgcctggtcgtctcgtcgtgtggacgctgccgttctggttctcggaggtgtgtccttcgccgtgttggggttatttgtctgtgttcctgcacttttcccgggctctgagctggattgatggggccagtctcccccctcccatcttgaggtcgttctccacattccttccagcacacctgtcctttccatagccctttttggacctttagaaccacagatgataggaccagcccaatgagccacagtcagagagtagattgtgcatgtgtgagcacccagctactggggacgggggctctcccacgacccctcctcctgtgtttgccagagctcccatctgccccactcgcctttgccccgtcatcgatgattcaggcagagccagattcgttaggtccctggaggaaggactgactggaccagagggaccctctggctcaggagggttgggtccctgggaggccggcagccaggccacagaatccacacgtggaccattgtgggtccctgggaggccggcagccaggccacggaatccacacgtggaccattgtgggtcccttgggaggccagcagccagactacggaatccacatgtggaccatgggaagtcagtctcttgcgtgtcctagaccttgtgggtggcgccctgcataggggagcagggggaacgggtctgatgtccctgtgctggctgagggctcagagctgcccgcactccgtagctcatgggatgtgctgggcctgcctttggcgccatgctgcagactccagtgggcctggtttctgcagaatgtccatggtggccgctgcagagttgcagaggtccctgtagagataaagctgaggaggaggctgtgtgtgatggctctggctcggaccaaccagatgagcctcctgaagcccccttccctgcctgcctgctgacccgtggccccagctcactcattgccctcagcagccacccgaggctgtgcagaagggtaggttcaggttgaccaggaagctgccaaaagggacatggatatgaggatacatctggacgtgcttaggaacagggtgctggttgagggcccccagctgacccctactgcagatccgcatgtggaccatgagccggctgccagcactaggtcctgggcagctttgtttgtcccacttttctttgtttcttctcactaaaatgatcacgaagacctttgacaagaggagagatatgcactgtgatattaaattagaaataatttatcaaaatcagacctctcctaaaagaataagaaattcattgtttggcccatcctgaaaggtgaggtggcgagacagtggggtgcctccgtgccgcttcgtgcagcagcaagttcagcctgagatgctggctgtactcagcctttgcaatttttgtagatgtagcttaggacgtgagttatttttccgcagactggccaagagccaggttctaagcttggacctaaggtagaaagctgcccatcgggggccctagctcagccccaccaggccctctgttgggcctgcacacagctctgtggctagaacactccaaggcccttcggtacccatcagagtgggccccttgccaggtggcttttcagttacagagtccagtggaccattttgtagaaccatgcagctccctgcggaaggtggggtagggtgggaaagaggagcaggtctggaggtttgtggaacccagtcccctgcagaatctgtaaaacctaataaatcatggttgtggccattctcacggtggtgattgtgattagacgacccccgggaagcccagacactcggggcctggagttcctccccctgcctgacctagaagcagaaccgttttcagcgctctgccctgttggctttaaggctttgtcttaatttaaggaaaaagatcctcccgggttttatttctctctttcttgagtggactgtttccctataattaaaagaggtggtgagtcctggggcagcttccgcgcctccctgtccacgtgctaacagatcaggacgcccccagcacccctgcctgcttttgctggtggcagtgacgggaccccgactcctcactctcgggccgcagacaatgctgtgagcaagtgtggccatgggcacagaatgtccctttggacgccgctgctgggggctgccaggggccctctggggtcgtgctttgaggcccgtccggttcacgagggggtccgggcagcactgactgcttccgacctgcaggaggcgtaggagcggccctgcgggccctttcacggcagctgctgctgtatagatttgtctccactcagtgacgtgggatttttttgtcttccttttggctttatttttaaactgctttagatattactgctcagtgtttgtgaactttcctagttctctatgttgttagtgcagccagcacccagtggggacctactagaaaaaggaactggcatgcacacgtgcccagcaggaaaagcttcgtcttcacgtcggctgctgccatccagaagaggccctggagcctcacgccgtcgaggctgctctcaggcgttctgttccgggcgaggcttgtgctgcaaggaagggcaccagcatgcaggctgccactggagggtccgggtgctgcgggcagagttcagcgcttgtccaccctcccttagctctgactcagtgcatcctactgtggggacatctcgtgaggggacacgaaatgactgatctcaccctttcccagtattcagagctgtgaacccctgtggcgcaggactggcctgtgtctgttattttggttgtaaatcattctcctgtggaattggcaaaagctacatttttactgtccttaccagcaacagtttgcgtcgtcacatgctgtgagtgtgggctgtggtgtgtccgtgtgtgtacatatgtgtatatgtatatatcacgcagcaggagtgtcattcatgctgctgtcccctggtgaagtgacaagtacaattaaaggtggctctgaaatggcctctggtttcttgggagtcgggcagggacctgcaggaggctttcccagcaggtgcacagaaggaagcgctgagcccactgtgtgcagagggtgtgtgcccagggcactgccacggcccccaccagcattggcctctgctctgcagggtggggtgcccatcctgggggctgtgtgtcatgctcacctgacccaggtgtgtgtcccggtgtgaaatcgaggaggggactggaagcccttccctgccttgaaacatgaaagctgattttctgagcagcagatacggtcagtggcaaagctgcatctgaagggcggcctgggaaggggccctgtgctggccccgggtccgccccagaggagtccacacagcaccacctccagaaggggctgggcccggggtcctgcaggcggcaccttttggtagagtttgtttccctggaaaatggggaaaatgtttcaagccaggtgaggggggaagttaacactgaaatatgtattgtttttaaaaatcaaatgcacacgcatggaagctgcttgtccatgcactggttttgtcactggcgtcctggaatccgaccgtgttggggtgcaggcgctgtcagactccggctgatcctggctcgagcacacacatctaagggccaggctggttccgcatggtgatctccgtcttgtatgtctgaatgttggcctaaaataaagattactgttgtaaaataaatgttttcactgcggacccca

SEQ ID NO: 218392 - DNA, 674 bp, Artificial Sequence
  derived and/or modified sequence
gccgctgccggtgccgcacccgcgccctctgccgccgccgccgccgccgcccggggtctccaggctgaggagtgcgtcggccgctgcccagcagcgccgcgaatcggggagcggagccgcggagccggcgggagggcgggcgggcgggcggacgggcagaatagcctaacatggcagaccagagacagcgctcactgtctacctctggggagtcattgtaccacgtccttgggttggacaagaacgcaacctcagatgacattaaaaagtcctatcggaagcttgccttgaaatatcaccccgacaagaaccccgacaacccggaggccgcggacaagtttaaggagatcaacaacgcgcacgccatcctcacggacgccacaaaaaggaacatctacgacaagtacggctcgctgggtctctacgtggccgagcagtttggggaagagaacgtgaacacctacttcgtgctgtccagctggtgggccaaggccctgtttgtcttctgcggcctcctcacgtgctgctactgctgctgctgtctgtgctgctgcttcaactgctgctgcgggaagtgtaagcccaaggcgcctgaaggcgaggagacggagttctacgtgtcccccgaggatctggaggcacagctgcagtctgacgagaggggagggcactga

SEQ ID NO: 218393 - protein, 813 aa, Artificial Sequence
  derived and/or modified sequence
MGWRPRRARGTPLLLLLLLLLLWPVPGAGVLQGHIPGQPVTPHWVLDGQPWRTVSLEEPVSKPDMGLVALEAEGQELLLELEKNHRLLAPGYIETHYGPDGQPVVLAPNHTDHCHYQGRVRGFPDSWVVLCTCSGMSGLITLSRNASYYLRPWPPRGSKDFSTHEIFRMEQLLTWKGTCGHRDPGNKAGMTSLPGGPQSRGRREARRTRKYLELYIVADHTLFLTRHRNLNHTKQRLLEVANYVDQLLRTLDIQVALTGLEVWTERDRSRVTQDANATLWAFLQWRRGLWAQRPHDSAQLLTGRAFQGATVGLAPVEGMCRAESSGGVSTDHSELPIGAAATMAHEIGHSLGLSHDPDGCCVEAAAESGGCVMAAATGHPFPRVFSACSRRQLRAFFRKGGGACLSNAPDPGLPVPPALCGNGFVEAGEECDCGPGQECRDLCCFAHNCSLRPGAQCAHGDCCVRCLLKPAGALCRQAMGDCDLPEFCTGTSSHCPPDVYLLDGSPCARGSGYCWDGACPTLEQQCQQLWGPGSHPAPEACFQVVNSAGDAHGNCGQDSEGHFLPCAGRDALCGKLQCQGGKPSLLAPHMVPVDSTVHLDGQEVTCRGALALPSAQLDLLGLGLVEPGTQCGPRMVCQSRRCRKNAFQELQRCLTACHSHGVCNSNHNCHCAPGWAPPFCDKPGFGGSMDSGPVQAENHDTFLLAMLLSVLLPLLPGAGLAWCCYRLPGAHLQRCSWGCRRDPACSGPKDGPHRDHPLGGVHPMELGPTATGQPWPLDPENSHEPSSHPEKPLPAVSPDPQADQVQMPRSCLW

SEQ ID NO: 218394 - DNA, 2442 bp, Artificial Sequence
  derived and/or modified sequence
atgggatggaggcccaggcgcgccaggggtactccccttttactgttgctcctgctgctacttttgtggcccgttcctggagcaggggtcctgcaagggcatattcctggacagccagtaacaccccattgggtgctagatggccagccttggcgcacagtgtccctggaggagcccgtttcgaaaccagatatgggactggtggcgttagaggcggagggccaggagctgcttctggagttggaaaaaaatcacaggctgcttgctcctggttacatcgagacccattacggaccggacggccagcccgtggtccttgcacccaaccacaccgatcactgtcactaccagggacgcgtgcgcgggttccctgactcatgggtcgtcctgtgtacttgctcgggcatgtcagggctgatcacgttgagtagaaacgcctcatattacttgaggccatggcccccccggggtagtaaagacttcagtacgcacgaaatctttagaatggagcaactgctcacatggaaagggacctgcggccacagagaccccggtaacaaagccggcatgaccagtctgcccggcggccctcaatctagaggcaggcgggaagctcgtcgcacccgtaagtatttggaattgtacatcgtggccgaccatactctatttctcactcggcaccggaacctgaaccataccaagcagcgactgctggaggttgcaaactacgtcgaccagctgcttcgaaccttagacatacaggtggcgctgactgggttggaggtttggacagagagggaccggtctagagttacccaagacgccaatgcaaccctgtgggcctttctccagtggcgacgggggttatgggcccagagaccacacgactccgctcagctgctcacaggccgtgcctttcagggagcaacggtcggcctggcgcctgtcgaggggatgtgcagggccgagtcttccgggggggtgagcacagatcacagtgaacttccaattggagcagctgcaacaatggctcatgaaataggacattccctcggcctgtcccatgacccggatggatgctgcgtggaggcagccgcagagtccggtggatgcgttatggccgcagccactggccaccccttcccaagggtttttagtgcttgttctcgccggcagcttagggccttctttcgtaaaggtggcggggcatgcctctcaaatgcgccggaccccggactccctgtgcctcctgcattgtgcggaaacggctttgtggaagcgggagaagaatgtgactgcggcccgggtcaggaatgcagggatctgtgctgcttcgcccacaactgctcactgagacccggtgcccagtgcgcccacggggattgctgtgtgcgctgcctgttgaagcctgctggcgccttgtgccgccaggccatgggcgactgcgacctcccagaattctgcactgggacttctagccactgcccccctgacgtctatttgctggatggatccccatgcgctagaggctccggatattgctgggatggtgcctgtcctacccttgaacaacagtgtcagcagctgtggggacccggctctcaccccgcccccgaagcatgcttccaggtggtcaattcagctggagatgcccatggtaattgcggacaggacagtgaaggacacttcctcccttgcgctggccgcgatgcgttgtgcggcaaacttcagtgtcagggcgggaagccctcgcttctggctcctcacatggtacccgttgatagtactgtgcacttagatggccaagaggtgacctgtaggggcgccttggcactgccgagcgctcagttggacctactgggcctcggactagttgagccggggacccagtgcggccccaggatggtctgtcagtctcgtcgctgtcgtaaaaacgcatttcaggagctgcaacggtgccttaccgcttgccactcccacggagtatgcaattccaaccacaactgccactgtgcccctggctgggcgccacctttctgtgataaaccgggcttcggcggatcaatggactctggccccgtgcaagctgagaaccatgacactttcttgcttgcaatgctcttgtctgtactgctacccctgcttccaggtgcaggcctggcctggtgctgttataggctgcctggcgcccacctccagagatgtagttggggctgcaggcgcgaccctgcttgtagtgggcctaaggatggtccccaccgcgaccatccactgggcggggttcatcctatggagttgggcccgactgccactgggcagccatggcctctggacccagaaaacagtcatgaacccagcagccacccagagaaacccctccccgcagtgtccccagatccccaagccgatcaggtgcaaatgccacgtagctgtctctggtag

SEQ ID NO: 218395 - DNA, 2442 bp, Artificial Sequence
  derived and/or modified sequence
atgggctggaggccccggcgggcccggggcacccccctgctgctgctgctgctgctgctgctgctgtggcctgtgcctggggccggcgtgctgcagggccacatccctggccagcctgtgaccccccactgggtgctggatggccagccctggaggacagtgtccctggaggagcctgtgtccaagccagacatgggcctggtggccctggaggccgagggccaggagctgctgctggagctggagaagaaccaccggctgctggcccctggctacatcgagacccactacggcccagatggccagcctgtggtgctggcccccaaccacacagaccactgccactaccagggccgggtgcggggcttcccagacagctgggtggtgctgtgcacctgcagcggcatgagcggcctcatcaccctgagcagaaatgccagctactacctgcggccctggccaccccggggcagcaaggacttcagcacccatgagatcttcaggatggagcagctgctgacctggaagggcacctgtggccaccgggaccccggcaacaaggccggcatgaccagcctgcccggcggcccccagagccggggccggcgggaggcccggaggaccaggaagtacctggagctgtacatcgtggccgaccacaccctcttcctgaccaggcacaggaacctgaaccacaccaagcagaggctgctggaggtggccaactacgtggaccagctgctgcggaccctggacatccaggtggccctgaccggcctggaggtgtggacagagcgggacaggagccgggtgacccaggatgccaatgccaccctgtgggccttcctgcagtggaggcggggcctgtgggcccagaggcctcatgattctgcccagctgctgaccggccgggccttccagggcgccaccgtgggcctggcccctgtggagggcatgtgcagagctgagagcagtggaggagtgtccacagaccacagcgagctgcccatcggggccgccgccaccatggcccatgaaattggccacagcctgggcctgagccatgaccctgatggctgctgcgtggaggccgctgctgagagcggcggctgtgtgatggctgctgccaccggccaccccttccccagggtcttcagcgcctgcagccggcggcagctgcgggccttcttcagaaaaggaggaggagcctgcctgagcaatgccccagaccccggcctgcctgtgcccccagccctgtgtggaaatggatttgtggaggccggggaggagtgtgactgtggccctggccaggagtgccgggacctgtgctgctttgcccacaactgcagcctgcggcctggggcccagtgtgcccatggagactgctgcgtgcgctgcctgctgaagccagctggggccctgtgccggcaggccatgggagactgtgacctgcctgagttctgcaccggcaccagcagccactgccccccagatgtgtacctgctggatggcagcccctgtgcccggggcagcggctactgctgggatggagcctgccccaccctggagcagcagtgccagcagctgtggggccctggcagccacccagcccctgaggcctgcttccaggtggtgaacagcgctggagatgcccacggcaactgtggccaggacagcgagggccacttcctgccctgtgccggcagagatgccctgtgtgggaagctgcagtgccagggcggcaagcccagcctgctggccccccacatggtgcctgtggacagcacagtgcacctggatggccaggaggtgacctgccgcggggccctggccctgcccagcgcccagctggacctgctgggcctgggcctggtggagcccggcacccagtgtggccccaggatggtgtgccagagccgccgctgcaggaagaatgccttccaggagctgcagcgctgcctgacagcctgccacagccacggcgtgtgcaacagcaaccacaactgccactgtgcccctggctgggccccacccttctgtgacaagccaggctttggaggctccatggattctggccctgtgcaggctgaaaatcatgacaccttcctgctggccatgctgctgtctgtgctgctgcccctgctgcccggggccggcctggcctggtgctgctaccgcctgcccggggcccacctgcagcgctgctcctggggctgccggcgggaccctgcctgcagcggccccaaggatggcccccaccgggaccaccccctgggcggcgtgcaccccatggagctgggccccacagccaccggccagccctggcccctggaccctgagaacagccatgagcccagcagccaccctgagaagcccctgcctgctgtgtccccagacccccaggccgaccaggtgcagatgcccaggagctgcctgtggtag

SEQ ID NO: 218396 - DNA, 2442 bp, Artificial Sequence
  derived and/or modified sequence
atgggctggcggccccggcgggcccggggcacccccctgctgctgctgctgttgttgcttctgctttggccagtgccaggcgccggtgtgctccagggacatattcccggtcagccagtgacccctcattgggtgcttgatggccagccatggaggaccgtgtcgctggaagaacccgtgtcgaagcctgacatggggcttgtggctcttgaggccgagggacaggaacttctgctggaactggagaaaaaccatcgtcttctcgcacccggatacatagagacccactatggacccgatggacagcctgtggtgctcgcgcccaaccatacagaccattgtcattaccaaggccgcgtgagaggttttcccgattcctgggtggtgctctgtacatgtagcgggatgtctggtctgattactctgagccgtaacgcctcttactacctgcgcccttggcctccaaggggcagcaaggacttttcaacgcacgagatctttcgcatggaacaactgctgacttggaaagggacctgtggccacagggaccccgggaacaaagccgggatgacatcactaccaggaggtcctcaaagtaggggccgccgcgaagcccggcgcacacgtaagtatttagagctctacatcgtggccgatcacaccttatttttgacacgacatcgtaacctaaaccacacaaagcagagactgctcgaagtggccaactatgttgaccagctgctccgaactttggatatacaggtggctttgactggcctggaggtgtggacagagagggatcgaagccgggtgactcaggacgctaatgctaccctctgggcgtttttacagtggaggcggggcctgtgggctcagcggccacacgattctgcacagcttctgactggtagggcctttcagggcgccactgttgggttggcaccagtggagggcatgtgccgggctgagtcaagtgggggcgtgagcacagaccattccgaactgcccatcggggctgctgccacaatggcccacgagatcggccactccttagggctgtcccacgaccccgacggctgttgtgtggaggccgccgccgagtccggaggctgcgttatggcagcggccaccggccatcctttcccgcgggtgtttagcgcctgcagcagacgacagttacgagccttcttccgtaaaggcggcggagcctgtctgtccaatgcccccgaccccggcctgcccgtgcctccagcactgtgtgggaacggatttgttgaggccggggaagaatgtgactgtggtcctggacaggaatgcagagatctatgctgctttgctcacaactgctccctgagaccaggagcacaatgcgcccacggagactgttgcgtaaggtgtcttctgaagcctgcaggggccctgtgccgtcaggccatgggagattgtgatctaccggagttttgcaccgggacgtcctcccactgcccaccagatgtgtatctgctggacggttccccatgtgcacgcggaagtggttactgttgggacggcgcctgcccgacccttgaacagcagtgccagcagctctggggaccaggaagccaccctgcgccagaagcctgcttccaggtagtaaatagcgcgggagacgcacacggcaattgtgggcaggactccgagggacacttcctgccctgcgcaggcagggatgccctatgcggaaagttgcaatgtcaaggtgggaaaccttcactgttggcccctcatatggtcccggttgattctactgtgcacctcgacggacaggaggtgacctgccgaggtgctctggctctaccctccgcgcaactggatctgttaggacttggattggttgaacccgggacacaatgtggcccacggatggtgtgccaatccaggaggtgtcggaagaatgcattccaggaacttcagcggtgtcttacagcttgtcattctcacggagtgtgtaattccaatcacaactgccactgtgccccaggatgggctcccccattttgcgataagcccgggttcggtggaagtatggacagtggtccagtccaggctgagaaccatgataccttcttactggccatgctcttatccgtgctgctgcctttgctccctggagcaggattggcatggtgctgttatcggctgcccggagcccacctccagagatgctcttggggttgccgccgtgaccctgcctgttccggacctaaggatggacctcatcgggaccaccctttaggaggggttcatcctatggagctaggccctactgccacgggtcagccatggcccttagacccagaaaacagtcacgaaccctctagccatccagagaaacctctgcccgccgtctcaccagatccccaggctgaccaggtacagatgccacgcagctgtctatggtag

SEQ ID NO: 218397 - DNA, 2442 bp, Artificial Sequence
  derived and/or modified sequence
atgggctggagaccgcgaagggcaaggggaacaccactcctgcttctcctcctactcctgctcctgtggcctgttccaggcgcaggagtgctccaggggcacatccccggacagcctgtgactccacactgggtgttggatgggcaaccatggcgcactgtctctctcgaggagcccgtgtccaaacctgatatgggtttggttgccctggaggcagagggtcaggagctcctgttagagctggagaaaaaccacagactcctcgcacctggatacatagagactcattacgggccagacggtcagcctgtagtcttagcccctaaccatacagaccactgtcactaccaaggcagagttcgcggattccctgattcatgggtggtgctgtgcacatgttctgggatgtcgggcctgataacactgtccagaaacgcgtcctattatctgagaccttggccacccagagggagtaaagacttcagcacccatgaaattttccgcatggagcagctgctcacatggaaggggacatgcggccatcgagatccagggaacaaagccggtatgacgagcctgcccggtgggccacagagccgcggacgacgggaagcccgtcgcactcggaagtatctggaactgtacatcgtggccgatcatacattattcctgacaaggcaccggaatctgaaccataccaagcagcgcctgctggaggttgcaaactatgtggatcagctgctgaggactctggatattcaggttgctttaacaggactcgaagtgtggactgagagagatcgcagccgtgtgactcaggacgccaatgctaccctctgggccttcttgcagtggaggaggggcttatgggcccaaagaccgcacgattccgcccagttgctaaccgggagggccttccaaggcgcaacggtggggctcgcacctgttgagggcatgtgtcgagccgaaagtagcggaggcgtctccacagaccactccgagttgcctattggcgctgcagccacaatggctcacgaaattggccacagcctgggtctgagtcacgaccccgacggatgttgcgtggaagctgctgcagagtccggcggatgcgtgatggccgcagccactggccacccctttccacgcgtattttcagcctgcagccgacgccagctccgcgctttcttccgaaaggggggaggcgcttgtcttagcaacgcaccagaccccggactccccgtgcccccagcactgtgtggtaacggttttgtggaggcaggcgaggaatgtgattgtggccctggccaggaatgtagggacctctgctgctttgcgcataattgttcactccgcccaggagcccagtgtgcccacggggactgttgcgtgaggtgtcttctaaaacccgctggggctctgtgccggcaggcaatgggagattgtgaccttcctgagttctgtacaggtacctcttctcattgccccccagacgtatatctgcttgacggttccccatgcgctcgaggcagcgggtattgctgggatggcgcttgtccgaccctggagcaacagtgccagcagctgtgggggcctggaagccaccctgctccagaggcatgctttcaggtcgttaactccgcaggagatgctcacggtaactgtgggcaagattcggagggccatttcctgccttgcgcagggagggacgctctctgtggcaagctacagtgccagggaggcaaaccaagcctgcttgcgccacacatggtgcctgtcgactccacagtgcacctagatggtcaggaggtgacttgcagaggtgcgctggctttgcctagcgcacagctggacctgctgggactgggtcttgtcgagccgggtacacagtgtggaccgaggatggtgtgccagagtcggaggtgtagaaaaaacgcattccaggagctccagaggtgtctgaccgcctgtcattctcatggcgtgtgtaattctaatcacaactgccattgtgctccaggctgggcgcctccattctgtgataagcccggtttcggtggcagcatggactcaggacccgtccaagcagaaaatcatgatacattcttattggccatgttactgtccgtgttattgcccttgctgccaggagctgggctcgcctggtgttgctacagattgccaggagcacatctacagaggtgttcttgggggtgtagacgggaccccgcttgcagcgggcctaaggacgggcctcatagggatcatcctttgggtggagtgcatccgatggaattggggcctaccgctaccggacagccttggcccctcgacccagaaaactcccacgaacccagcagccatcccgaaaagccactacctgctgtgagccctgacccgcaagccgaccaggttcagatgccacgaagctgtctgtggtag

SEQ ID NO: 218398 - DNA, 2442 bp, Artificial Sequence
  derived and/or modified sequence
atgggctggagacccagaagagccagaggcacccccctgctgctgctgctgctgctgctgctgctgtggcccgtgcccggcgccggcgtgctgcagggccacatccccggccagcccgtgaccccccactgggtgctggacggccagccctggagaaccgtgagcctggaggagcccgtgagcaagcccgacatgggcctggtggccctggaggccgagggccaggagctgctgctggagctggagaagaaccacagactgctggcccccggctacatcgagacccactacggccccgacggccagcccgtggtgctggcccccaaccacaccgaccactgccactaccagggcagagtgagaggcttccccgacagctgggtggtgctgtgcacctgcagcggcatgagcggcctgatcaccctgagcagaaacgccagctactacctgagaccctggccccccagaggcagcaaggacttcagcacccacgagatcttcagaatggagcagctgctgacctggaagggcacctgcggccacagagaccccggcaacaaggccggcatgaccagcctgcccggcggcccccagagcagaggcagaagagaggccagaagaaccagaaagtacctggagctgtacatcgtggccgaccacaccctgttcctgaccagacacagaaacctgaaccacaccaagcagagactgctggaggtggccaactacgtggaccagctgctgagaaccctggacatccaggtggccctgaccggcctggaggtgtggaccgagagagacagaagcagagtgacccaggacgccaacgccaccctgtgggccttcctgcagtggagaagaggcctgtgggcccagagaccccacgacagcgcccagctgctgaccggcagagccttccagggcgccaccgtgggcctggcccccgtggagggcatgtgcagagccgagagcagcggcggcgtgagcaccgaccacagcgagctgcccatcggcgccgccgccaccatggcccacgagatcggccacagcctgggcctgagccacgaccccgacggctgctgcgtggaggccgccgccgagagcggcggctgcgtgatggccgccgccaccggccaccccttccccagagtgttcagcgcctgcagcagaagacagctgagagccttcttcagaaagggcggcggcgcctgcctgagcaacgcccccgaccccggcctgcccgtgccccccgccctgtgcggcaacggcttcgtggaggccggcgaggagtgcgactgcggccccggccaggagtgcagagacctgtgctgcttcgcccacaactgcagcctgagacccggcgcccagtgcgcccacggcgactgctgcgtgagatgcctgctgaagcccgccggcgccctgtgcagacaggccatgggcgactgcgacctgcccgagttctgcaccggcaccagcagccactgcccccccgacgtgtacctgctggacggcagcccctgcgccagaggcagcggctactgctgggacggcgcctgccccaccctggagcagcagtgccagcagctgtggggccccggcagccaccccgcccccgaggcctgcttccaggtggtgaacagcgccggcgacgcccacggcaactgcggccaggacagcgagggccacttcctgccctgcgccggcagagacgccctgtgcggcaagctgcagtgccagggcggcaagcccagcctgctggccccccacatggtgcccgtggacagcaccgtgcacctggacggccaggaggtgacctgcagaggcgccctggccctgcccagcgcccagctggacctgctgggcctgggcctggtggagcccggcacccagtgcggccccagaatggtgtgccagagcagaagatgcagaaagaacgccttccaggagctgcagagatgcctgaccgcctgccacagccacggcgtgtgcaacagcaaccacaactgccactgcgcccccggctgggccccccccttctgcgacaagcccggcttcggcggcagcatggacagcggccccgtgcaggccgagaaccacgacaccttcctgctggccatgctgctgagcgtgctgctgcccctgctgcccggcgccggcctggcctggtgctgctacagactgcccggcgcccacctgcagagatgcagctggggctgcagaagagaccccgcctgcagcggccccaaggacggcccccacagagaccaccccctgggcggcgtgcaccccatggagctgggccccaccgccaccggccagccctggcccctggaccccgagaacagccacgagcccagcagccaccccgagaagcccctgcccgccgtgagccccgacccccaggccgaccaggtgcagatgcccagaagctgcctgtggtag

SEQ ID NO: 218399 - DNA, 3677 bp, Artificial Sequence
  derived and/or modified sequence
gggcggcggtccgggagtggcgacccggctcccccatggcgcgcgccgtcggggcccctggccaggctccgagcggggttggcggggaggggaggcgggagcgagggcgggcggtgggaggtgggggcgggaaggtccgaaggcggcggcctgaggctgcaccgggcacgggtcggccgcaatccagcctgggcggagccggagttgcgagccgctgcctagaggccgaggagctcacagctatgggctggaggccccggagagctcgggggaccccgttgctgctgctgctactactgctgctgctctggccagtgccaggcgccggggtgcttcaaggacatatccctgggcagccagtcaccccgcactgggtcctggatggacaaccctggcgcaccgtcagcctggaggagccggtctcgaagccagacatggggctggtggccctggaggctgaaggccaggagctcctgcttgagctggagaagaaccacaggctgctggccccaggatacatagaaacccactacggcccagatgggcagccagtggtgctggcccccaaccacacggatcattgccactaccaagggcgagtaaggggcttccccgactcctgggtagtcctctgcacctgctctgggatgagtggcctgatcaccctcagcaggaatgccagctattatctgcgtccctggccaccccggggctccaaggacttctcaacccacgagatctttcggatggagcagctgctcacctggaaaggaacctgtggccacagggatcctgggaacaaagcgggcatgaccagccttcctggtggtccccagagcaggggcaggcgagaagcgcgcaggacccggaagtacctggaactgtacattgtggcagaccacaccctgttcttgactcggcaccgaaacttgaaccacaccaaacagcgtctcctggaagtcgccaactacgtggaccagcttctcaggactctggacattcaggtggcgctgaccggcctggaggtgtggaccgagcgggaccgcagccgcgtcacgcaggacgccaacgccacgctctgggccttcctgcagtggcgccgggggctgtgggcgcagcggccccacgactccgcgcagctgctcacgggccgcgccttccagggcgccacagtgggcctggcgcccgtcgagggcatgtgccgcgccgagagctcgggaggcgtgagcacggaccactcggagctccccatcggcgccgcagccaccatggcccatgagatcggccacagcctcggcctcagccacgaccccgacggctgctgcgtggaggctgcggccgagtccggaggctgcgtcatggctgcggccaccgggcacccgtttccgcgcgtgttcagcgcctgcagccgccgccagctgcgcgccttcttccgcaaggggggcggcgcttgcctctccaatgccccggaccccggactcccggtgccgccggcgctctgcgggaacggcttcgtggaagcgggcgaggagtgtgactgcggccctggccaggagtgccgcgacctctgctgctttgctcacaactgctcgctgcgcccgggggcccagtgcgcccacggggactgctgcgtgcgctgcctgctgaagccggctggagcgctgtgccgccaggccatgggtgactgtgacctccctgagttttgcacgggcacctcctcccactgtcccccagacgtttacctactggacggctcaccctgtgccaggggcagtggctactgctgggatggcgcatgtcccacgctggagcagcagtgccagcagctctgggggcctggctcccacccagctcccgaggcctgtttccaggtggtgaactctgcgggagatgctcatggaaactgcggccaggacagcgagggccacttcctgccctgtgcagggagggatgccctgtgtgggaagctgcagtgccagggtggaaagcccagcctgctcgcaccgcacatggtgccagtggactctaccgttcacctagatggccaggaagtgacttgtcggggagccttggcactccccagtgcccagctggacctgcttggcctgggcctggtagagccaggcacccagtgtggacctagaatggtgtgccagagcaggcgctgcaggaagaatgccttccaggagcttcagcgctgcctgactgcctgccacagccacggggtttgcaatagcaaccataactgccactgtgctccaggctgggctccacccttctgtgacaagccaggctttggtggcagcatggacagtggccctgtgcaggctgaaaaccatgacaccttcctgctggccatgctcctcagcgtcctgctgcctctgctcccaggggccggcctggcctggtgttgctaccgactcccaggagcccatctgcagcgatgcagctggggctgcagaagggaccctgcgtgcagtggccccaaagatggcccacacagggaccaccccctgggcggcgttcaccccatggagttgggccccacagccactggacagccctggcccctggaccctgagaactctcatgagcccagcagccaccctgagaagcctctgccagcagtctcgcctgacccccaagcagatcaagtccagatgccaagatcctgcctctggtgagaggtagctcctaaaatgaacagatttaaagacaggtggccactgacagccactccaggaacttgaactgcaggggcagagccagtgaatcaccggacctccagcacctgcaggcagcttggaagtttcttccccgagtggagcttcgacccacccactccaggaacccagagccacattagaagttcctgagggctggagaacactgctgggcacactctccagctcaataaaccatcagtcccagaagcaaaggtcacacagcccctgacctccctcaccagtggaggctgggtagtgctggccatcccaaaagggctctgtcctgggagtctggtgtgtctcctacatgcaatttccacggacccagctctgtggagggcatgactgctggccagaagctagtggtcctggggccctatggttcgactgagtccacactcccctggagcctggctggcctctgcaaacaaacataattttggggaccttccttcctgtttcttcccaccctgtcttctcccctaggtggttcctgagcccccacccccaatcccagtgctacacctgaggttctggagctcagaatctgacagcctctcccccattctgtgtgtgtcggggggacagagggaaccatttaagaaaagataccaaagtagaagtcaaaagaaagacatgttggctataggcgtggtggctcatgcctataatcccagcactttgggaagccggggtaggaggatcaccagaggccagcaggtccacaccagcctgggcaacacagcaagacaccgcatctacagaaaaattttaaaattagctgggcgtggtggtgtgtacctgtaggcctagctgctcaggaggctgaagcaggaggatcacttgagcctgagttcaacactgcagtgagctatggtggcaccactgcactccagcctgggtgacagagcaagaccctgtctctaaaataaattttaaaaagacatatta

SEQ ID NO: 218400 - protein, 188 aa, Artificial Sequence
  derived and/or modified sequence
MATVRHRPEALELLEAQSKFTKKELQILYRGFKNECPSGVVNEETFKEIYSQFFPQGDSTTYAHFLFNAFDTDHNGAVSFEDFIKGLSILLRGTVQEKLNWAFNLYDINKDGYITKEEMLDIMKAIYDMMGKCTYPVLKEDAPRQHVETFFQKMDKNKDGVVTIDEFIESCQKDENIMRSMQLFENVI

SEQ ID NO: 218401 - protein, 250 aa, Artificial Sequence
  derived and/or modified sequence
MNVRRVESISAQLEEASSTGGFLYAQNSTKRSIKERLMKLLPCSAAKTSSPAIQNSVEDELEMATVRHRPEALELLEAQSKFTKKELQILYRGFKNECPSGVVNEETFKEIYSQFFPQGDSTTYAHFLFNAFDTDHNGAVSFEDFIKGLSILLRGTVQEKLNWAFNLYDINKDGYITKEEMLDIMKAIYDMMGKCTYPVLKEDAPRQHVETFFQKMDKNKDGVVTIDEFIESCQKDENIMRSMQLFENVI

SEQ ID NO: 218402 - DNA, 2361 bp, Artificial Sequence
  derived and/or modified sequence
gctcccagcgccacggacgcccccgggccgagcggcggtgcgctcccgtgcagacccgtggacagacgcccctggccggtggactctcgagtctcgcttctgcaccctgcgtccctagacatgaatgtgaggagggtggaaagcatttcggctcagctggaggaggccagctctacaggcggtttcctgtacgctcagaacagcaccaagcgcagcattaaagagcggctcatgaagctcttgccctgctcagctgccaaaacgtcgtctcctgctattcaaaacagcgtggaagatgaactggagatggccaccgtcaggcatcggcctgaagcccttgagcttctggaagcccagagcaaatttaccaagaaagagcttcagatcctttacagaggatttaagaatgaatgccccagtggtgttgttaatgaagaaaccttcaaagagatttactcgcagttctttccacagggagactctacaacatatgcacattttctgttcaatgcatttgatacagaccacaatggagctgtgagtttcgaggatttcatcaaaggtctttccattttgctccgggggacagtacaagaaaaactcaattgggcatttaatctgtatgacataaataaagatggctacatcactaaagaggaaatgcttgatataatgaaagcaatatacgatatgatgggtaaatgtacatatcctgtcctcaaagaagatgctcccagacaacacgttgaaacattttttcagaaaatggacaaaaataaagatggggttgttaccatagatgagttcattgaaagctgccaaaaagatgaaaacataatgcgctccatgcagctctttgaaaatgtgatttaacttgtcaaatagatcctgaatccaacagacaaatgtgaactattctaccacccttaaagttggagctaccacttttagcatagattgctcagcttgacactgaagcatattatgcaaacaagctttgttttaatataaagcaatccccaaaagatttgagctttcagttataaatttgcatccttttcataatgccactgagttcaggggatggtctaactcatttcatactctgtgaatattcaaaagtaatagaatctggcatatagttttattggttccttagccatgggattattgaggctttcacatatcagtgattttaaaatatcagtgttttttgctactcatttgtatgtattcagtcctaggattttgaatggttttctaatatagtgacatctgcatttaatttccagaaattaaattaattttcatgtttgaatgctgtaattccatttaaattccatttatatactttaaggaaacaagattacaacaattaaaaaaacacatagttccagtttctatggccttcccaccttctgttagaaattagttttatctggcatttttaaacatttaaaaattattaaacatttaaaaattagtttattatcagatatcagcatatgcctaataaaacttattttaataagcatttaattttccataatatgttacagccaaggcctatataataattttggatttgttcaatctttcttacaggctgttttctattgtatcaatcattagtatcaatcattaagtggaagttgaagaaggcatcaaacaaaacaaggatgtttacagacatatgcaaagggtcaggatatctatcctccagtatatagtaatgcttaataacaagtaatcctaacagcattaaaggccaaatctgtcctctttcccctgacttccttacagcatgtttatttatattacaagccattcagggacaaagaaagaaaccttgactaccccactgtctactaagaacaaacagcaagcaaaattagcaagcaaaattcactttgaaagcaccagtggttccattacattgacaactactaccaagatttagtagaaaataagtgctcaacaactaatccagattacagtatgatttagctcatcataattcagattatttttaatcatcttagccaaaactgtaaagttgccacattactaaagccacacacatcgtccctgttttgtagaaatatcacaaagaccaagaggctacagaaggaggaaatttgcaactgtctttgcaacaataaatcaggtatctattctggtgtagagataggatgttgaaagctgccctgctatcaccagtgtagaaattaagagtagtacaatacatgtacactgaaatttgccatcacgtgtttgtgtaaactcaatgtgcacattttgtatttcaaaaagaaaaaataaaagcaaaataaaatgttaaaaaaaaaaaaaaaaaaaaaa

SEQ ID NO: 218403 - DNA, 753 bp, Artificial Sequence
  derived and/or modified sequence
atgaacgtgcggcgcgtcgagtctatcagtgcccagctggaagaggcctcatcgacgggcggcttcctgtacgcccagaacagcaccaaacgctccattaaggaacggctgatgaaactactcccatgttctgcagctaaaacaagtagtccagcgattcagaattccgtcgaggatgaactggaaatggcaacagttcggcataggccggaggcgctggaactcttagaggcacagagtaaattcacaaagaaagaactgcagatattgtacaggggattcaaaaatgagtgccctagtggagtggtcaacgaggaaaccttcaaagagatttacagccagtttttcccacagggggatagtacaacttacgcccacttcctcttcaacgcgtttgatacagaccacaacggggccgtgagctttgaggactttataaaagggctgagcatactgctgcggggaacagtccaagagaagcttaactgggcattcaacctgtatgacattaataaggacgggtatattaccaaagaggaaatgttggatattatgaaagcaatctacgacatgatgggcaagtgcacttaccctgtgcttaaggaggacgcccctcgccagcacgtggaaaccttcttccaaaagatggacaagaataaagatggcgtggtaactatagacgagttcattgagtcctgccaaaaagatgaaaatattatgagatctatgcagttgttcgagaacgtgatttag

SEQ ID NO: 218404 - DNA, 1767 bp, Artificial Sequence
  derived and/or modified sequence
ctgcagcccgctccgcgcgccctgcccgcagccgccgccgaagctctcgctcccagcgccacggacgcccccgggccgagcggcggtgcgctcccgtgcagacccgtggacagacgcccctggccggtggactctcgagtctcgcttctgcaccctgcgtccctagacatgaatgtgaggagggtggaaagcatttcggctcagctggaggaggccagctctacaggcggtttcctgtacgctcagaacagcaccaagcgcagcattaaagagcggctcatgaagctcttgccctgctcagctgccaaaacgtcgtctcctgctattcaaaacagcgtggaagatgaactggagatggccaccgtcaggcatcggcctgaagcccttgagcttctggaagcccagagcaaatttaccaagaaagagcttcagatcctttacagaggatttaagaatgaatgccccagtggtgttgttaatgaagaaaccttcaaagagatttactcgcagttctttccacagggagactctacaacatatgcacattttctgttcaatgcatttgatacagaccacaatggagctgtgagtttcgaggatttcatcaaaggtctttccattttgctccgggggacagtacaagaaaaactcaattgggcatttaatctgtatgacataaataaagatggctacatcactaaagaggaaatgcttgatataatgaaagcaatatacgatatgatgggtaaatgtacatatcctgtcctcaaagaagatgctcccagacaacacgttgaaacattttttcagaaaatggacaaaaataaagatggggttgttaccatagatgagttcattgaaagctgccaaaaagatgaaaacataatgcgctccatgcagctctttgaaaatgtgatttaacttgtcaaatagatcctgaatccaacagacaaatgtgaactattctaccacccttaaagttggagctaccacttttagcatagattgctcagcttgacactgaagcatattatgcaaacaagctttgttttaatataaagcaatccccaaaagatttgagctttcagttataaatttgcatccttttcataatgccactgagttcaggggatggtctaactcatttcatactctgtgaatattcaaaagtaatagaatctggcatatagttttattggttccttagccatgggattattgaggctttcacatatcagtgattttaaaatatcagtgttttttgctactcatttgtatgtattcagtcctaggattttgaatggttttctaatatagtgacatctgcatttaatttccagaaattaaattaattttcatgtttgaatgctgtaattccatttaaattccatttatatactttaaggaaacaagattacaacaattaaaaaaacacatagttccagtttctatggccttcccaccttctgttagaaattagttttatctggcatttttaaacatttaaaaattattaaacatttaaaaattagtttattatcagatatcagcatatgcctaataaaacttattttaataagcatttaattttccataatatgttacagccaaggcctatataataattttggatttgttcaatctttcttacaggctgttttctattgtatcaatcattagtatcaatcattaagtggaagttgaagaaggcatcaaacaaaacaaggatgtttacagacatatgcaaagggtcaggatatctatcct

SEQ ID NO: 218405 - DNA, 1538 bp, Artificial Sequence
  derived and/or modified sequence
gtttcctgtacgctcagaacagcaccaagcgcagcattaaagagcggctcatgaagctcttgccctgctcagctgccaaaacgtcgtctcctgctattcaaagcaacgtggaagatgaactggagatggccaccgtcaggcatcggcctgaagcccttgagcttctggaagcccagagcaaatttaccaagaaagagcttcagatcctttacagaggatttaagaatgaatgccccagtggtgttgttaatgaagaaaccttcaaagagatttactcgcagttctttccacagggagactctacaacatatgcacattttctgttcaatgcatttgatacagaccacaatggagctgtgagtttcgaggatttcatcaaaggtctttccattttgctccgggggacagtacaagaaaaactcaattgggcatttaatctgtatgacataaataaagatggctacatcactaaagaggaaatgcttgatataatgaaagcaatatacgatatgatgggtaaatgtacatatcctgtcctcaaagaagatgctcccagacaacacgttgaaacattttttcagaaaatggacaaaaataaagatggggttgttaccatagatgagttcattgaaagctgccaaaaagatgaaaacataatgcgctccatgcagctctttgaaaatgtgatttaacttgtcaaatagatcctgaatccaacagacaaatgtgaactattctaccacccttaaagttggagctaccacttttagcatagattgctcagcttgacactgaagcatattatgcaaacaagctttgttttaatataaagcaatccccaaaagatttgagctttcagttataaatttgcatccttttcataatgccactgagttcaggggatggtctaactcatttcatactctgtgaatattcaaaagtaatagaatctggcatatagttttattggttccttagccatgggattattgaggctttcacatatcagtgattttaaaatatcagtgttttttgctactcatttgtatgtattcagtcctaggattttgaatggttttctaatatagtgacatctgcatttaatttccagaaattaaattaattttcatgtttgaatgctgtaattccatttaaattccatttatatactttaaggaaacaagattacaacaattaaaaaaacacatagttccagtttctatggccttcccaccttctgttagaaattagttttatctggcatttttaaacatttaaaaattattaaacatttaaaaattagtttattatcagatatcagcatatgcctaataaaacttattttaataagcatttaattttccataatatgttacagccaaggcctatataataattttggatttgttcaatctttcttacaggctgttttctattgtatcaatcattagtatcaatcattaagtggaagttgaagaaggcatcaaacaaaacaaggatgtttacagacatatgcaaagggtcaggatatctatcct

SEQ ID NO: 218406 - DNA, 753 bp, Artificial Sequence
  derived and/or modified sequence
atgaatgtgcggcgggtggagagcatcagcgcccagctggaggaggccagcagcactggaggcttcctgtatgcccagaacagcaccaagaggagcatcaaggagcggctgatgaagctgctgccctgcagcgctgccaagaccagcagccctgccatccagaacagcgtggaggatgagctggagatggccaccgtgcgccacaggcctgaggccctggagctgctggaggcccagagcaagttcaccaagaaggagctgcagatcctgtaccggggcttcaagaatgaatgtcccagcggcgtggtgaatgaggagaccttcaaggagatctacagccagttcttcccccagggcgacagcaccacctacgcccacttcctgttcaatgcctttgacacagaccacaatggagctgtgtcctttgaggacttcatcaagggcctgagcatcctgctgcggggcaccgtgcaggagaagctgaactgggccttcaacctgtatgacatcaacaaggatggctacatcaccaaggaggagatgctggacatcatgaaggccatctatgacatgatgggcaagtgcacctaccctgtgctgaaggaggatgccccccggcagcacgtggagaccttcttccagaagatggacaagaacaaggatggagtggtgaccattgatgagttcatcgagagctgccagaaggatgagaacatcatgaggtccatgcagctgtttgaaaatgtcatctag

SEQ ID NO: 218407 - DNA, 753 bp, Artificial Sequence
  derived and/or modified sequence
atgaacgtgcggcgggtggagagcatcagcgcccagctggaggaggcgtcttcgactggggggttcctgtatgcacagaactcaaccaagagaagcatcaaggaaagactgatgaaactgctgccatgcagtgccgccaaaaccagttcccccgccatccagaatagtgtggaggacgaactggaaatggcgaccgtgcgacaccggccggaagctctggagttactggaagcgcagagcaaatttactaagaaggagcttcagatcctttaccgcgggttcaagaacgaatgtccttccggagtagttaatgaagaaacttttaaggagatctactcacaattcttcccacagggcgatagcactacttatgcacattttctctttaatgcctttgacactgaccataatggggccgtgtcctttgaggattttataaagggcctatccattctgcttcgaggcaccgtgcaggagaagttgaattgggcctttaatctgtacgacattaataaagacggatacataaccaaggaggagatgctggacatcatgaaggccatctatgacatgatggggaaatgcacctatccagttctgaaggaagacgcgccccggcagcatgtggagaccttttttcagaagatggacaaaaacaaggacggggttgtcaccatcgacgagtttattgaaagctgccaaaaggatgagaacattatgaggtccatgcaactttttgagaacgtcatttag

SEQ ID NO: 218408 - DNA, 753 bp, Artificial Sequence
  derived and/or modified sequence
atgaatgtacggcgagtcgagagcattagcgctcagctcgaggaagctagttcaacaggtggctttttatatgcacaaaatagcaccaagcgctccattaaggaacgcttgatgaaactcttaccatgcagtgccgcaaagacttcaagtcccgctattcagaatagcgtagaagatgaactcgagatggccacagtgagacaccgccctgaggccctggaactacttgaggcccagtctaagtttaccaagaaggaacttcagatattgtatcgcggtttcaaaaacgagtgcccgtccggcgtggtgaatgaggagaccttcaaagaaatctactctcagttttttccccagggggacagtacaacctatgcccattttttgttcaatgccttcgacactgatcataacggcgctgtgagcttcgaagattttatcaaggggttgtccatattgcttcggggaaccgtgcaagaaaagctgaattgggccttcaacctgtatgacattaacaaggatggttatataactaaagaagagatgctggacattatgaaagccatttacgacatgatgggtaagtgtacctatcccgtcctaaaagaggatgcaccccgacagcatgtcgagaccttttttcagaagatggacaaaaataaggacggagttgtcacaatcgacgagttcatcgaaagctgccagaaggatgaaaacattatgcgcagtatgcaattgtttgagaacgtcatttag

SEQ ID NO: 218409 - DNA, 753 bp, Artificial Sequence
  derived and/or modified sequence
atgaacgtgagaagagtggagagcatcagcgcccagctggaggaggccagcagcaccggcggcttcctgtacgcccagaacagcaccaagagaagcatcaaggagagactgatgaagctgctgccctgcagcgccgccaagaccagcagccccgccatccagaacagcgtggaggacgagctggagatggccaccgtgagacacagacccgaggccctggagctgctggaggcccagagcaagttcaccaagaaggagctgcagatcctgtacagaggcttcaagaacgagtgccccagcggcgtggtgaacgaggagaccttcaaggagatctacagccagttcttcccccagggcgacagcaccacctacgcccacttcctgttcaacgccttcgacaccgaccacaacggcgccgtgagcttcgaggacttcatcaagggcctgagcatcctgctgagaggcaccgtgcaggagaagctgaactgggccttcaacctgtacgacatcaacaaggacggctacatcaccaaggaggagatgctggacatcatgaaggccatctacgacatgatgggcaagtgcacctaccccgtgctgaaggaggacgcccccagacagcacgtggagaccttcttccagaagatggacaagaacaaggacggcgtggtgaccatcgacgagttcatcgagagctgccagaaggacgagaacatcatgagaagcatgcagctgttcgagaacgtgatctag

SEQ ID NO: 218410 - protein, 481 aa, Artificial Sequence
  derived and/or modified sequence
MYDAERGWSLSFAGCGFLGFYHVGATRCLSEHAPHLLRDARMLFGASAGALHCVGVLSGIPLEQTLQVLSDLVRKARSRNIGIFHPSFNLSKFLRQGLCKCLPANVHQLISGKIGISLTRVSDGENVLVSDFRSKDEVVDALVCSCFIPFYSGLIPPSFRGVRYVDGGVSDNVPFIDAKTTITVSPFYGEYDICPKVKSTNFLHVDITKLSLRLCTGNLYLLSRAFVPPDLKVLGEICLRGYLDAFRFLEEKGICNRPQPGLKSSSEGMDPEVAMPSWANMSLDSSPESAALAVRLEGDELLDHLRLSILPWDESILDTLSPRLATALSEEMKDKGGYMSKICNLLPIRIMSYVMLPCTLPVESAIAIVQRLVTWLPDMPDDVLWLQWVTSQVFTRVLMCLLPASRSQMPVSSQQASPCTPEQDWPCWTPCSPKGCPAETKAEATPRSILRSSLNFFLGNKVPAGAEGLSTFPSFSLEKSL

SEQ ID NO: 218411 - DNA, 1446 bp, Artificial Sequence
  derived and/or modified sequence
atgtacgacgccgagagaggctggagcctgagcttcgccggctgcggcttcctgggcttctaccacgtgggcgccaccagatgcctgagcgagcacgccccccacctgctgagagacgccagaatgctgttcggcgccagcgccggcgccctgcactgcgtgggcgtgctgagcggcatccccctggagcagaccctgcaggtgctgagcgacctggtgagaaaggccagaagcagaaacatcggcatcttccaccccagcttcaacctgagcaagttcctgagacagggcctgtgcaagtgcctgcccgccaacgtgcaccagctgatcagcggcaagatcggcatcagcctgaccagagtgagcgacggcgagaacgtgctggtgagcgacttcagaagcaaggacgaggtggtggacgccctggtgtgcagctgcttcatccccttctacagcggcctgatcccccccagcttcagaggcgtgagatacgtggacggcggcgtgagcgacaacgtgcccttcatcgacgccaagaccaccatcaccgtgagccccttctacggcgagtacgacatctgccccaaggtgaagagcaccaacttcctgcacgtggacatcaccaagctgagcctgagactgtgcaccggcaacctgtacctgctgagcagagccttcgtgccccccgacctgaaggtgctgggcgagatctgcctgagaggctacctggacgccttcagattcctggaggagaagggcatctgcaacagaccccagcccggcctgaagagcagcagcgagggcatggaccccgaggtggccatgcccagctgggccaacatgagcctggacagcagccccgagagcgccgccctggccgtgagactggagggcgacgagctgctggaccacctgagactgagcatcctgccctgggacgagagcatcctggacaccctgagccccagactggccaccgccctgagcgaggagatgaaggacaagggcggctacatgagcaagatctgcaacctgctgcccatcagaatcatgagctacgtgatgctgccctgcaccctgcccgtggagagcgccatcgccatcgtgcagagactggtgacctggctgcccgacatgcccgacgacgtgctgtggctgcagtgggtgaccagccaggtgttcaccagagtgctgatgtgcctgctgcccgccagcagaagccagatgcccgtgagcagccagcaggccagcccctgcacccccgagcaggactggccctgctggaccccctgcagccccaagggctgccccgccgagaccaaggccgaggccacccccagaagcatcctgagaagcagcctgaacttcttcctgggcaacaaggtgcccgccggcgccgagggcctgagcaccttccccagcttcagcctggagaagagcctgtag

SEQ ID NO: 218412 - DNA, 1446 bp, Artificial Sequence
  derived and/or modified sequence
atgtatgacgcggaaagaggttggtcgttgagctttgccggctgtggcttcctcggattttatcacgtgggcgccacgcggtgcttgtctgagcatgcaccacacctgctgcgtgatgcaaggatgctctttggagccagcgcgggcgctctgcattgtgtgggcgtcctgagcggcattccattggaacagaccttgcaggtgcttagtgatctggttcggaaagctcgctcccggaacatcggaatcttccacccttcctttaacttgagcaagttcctgcggcagggcctgtgcaagtgtctcccggctaacgtgcaccagctgatcagcggcaaaatcggaatcagcctcactcgggtgagtgacggcgaaaatgtgctcgtttcagatttccggtctaaggacgaagtggtagacgcactggtgtgcagttgctttatcccgttctacagtgggctcatacccccaagctttcggggcgtgcggtacgtggatggaggagtgtcagacaacgtgcctttcatcgacgcaaaaaccacgatcactgtttcacctttctacggagagtacgacatttgcccaaaagtgaaatctaccaacttcctccatgttgacatcacgaaactatcattgcgcttatgtacgggtaacctataccttctgtctcgcgcttttgtcccaccagatctgaaggtgctcggcgagatatgtctgaggggctacctcgacgcctttcgcttcctggaggaaaaggggatctgcaatcgcccccagccaggcttgaaatcctcctcagaggggatggatcccgaggtggccatgccctcttgggccaacatgagcctcgacagttcccccgaatctgcagccctggccgttcggctggaaggggacgagttgctcgatcacttacgcctgagcattcttccctgggatgaatctatcttggacactctctcacccaggctcgccaccgccttaagcgaagaaatgaaggataaaggcgggtacatgtctaaaatttgcaatctgttacctattagaataatgagctatgtcatgctaccgtgcaccctgcccgtggagagcgccatcgctatcgtccagaggttagtgacatggttacccgacatgcctgacgatgtgctgtggctgcagtgggtgacctctcaggtcttcacacgggttcttatgtgcttgctacccgcttctagatctcagatgcctgtctcctcacagcaggcgtccccatgtacgcctgaacaagactggccatgttggacaccttgtagcccaaaggggtgtcccgccgaaaccaaagccgaggccaccccccgcagcatactgcggagcagcctgaatttcttcctcgggaataaggtcccggccggcgcagaggggctgtctaccttcccctcatttagtctcgaaaagtctctttag

SEQ ID NO: 218413 - DNA, 1446 bp, Artificial Sequence
  derived and/or modified sequence
atgtatgatgctgagcggggctggagcctgagctttgctggctgcggcttcctgggcttctaccacgtgggcgccacccgctgcctgtctgagcacgccccccacctgctgagagatgccaggatgctgtttggagccagcgctggggccctgcactgtgtgggcgtgctgagcggcatccccctggagcagaccctgcaggtgctgagtgacctggtgaggaaggcccggagcagaaatattggcatcttccaccccagcttcaacctgagcaagttcctgcggcagggcctgtgcaagtgcctgcctgccaacgtgcaccagctgatcagcggcaagattggcatcagcctgaccagggtgtctgatggagaaaatgtgctggtgtctgacttccgcagcaaggatgaggtggtggatgccctggtgtgcagctgcttcatccccttctacagcggcctcatcccccccagcttccggggcgtgcgctacgtggatggcggcgtgtctgacaacgtgcccttcattgatgccaagaccaccatcaccgtgagccccttctacggggagtatgacatctgccccaaggtgaagagcaccaacttcctgcacgtggacatcaccaagctgagcctgcggctgtgcaccggcaacctgtacctgctgagccgggcctttgtgcccccagacctgaaggtgctgggggagatctgcctgcggggctacctggatgccttccgcttcctggaggagaagggcatctgcaaccggccccagcccggcctgaagagcagcagcgagggcatggaccctgaggtggccatgcccagctgggccaacatgagcctggacagcagccctgagagcgctgccctggccgtgcggctggagggagatgagctgctggaccacctgcggctgagcatcctgccctgggatgagagcatcctggacaccctgagcccccggctggccacagccctgtctgaggagatgaaggacaagggcggctacatgagcaagatctgcaacctgctgcccatccgcatcatgtcctatgtgatgctgccctgcaccctgcctgtggagagcgccatcgccatcgtgcagaggctggtgacctggctgcctgacatgccagatgatgtgctgtggctgcagtgggtgaccagccaggtgttcaccagggtgctgatgtgcctgctgcctgccagccgcagccagatgcctgtgagcagccagcaggccagcccctgcaccccagagcaggactggccctgctggaccccctgcagccccaagggctgcccagctgagaccaaggccgaggccacccccaggagcatcctgcggagcagcctgaacttcttcctgggcaacaaggtgcctgctggagctgagggcctgagcaccttccccagcttcagcctggagaagagcctgtag

SEQ ID NO: 218414 - DNA, 1446 bp, Artificial Sequence
  derived and/or modified sequence
atgtacgacgccgagcggggctggagcctgagcttcgccggctgcgggttcttgggcttctaccatgtgggagcaacccgatgtttatcggagcacgcgccccacctactacgggatgcgcggatgcttttcggggcctccgccggagccctgcactgcgttggcgtgttaagtggcataccgctcgagcaaaccctgcaagttctttcggatttggtacggaaagcgcgaagccggaacatagggatattccatccaagctttaacctgtcgaaattccttagacagggcctgtgtaaatgcttaccagcaaatgtgcaccagctaatttcaggtaagatcggaatttccctgacaagagttagtgacggtgagaacgtgcttgttagcgactttcggagcaaggatgaagtggtcgacgccctcgtgtgttcttgcttcatccccttctactccggcctaatccctcccagctttcggggagtcagatacgttgatggtggggtgtcagataacgtgccgttcattgatgcaaaaaccaccattactgtgtcacccttctatggcgaatacgacatctgccctaaggttaaatccacaaatttccttcacgttgacattacaaaactgtccctcaggctctgtactggcaacctttatctcctctcaagggcctttgtacctccagatttaaaggtgctgggcgaaatctgcctgcgcgggtatttggatgccttccggttcctggaggaaaagggaatttgcaataggcctcagcccggtcttaagtctagctccgagggaatggatccggaggttgcaatgccgagttgggcaaacatgtctctcgatagctctcctgagagtgccgccctagccgtgagactggaaggagacgagcttttagatcatctcaggctctctattttgccatgggacgagtctatcctcgacacccttagtccacggctcgccaccgcactcagtgaagagatgaaggacaaggggggatatatgagcaaaatttgcaatctgctacccatcaggattatgtcctacgtgatgctcccatgtacactacccgtagagagtgccatcgccatcgtgcagagactagtcacttggctgcctgacatgccagacgatgtgttgtggctgcaatgggttacaagccaagtgtttacgagagttctgatgtgcctgctgccagcatccagatctcagatgcctgttagtagccagcaggcttccccttgcactcctgaacaggactggccctgttggactccttgcagccccaagggttgtcccgcagaaactaaggcagaagcgactccacgatcaattctgagatcctctctgaatttttttctcgggaataaggtgccagctggcgcagaaggtctcagtacatttccttctttcagtctggaaaagtccctttag

SEQ ID NO: 218415 - DNA, 1446 bp, Artificial Sequence
  derived and/or modified sequence
atgtatgacgccgaacggggatggtcactctcatttgccggatgcggattcctgggtttttaccacgtgggggcaacgcggtgtctgagtgagcacgccccacacctgctgagagacgcacggatgctctttggggcttctgccggagcactgcattgtgttggtgtgttatcaggaatcccactggaacagactctgcaggttttgtctgacctggtacgcaaagcccgatcaagaaacatcggcatctttcacccaagctttaatctgtccaagttcctgcggcagggactttgtaagtgcctcccagctaacgtccatcagctgatctctggcaagataggaatctctctgacccgcgtgtctgacggtgagaacgtacttgttagcgattttcgctctaaagacgaggtggtagatgccttagtgtgctcctgcttcatccccttctattccggactgattcctccaagtttcagaggggtgcgctacgtggatggtggggtgagcgataatgtgccatttatcgacgcgaaaaccacgattaccgtgagcccattctacggcgagtacgacatctgccctaaggtgaaatctaccaatttccttcacgtcgatatcacaaagctttcactccggctgtgcaccgggaacctgtatcttttatccagggcgttcgttcctcccgacttaaaagtactgggagagatttgtctgcgcggttatttggacgcctttcgattcctagaagagaaaggtatctgtaatcgaccgcagcctggactcaagagcagctctgaagggatggatccggaggtggccatgccctcatgggcgaacatgtctctagactcatcacccgagagcgccgcacttgcggtccggcttgagggggacgagctgttggatcacctacgactgtctatccttccctgggacgagtccattctcgatacactgtcacctcggctggcaactgccctgagcgaggaaatgaaggataaagggggttacatgtcgaagatctgcaatctgcttccaataagaattatgtcgtacgtgatgctgccttgcactctgcctgtagagtcagccatcgccatagtccagaggctggtgacctggctgccagatatgcccgatgacgtactctggttgcaatgggtaacaagtcaggtttttacacgcgtgctgatgtgtctgctaccggcatctcgttcacagatgccagtgagctcacaacaggcctcaccttgcacacctgagcaggactggccctgctggactccatgtagccccaaaggctgccctgccgagaccaaagccgaggccacccctagaagcatcctgcggagttcactcaacttcttcttgggaaataaagtccccgcaggcgcagaaggactttctacattccccagctttagcttggagaagtccctgtag

SEQ ID NO: 218416 - DNA, 216 bp, Artificial Sequence
  derived and/or modified sequence
atgaagatcgtgcacgtgaacgtgatgggcgtgggcggctggggcgccgttttcctcgatatgtggcacgtgacccaggagagcaaaagaccgatcatctctaaaatgcccgcttggatctttccgtgccatccccttgacgaacagacttatcacatggctttaaatgccgcaactttccctaaaaatgctacctggattgggcctttgtggtag

SEQ ID NO: 218417 - DNA, 2805 bp, Artificial Sequence
  derived and/or modified sequence
atggtccgaggggggcggggctgacgtcgcgctgggaatgccctggccgagacactgaggcagggtagagagcgcttgcgggcgccgggcggagctgctgcggatcaggacccgagccgattcccgatcccgacccagatcctaacccgcgcccccgccccgccgccgccgccatgtacgacgcagagcgcggctggagcttgtccttcgcgggctgcggcttcctgggcttctaccacgtcggggcgacccgctgcctgagcgagcacgccccgcacctcctccgcgacgcgcgcatgttgttcggcgcttcggccggggcgttgcactgcgtcggcgtcctctccggtatcccgctggagcagactctgcaggtcctctcagatcttgtgcggaaggccaggagtcggaacattggcatcttccatccatccttcaacttaagcaagttcctccgacagggtctctgcaaatgcctcccggccaatgtccaccagctcatctccggcaaaataggcatctctcttaccagagtgtctgatggggaaaacgttctggtgtctgactttcggtccaaagacgaagtcgtggatgccttggtatgttcctgcttcatccccttctacagtggccttatccctccttccttcagaggcgtgcgatatgtggatggaggagtgagtgacaacgtacccttcattgatgccaaaacaaccatcaccgtgtcccccttctatggggagtacgacatctgccctaaagtcaagtccacgaactttcttcatgtggacatcaccaagctcagtctacgcctctgcacagggaacctctaccttctctcgagagcttttgtccccccggatctcaaggtgctgggagagatatgccttcgaggatatttggatgcattcaggttcttggaagagaagggcatctgcaacaggccccagccaggcctgaagtcatcctcagaagggatggatcctgaggtcgccatgcccagctgggcaaacatgagtctggattcttccccggagtcggctgccttggctgtgaggctggagggagatgagctgctagaccacctgcgtctcagcatcctgccctgggatgagagcatcctggacaccctctcgcccaggctcgctacagcactgagtgaagaaatgaaagacaaaggtggatacatgagcaagatttgcaacttgctacccattaggataatgtcttatgtaatgctgccctgtaccctgcctgtggaatctgccattgcgattgtccagagactggtgacatggcttccagatatgcccgacgatgtcctgtggttgcagtgggtgacctcacaggtgttcactcgagtgctgatgtgtctgctccccgcctccaggtcccaaatgccagtgagcagccaacaggcctccccatgcacacctgagcaggactggccctgctggactccctgctcccccaagggctgtccagcagagaccaaagcagaggccaccccgcggtccatcctcaggtccagcctgaacttcttcttgggcaataaagtacctgctggtgctgaggggctctccacctttcccagtttttcactagagaagagtctgtgagtcacttgaggaggcgagtctagcagattctttcagaggtgctaaagtttcccatctttgtgcagctacctccgcattgctgtgtagtgacccctgcctgtgacgtggaggatcccagcctctgagctgagttggttttatgaaaagctaggaagcaacctttcgcctgtgcagcggtccagcacttaactctaatacatcagcatgcgttaattcagctggttgggaaatgacaccaggaagcccagtgcagagggtcccttactgactgtttcgtggccctattaatggtcagactgttccagcatgaggttcttagaatgacaggtgtttggatgggtgggggccttgtgatggggggtaggctggcccatgtgtgatcttgtggggtggagggaagagaatagcatgatcccacttccccatgctgtgggaaggggtgcagttcgtccccaagaacgacactgcctgtcaggtggtctgcaaagatgataaccttgactactaaaaacgtctccatggcgggggtaacaagatgataatctacttaattttagaacacctttttcacctaactaaaataatgtttaaagagttttgtataaaaatgtaaggaagcgttgttacctgttgaattttgtattatgtgaatcagtgagatgttagtagaataagccttaaaaaaaaaaaaatcggttgggtgcagtggcacacggctgtaatcccagcactttgggaggccaaggttggcagatcacctgaggtcaggagttcaagaccagtctggccaacatagcaaaaccctgtctctactaaaaatacaaaaattatctgggcatggtggtgcatgcctgtaatcccagctattcggaaggctgaggcaggagaatcacttgaacccaggaggcggaggttgcggtgagctgagattgcaccatttcattccagcctgggcaacatgagtgaaagtctgactcaaaaaaaaaaaatttaaaaaacaaaataatctagtgtgcagggcattcacctcagccccccaggcaggagccaagcacagcaggagcttccgcctcctctccactggagcacacaacttgaacctggcttattttctgcagggaccagccccacatggtcagtgagtttctccccatgtgtggcgatgagagagtgtagaaataaagac

SEQ ID NO: 218418 - protein, 458 aa, Artificial Sequence
  derived and/or modified sequence
MAWASRLGLLLALLLPVVGASTPGTVVRLNKAALSYVSEIGKAPLQRALQVTVPHFLDWSGEALQPTRIRILNVHVPRLHLKFIAGFGVRLLAAANFTFKVFRAPEPLELTLPVELLADTRVTQSSIRTPVVSISACSLFSGHANEFDGSNSTSHALLVLVQKHIKAVLSNKLCLSISNLVQGVNVHLGTLIGLNPVGPESQIRYSMVSVPTVTSDYISLEVNAVLFLLGKPIILPTDATPFVLPRHVGTEGSMATVGLSQQLFDSALLLLQKAGALNLDITGQLRSDDNLLNTSALGRLIPEVARQFPEPMPVVLKVRLGATPVAMLHTNNATLRLQPFVEVLATASNSAFQSLFSLDVVVNLRLQLSVSKVKLQGTTSVLGDVQLTVASSNVGFIDTDQVRTLMGTVFEKPLLDHLNALLAMGIALPGVVNLHYVAPEIFVYEGYVVISSGLFYQS

SEQ ID NO: 218419 - DNA, 1377 bp, Artificial Sequence
  derived and/or modified sequence
atggcttgggcaagtaggttgggcctgctactggcgctccttcttcctgtggttggggctagcacccccggtacggtggtacggcttaacaaagcagccctttcatacgtgagcgaaatcggtaaagcacctctgcagagagctcttcaagtaaccgttccacactttctggactggtccggagaagcattacagccaaccaggataagaatactgaacgtacacgtgccccgattgcaccttaagttcattgccggatttggagtgcggctactcgccgctgctaatttcaccttcaaagtatttcgcgcacctgagcccttagaactgactcttcctgtggaactgctcgctgatacaagagtaacccagtctagtattcgaaccccagtggttagcattagtgcttgcagcctgttcagcggccacgcgaacgaatttgacgggtccaactccacttcccacgctctgctggtactcgtccaaaagcacatcaaagcagtccttagcaacaaactatgtctttcaatcagtaacctcgttcagggggttaacgtgcatctgggtactctaattgggctgaatcctgtgggtcccgagagtcagatcaggtatagtatggtaagcgtcccaaccgtgaccagcgattatattagtctcgaggtcaatgcagtcctttttttgctggggaagcctatcatactacctacggacgccactccgtttgtccttcccagacatgtgggaacagaaggaagcatggctaccgtggggctctctcagcaactgtttgattcggccctgctactcctgcagaaggccggagccctaaacctggacattacgggccagctgcgctccgacgacaatctcctgaacaccagtgccctgggcagactcatccctgaagtggctaggcagttcccagagcctatgccagtggtgctcaaggtccgactaggcgctacacccgtggccatgttgcacaccaacaacgcaacactgagattgcagcccttcgttgaagtgttggctaccgcatccaacagtgccttccagtccctgttctcccttgatgtggtggtaaatctgaggttgcaactgtcagtgtccaaagtgaaactgcaaggtacgactagcgtgttaggcgacgtgcagctaaccgtcgccagtagtaacgtggggttcatcgatactgatcaagttcgtacccttatgggaacagtgtttgaaaaacccctattggaccatctgaatgccctgctcgcaatgggcatcgccctgccaggggtcgtcaaccttcactatgttgccccagagatttttgtgtacgaggggtatgttgttattagcagtggcctgttctatcagtcatag

SEQ ID NO: 218420 - DNA, 1377 bp, Artificial Sequence
  derived and/or modified sequence
atggcatgggcgtcaagattggggctgctgttggccctgctgctaccggttgtgggcgcaagcacacccggcaccgtggtgagactaaacaaggccgcgttgtcatatgtgtccgagatcggcaaggctcccctccagagggccctgcaggtgaccgtcccacactttcttgactggagcggcgaagctctgcagcccacacgcattcgaatccttaacgttcatgtgcctagacttcacttaaagttcatcgctgggttcggtgtacgccttttggccgccgctaatttcacctttaaggtgtttcgcgctcctgaaccattagagctcaccctacccgtggagctgcttgcggacacccgagtgacccagagcagtatccggactcccgtcgtgtctatctccgcttgcagcctcttctctggccacgcaaacgagttcgatggctccaactctacgagccatgcattactggtccttgtccagaaacacattaaggccgtgttatctaataaactgtgtctttcaattagcaatctggttcaaggtgtaaatgtgcacctgggtactctcattggtctcaatccagtcggccccgagagtcagattagatacagcatggtctccgtgccaactgtgacatccgactatatttctttggaagtgaacgcggtgctattcctactcggtaaacccatcattctgcctaccgacgccaccccgtttgtgttgccccgtcatgtcggtaccgagggcagcatggctaccgttggtcttagtcagcaactcttcgacagcgctctactattattgcagaaggctggcgccttgaacctggacatcaccggccaactccgcagcgacgacaacctcctcaatacctcggctctgggcaggctcattcccgaggtcgcccgccagttcccagagcccatgccagtggtcctgaaagtcagactaggcgcaacaccagtggctatgctgcatactaataacgccaccctcagactgcagccatttgtagaggtcctcgccaccgcctcaaactccgcttttcaatccttgttttcactcgacgtcgtggtaaacttaagactgcagctgtccgtctctaaagtcaaattgcaaggcactacttccgttctcggcgatgtccagcttactgtggcctcaagtaatgtggggttcatagacacagatcaagtcaggacgctaatgggcactgtgtttgaaaaacccctgcttgatcatctgaatgcactgctcgcgatgggaattgctctccctggcgtggtgaacttacattatgtagctccggagatcttcgtgtatgagggctacgtggtcatctctagcggactgttttaccagagctag

SEQ ID NO: 218421 - DNA, 1377 bp, Artificial Sequence
  derived and/or modified sequence
atggcttgggcctctcggcttggcctcctgctcgccctcctgctgccagttgtgggagccagtactcccggtaccgtcgttagactgaataaggctgccctgtcctatgtttctgagattggtaaggccccactacaacgcgccctgcaagtgactgtgcctcactttctggactggagtggcgaagccctgcaacctacacgcatccggatccttaatgtccacgtaccacggctgcatcttaagtttatcgcaggatttggagtacgattactcgctgcagctaactttaccttcaaggtgtttcgcgctccagagcccctagaactaacgctacccgttgagctgctcgccgatacgagagtgactcaatcttccattcgaaccccagttgtttctataagtgcctgctccctgttttccggtcatgccaacgagtttgatggatccaactcaacctctcacgctttattggtgcttgtccagaaacacattaaagctgtgctctcaaacaaactctgtctctcaatttccaacctcgtgcaaggcgtgaacgttcatcttgggaccctgataggtctaaatcctgtgggcccagaatctcagatcaggtattcaatggtttcagtccctacagttactagcgattacatctccttggaagtgaatgcagttctgttcctgctaggaaaacctattatcctcccaaccgatgcgacccctttcgtacttcccagacacgttggaacagaagggtccatggctaccgtgggactgtctcagcagctcttcgactccgccctgcttctgctccaaaaagccggggccctgaacctggatatcaccggacagctacgcagcgacgacaatctcctgaacaccagcgccctcggaaggttgattcccgaggtcgcccgccagttcccagagcccatgccagtggtcctgaaagtcagactaggcgcaacaccagtggctatgctgcatactaataacgccaccctcagactgcagccatttgtagaggtcctcgccaccgcctcaaactccgcttttcaatccttgttttcactcgacgtcgtggtaaacttaagactgcagctgtccgtctctaaagtcaaattgcaaggcactacttccgttctcggcgatgtccagcttactgtggcctcaagtaatgtggggttcatagacacagatcaggtcaggaccctaatgggcaccgttttcgaaaaacctctacttgatcatttaaatgctttgctggctatgggaatcgccctaccaggggtcgtcaatctgcactatgtggctccagagattttcgtatatgagggatatgtcgtgattagctcagggctcttttatcagtcctag

SEQ ID NO: 218422 - DNA, 1898 bp, Artificial Sequence
  derived and/or modified sequence
aaaacacttgcaaccacaagcaaactcgccgctccctgggtcccttcccagtggactctgcacattgggagccttataaagtagcctctgcatctgcctgcctcgggcagaggagggctaccctggggctgagagttcacctgtctcaggaaccacctgagcccacagatcctgtgggcagcggccagggcagccatggcttgggcaagtaggctgggcctgctgctggcactgctgctgcccgtggtcggtgcctccacgccaggcaccgtggtccgactcaacaaggcagcattgagctacgtgtctgaaattgggaaagcccctctccagcgggccctgcaggtcactgtccctcatttcctggactggagtggagaggcgcttcagcccaccaggatccggattctgaatgtccatgtgccccgcctccacctgaaattcattgctggtttcggagtgcgcctgctggcagcagctaattttactttcaaggtctttcgcgccccagagcccctggagctgacgctgcctgtggaactgctggctgacacccgcgtgacccagagctccatcaggacccctgtggtcagcatctctgcctgctctttattctcgggccacgccaacgagtttgatggcagtaacagcacctcccacgcgctgctggtcctggtgcagaagcacattaaagctgtcttgagtaacaagctgtgcctgagcatctccaacctggtgcagggtgtcaatgtccacctgggcaccttaattggcctcaaccccgtgggtcctgagtcccagatccgctattccatggtcagtgtgcccactgtcaccagtgactacatttccctggaagtcaatgctgttctcttcctgctgggcaagcccatcatcctgcccacggatgccaccccttttgtgttgccaaggcatgtgggtaccgagggctccatggccaccgtgggcctctcccagcagctgtttgactctgcgctcctgctgctgcagaaggccggtgccctcaacctggacatcacagggcagctgaggtcggatgacaacctgctgaacacctctgctctgggccggctcatcccggaggtggcccgccagtttcccgagcccatgcctgtggtgctcaaggtgcggctgggtgccacacctgtggccatgctccacacaaacaacgccaccctgcggctgcagcccttcgtggaggtcctggccacagcctccaactcggctttccagtccctcttctccctggatgtggtagtgaacttgagactccagctctctgtgtccaaggtgaagcttcaggggaccacgtctgtgctgggggatgtccagctcacggtggcctcctccaacgtgggcttcattgatacagatcaggtgcgcacactgatgggcaccgtttttgagaagcccctgctggaccatctcaatgctctcttggccatgggaattgccctccctggtgtggtcaacctccactatgtcgcccctgagatctttgtctatgagggctacgtggtgatatccagtggactcttctaccagagctgaggcaagaccactgggaggcctgagagtgggccagctcgctgctcaggcgaatttctcatttcaagccactggggaaactgaggcaaaaccatacttagtcatcaccaacaagctggactgcttagctgggctgttttatcttccctgagtgcctgggtctccctccctcacttctgccctttcccttcctcctcctcttctcctccctcttccctcatctcccccctccttcctctgccccaccccagcggggagcagactgctcctccaggctgtatagacctgccctcttgcattaaacaacttctcttgagctgcaactttca

SEQ ID NO: 218423 - DNA, 1377 bp, Artificial Sequence
  derived and/or modified sequence
atggcctgggccagcagactgggcctgctgctggccctgctgctgcccgtggtgggcgccagcacccccggcaccgtggtgagactgaacaaggccgccctgagctacgtgagcgagatcggcaaggcccccctgcagagagccctgcaggtgaccgtgccccacttcctggactggagcggcgaggccctgcagcccaccagaatcagaatcctgaacgtgcacgtgcccagactgcacctgaagttcatcgccggcttcggcgtgagactgctggccgccgccaacttcaccttcaaggtgttcagagcccccgagcccctggagctgaccctgcccgtggagctgctggccgacaccagagtgacccagagcagcatcagaacccccgtggtgagcatcagcgcctgcagcctgttcagcggccacgccaacgagttcgacggcagcaacagcaccagccacgccctgctggtgctggtgcagaagcacatcaaggccgtgctgagcaacaagctgtgcctgagcatcagcaacctggtgcagggcgtgaacgtgcacctgggcaccctgatcggcctgaaccccgtgggccccgagagccagatcagatacagcatggtgagcgtgcccaccgtgaccagcgactacatcagcctggaggtgaacgccgtgctgttcctgctgggcaagcccatcatcctgcccaccgacgccacccccttcgtgctgcccagacacgtgggcaccgagggcagcatggccaccgtgggcctgagccagcagctgttcgacagcgccctgctgctgctgcagaaggccggcgccctgaacctggacatcaccggccagctgagaagcgacgacaacctgctgaacaccagcgccctgggcagactgatccccgaggtggccagacagttccccgagcccatgcccgtggtgctgaaggtgagactgggcgccacccccgtggccatgctgcacaccaacaacgccaccctgagactgcagcccttcgtggaggtgctggccaccgccagcaacagcgccttccagagcctgttcagcctggacgtggtggtgaacctgagactgcagctgagcgtgagcaaggtgaagctgcagggcaccaccagcgtgctgggcgacgtgcagctgaccgtggccagcagcaacgtgggcttcatcgacaccgaccaggtgagaaccctgatgggcaccgtgttcgagaagcccctgctggaccacctgaacgccctgctggccatgggcatcgccctgcccggcgtggtgaacctgcactacgtggcccccgagatcttcgtgtacgagggctacgtggtgatcagcagcggcctgttctaccagagctag

SEQ ID NO: 218424 - DNA, 1377 bp, Artificial Sequence
  derived and/or modified sequence
atggcttgggcctctagattagggttacttctggcactgctcctgcccgtggtgggggcgtcaacccctggtacggtcgtccgtttgaataaagcagcattatcatatgtgtcagaaatcggaaaagcccccctgcagagggcactgcaggtgacggtcccacacttcctcgactggagcggggaagcgctgcagcctacgagaatacggatccttaatgtgcatgtgccaagactccatctcaaatttatagccgggttcggcgtgcggctgttagctgcagcgaatttcacattcaaagtgtttagagccccagagccactggaactgactttgcctgtggagctgctagcagacacacgtgtcacacagagttctatcagaacacctgtggtaagcatttccgcgtgttctctgtttagcggacacgcgaatgaattcgatgggtccaattctacctctcacgctctgctggttctagtgcagaagcacatcaaggccgtcttgagcaataaattgtgtttgagtatctctaacctagttcaaggcgttaatgttcacctgggtacccttattggactcaatccagtagggccagaatcacagattcggtactctatggtgtcagtgcctaccgttacctcagattacatttccctcgaggtcaacgccgtcctttttcttctcggcaaacctattatactcccgaccgacgccaccccctttgttttgcctcgccatgtgggcactgaagggtccatggcaacagtcggactatcacaacagctgtttgacagcgctctgcttcttctgcaaaaggccggagcattgaacctcgacattacaggtcagttacggagcgacgacaacctgctgaacacttccgcattgggacggctaatcccggaggtagcgaggcagttccccgaacctatgcccgtggtactgaaggtccggttaggggccactcctgtggctatgcttcataccaacaatgctactctgagactccagccttttgttgaagtcctcgccacagcgtctaatagcgctttccagtctctgttctccttagacgtcgtcgtaaatcttaggctgcaactgagtgtgtccaaggtcaagcttcaggggacaacttcggtgctcggcgacgtccagctgactgtggctagctccaatgtaggcttcatcgatactgatcaggtgcggacactaatgggcacagtctttgagaagcctcttctggaccatctgaatgcacttctggctatggggattgcccttcccggggtggtgaatctgcactatgtggctccagagatcttcgtctatgaaggatatgtcgtgatctcttctggtctcttctaccagtcttag

SEQ ID NO: 218425 - DNA, 1377 bp, Artificial Sequence
  derived and/or modified sequence
atggcctgggccagccggctgggcctgctgctggccctgctgctgcctgtggtgggcgccagcaccccaggcaccgtggtgcggctgaacaaggccgccctgtcctatgtgtctgagatcggcaaggcccccctgcagagggccctgcaggtgacagtgccccacttcctggactggagcggggaggccctgcagcccacccgcatccgcatcctgaatgtgcacgtgccccggctgcacctgaagttcatcgccggctttggagtgcggctgctggccgccgccaacttcaccttcaaggtgttccgggcccctgagcccctggagctgaccctgcctgtggagctgctggccgacaccagggtgacccagagcagcatccgcacccctgtggtgtccatcagcgcctgcagcctcttcagcggccacgccaatgaatttgatggcagcaacagcaccagccacgccctgctggtgctggtgcagaagcacatcaaggctgtgctgagcaacaagctgtgcctgagcatcagcaacctggtgcagggcgtgaatgtgcacctgggcaccctcatcggcctgaaccctgtgggccctgagagccagatccgctacagcatggtgtctgtgcccaccgtgaccagtgactacatcagcctggaggtgaatgctgtgctcttcctgctgggcaagcccatcatcctgcccacagatgccaccccatttgtgctgcccaggcatgtgggcacagagggctccatggccaccgtgggcctgagccagcagctgtttgacagcgccctgctgctgctgcagaaggccggggccctgaacctggacatcaccggccagctgcggagtgatgacaacctgctgaacaccagcgccctgggccgcctcatccctgaggtggcccggcagtttcctgagcccatgcctgtggtgctgaaggtgcggctgggcgccacccctgtggccatgctgcacaccaacaatgccaccctgcggctgcagccctttgtggaggtgctggccacagccagcaacagcgccttccagagcctcttcagcctggatgtggtggtgaacctgcggctgcagctgtctgtgtccaaggtgaagctgcagggcaccacctctgtgctgggagatgtgcagctgactgtggccagcagcaatgtgggcttcatcgacacagaccaggtgaggaccctgatgggcaccgtgtttgagaagcccctgctggaccacctgaatgccctgctggccatgggcatcgccctgcccggggtggtgaacctgcactacgtggcccctgagatctttgtgtatgagggctacgtggtgatcagcagcggcctcttctaccagagctag

SEQ ID NO: 218426 - DNA, 1377 bp, Artificial Sequence
  derived and/or modified sequence
atggcctgggccagccggctgggcctgctgctggccctgctgctgcccgttgtaggtgcatcaacacctggcacggtggtgcggttgaataaagccgctttatcatatgtgtccgagatcggcaaggcccctttgcagcgggctctacaggtgactgtgccccactttttagactggtcaggcgaggcactgcagccaacccgcatccggatactcaacgtccatgttccccgcctgcatttaaaattcattgccggctttggtgttcgactgctggccgccgccaactttaccttcaaggtgttccgggcccctgaaccgctcgagctcacgctgcccgttgagcttctggctgatactagagtgacacaatcatccattagaacaccggtggtcagcatatccgcttgttccctgttctccggtcacgccaatgaattcgacggcagtaattcaacgtcccacgctctgttagtgctggtccagaagcacatcaaagcagtgctgagcaacaaactttgcttgtctattagcaatctggtccaaggcgtgaacgtccacctgggcacgcttattggactgaatcccgttgggccagagtcacagatccgttactcaatggtctccgtccccaccgtgacctctgactatatttcgctggaggtgaacgcggtcctgtttttgctggggaagcccattatactgcccacagacgcaactccctttgttctgccaagacatgtaggaacggaaggtagcatggccaccgtaggcctgagccaacaactgttcgactccgccctcctgctgttacagaaagcgggtgcgctgaatctcgacattacaggccagctccggagcgatgacaatctgctgaataccagcgctctaggccgcctcattccggaggtggccagacaatttccagaaccaatgccggtcgtgctgaaagtgagactgggcgcaacccctgtggctatgttacatacgaacaacgcaacgctccggttgcagcccttcgtggaagtcctggcgaccgcatccaattcagcattccagtccctgttttctctagacgtcgtggtgaatttgcggctgcagctatcggtgtccaaagtcaagctccaggggacaacctcggtgctgggggatgtccaactgaccgtcgcttctagcaacgtcggattcatagatacggaccaggtgcggacgttgatgggaacagttttcgaaaaaccattgctcgatcacctcaacgcgctgttggccatgggaatagctcttcccggtgtggtgaaccttcactacgttgctccggagatattcgtatacgaaggatatgtggttatctcatcaggtttgttttaccagagctag

SEQ ID NO: 218427 - RNA, 1377 nt, Artificial Sequence
  derived and/or modified sequence
auggcaugggcgucaagauuggggcugcuguuggcccugcugcuaccgguugugggcgcaagcacacccggcaccguggugagacuaaacaaggccgcguugucauauguguccgagaucggcaaggcuccccuccagagggcccugcaggugaccgucccacacuuucuugacuggagcggcgaagcucugcagcccacacgcauucgaauccuuaacguucaugugccuagacuucacuuaaaguucaucgcuggguucgguguacgccuuuuggccgccgcuaauuucaccuuuaagguguuucgcgcuccugaaccauuagagcucacccuacccguggagcugcuugcggacacccgagugacccagagcaguauccggacucccgucgugucuaucuccgcuugcagccucuucucuggccacgcaaacgaguucgauggcuccaacucuacgagccaugcauuacugguccuuguccagaaacacauuaaggccguguuaucuaauaaacugugucuuucaauuagcaaucugguucaagguguaaaugugcaccuggguacucucauuggucucaauccagucggccccgagagucagauuagauacagcauggucuccgugccaacugugacauccgacuauauuucuuuggaagugaacgcggugcuauuccuacucgguaaacccaucauucugccuaccgacgccaccccguuuguguugccccgucaugucgguaccgagggcagcauggcuaccguuggucuuagucagcaacucuucgacagcgcucuacuauuauugcagaaggcuggcgccuugaaccuggacaucaccggccaacuccgcagcgacgacaaccuccucaauaccucggcucugggcaggcucauucccgaggucgcccgccaguucccagagcccaugccagugguccugaaagucagacuaggcgcaacaccaguggcuaugcugcauacuaauaacgccacccucagacugcagccauuuguagagguccucgccaccgccucaaacuccgcuuuucaauccuuguuuucacucgacgucgugguaaacuuaagacugcagcuguccgucucuaaagucaaauugcaaggcacuacuuccguucucggcgauguccagcuuacuguggccucaaguaaugugggguucauagacacagaucaagucaggacgcuaaugggcacuguguuugaaaaaccccugcuugaucaucugaaugcacugcucgcgaugggaauugcucucccuggcguggugaacuuacauuauguagcuccggagaucuucguguaugagggcuacguggucaucucuagcggacuguuuuaccagagcuag

SEQ ID NO: 218428 - RNA, 1377 nt, Artificial Sequence
  derived and/or modified sequence
auggcuugggccucucggcuuggccuccugcucgcccuccugcugccaguugugggagccaguacucccgguaccgucguuagacugaauaaggcugcccuguccuauguuucugagauugguaaggccccacuacaacgcgcccugcaagugacugugccucacuuucuggacuggaguggcgaagcccugcaaccuacacgcauccggauccuuaauguccacguaccacggcugcaucuuaaguuuaucgcaggauuuggaguacgauuacucgcugcagcuaacuuuaccuucaagguguuucgcgcuccagagccccuagaacuaacgcuacccguugagcugcucgccgauacgagagugacucaaucuuccauucgaaccccaguuguuucuauaagugccugcucccuguuuuccggucaugccaacgaguuugauggauccaacucaaccucucacgcuuuauuggugcuuguccagaaacacauuaaagcugugcucucaaacaaacucugucucucaauuuccaaccucgugcaaggcgugaacguucaucuugggacccugauaggucuaaauccugugggcccagaaucucagaucagguauucaaugguuucagucccuacaguuacuagcgauuacaucuccuuggaagugaaugcaguucuguuccugcuaggaaaaccuauuauccucccaaccgaugcgaccccuuucguacuucccagacacguuggaacagaaggguccauggcuaccgugggacugucucagcagcucuucgacuccgcccugcuucugcuccaaaaagccggggcccugaaccuggauaucaccggacagcuacgcagcgacgacaaucuccugaacaccagcgcccucggaagguugauucccgaggucgcccgccaguucccagagcccaugccagugguccugaaagucagacuaggcgcaacaccaguggcuaugcugcauacuaauaacgccacccucagacugcagccauuuguagagguccucgccaccgccucaaacuccgcuuuucaauccuuguuuucacucgacgucgugguaaacuuaagacugcagcuguccgucucuaaagucaaauugcaaggcacuacuuccguucucggcgauguccagcuuacuguggccucaaguaaugugggguucauagacacagaucaggucaggacccuaaugggcaccguuuucgaaaaaccucuacuugaucauuuaaaugcuuugcuggcuaugggaaucgcccuaccaggggucgucaaucugcacuauguggcuccagagauuuucguauaugagggauaugucgugauuagcucagggcucuuuuaucaguccuag

SEQ ID NO: 218429 - protein, 564 aa, Artificial Sequence
  derived and/or modified sequence
MAVFRSGLLVLTTPLASLAPRLASILTSAARLVNHTLYVHLQPGMSLEGPAQPQSSPVQATFEVLDFITHLYAGADVHRHLDVRILLTNIRTKSTFLPPLPTSVQNLAHPPEVVLTDFQTLDGSQYNPVKQQLVRYATSCYSCCPRLASVLLYSDYGIGEVPVEPLDVPLPSTIRPASPVAGSPKQPVRGYYRGAVGGTFDRLHNAHKVLLSVACILAQEQLVVGVADKDLLKSKLLPELLQPYTERVEHLSEFLVDIKPSLTFDVIPLLDPYGPAGSDPSLEFLVVSEETYRGGMAINRFRLENDLEELALYQIQLLKDLRHTENEEDKVSSSSFRQRMLGNLLRPPYERPELPTCLYVIGLTGISGSGKSSIAQRLKGLGAFVIDSDHLGHRAYAPGGPAYQPVVEAFGTDILHKDGIINRKVLGSRVFGNKKQLKILTDIMWPIIAKLAREEMDRAVAEGKRVCVIDAAVLLEAGWQNLVHEVWTAVIPETEAVRRIVERDGLSEAAAQSRLQSQMSGQQLVEQSHVVLSTLWEPHITQRQVEKAWALLQKRIPKTHQALD

SEQ ID NO: 218430 - DNA, 1695 bp, Artificial Sequence
  derived and/or modified sequence
atggccgtgttccggagcgggttgcttgtgctcaccacgccattggcgagcctggcaccccggcttgcgagcattctgacaagtgccgctcggcttgtaaatcacacgctgtacgtgcacctgcaaccgggcatgagcttggagggacctgctcaaccccagtccagccccgtgcaggccacatttgaagtattagacttcatcacacatttgtatgcaggcgccgacgtacatagacacttggacgtgcgcatacttctcacgaatattcggaccaagagtaccttcctcccccctctccctacttcagttcagaatctcgcacacccccccgaggtggtattgaccgactttcaaaccctggatggctcccagtataatcccgtcaaacagcagctggtgcgctatgcgaccagctgttactcttgctgcccaaggctggcctctgtgctcttgtacagcgactacggtattggcgaggtccccgttgagccgcttgacgtgccactcccatctaccattaggcctgcaagcccagtggcagggtcccccaagcagccagtccgcggatactaccgaggcgccgttggaggcacctttgacaggttgcacaacgctcacaaagttttgctctcagtcgcttgcatccttgcgcaagagcagcttgtcgtaggcgtggctgacaaggatttacttaaatctaagctgctccctgaactccttcagccatacaccgagcgggtcgagcacctgtcagaatttctggtagacatcaagcctagcctgacttttgatgtgatcccacttctagacccatacgggcccgctggctcagatccctcccttgaattccttgtagtctcagaagagacttacaggggcggtatggctattaataggtttagactggaaaatgacctagaggaactcgcgctgtaccaaatacaactactgaaagatctgcggcacactgagaatgaagaggacaaggttagttcttcctcattccgccagaggatgctcggcaatctgctcagacctccatacgaacggccggaacttccaacttgtctctatgtgattggacttactggcattagtggctccggcaaaagctcaatcgcacaaaggctgaaggggctgggggccttcgtaatcgattccgaccatttgggacatagggcatatgcccctgggggacctgcctaccaaccagtcgtggaggcctttggcaccgacatcctgcacaaagatggtatcattaaccggaaggtattaggtagtcgtgttttcggaaacaaaaaacagctgaagatcctgacagacattatgtggccgattatagccaaactggcccgtgaagagatggaccgcgccgtggctgaaggaaaaagggtttgcgttatagatgccgctgtgctgcttgaagctggatggcagaatcttgtgcacgaagtttggaccgctgtgatccccgaaacggaggccgtgcgacgcatcgtggagcgcgatggcctgtctgaggccgctgcccagagcagattgcagtcccagatgtccggtcagcagctagtagaacaatcccacgttgtcctgtcaaccctgtgggagcctcatatcactcagcgacaggtagaaaaagcttgggccctgctgcagaagcgcatccccaaaacacatcaggcactggactag

SEQ ID NO: 218431 - DNA, 1695 bp, Artificial Sequence
  derived and/or modified sequence
atggcagtctttaggtccggcctcctcgtgctcactacgccccttgcgtccttggcccctcgactcgccagcatattgacatctgcagcgaggcttgttaatcatactctctacgtgcacctacagcctggaatgtcgctggaaggccccgcacaaccacagtcaagtcccgtccaggcgacattcgaagtcctagattttattacccacctctacgccggagccgatgtccacagacatctggacgtgcggatcttactcactaacataaggaccaaaagcacgttcctgccccccctccctacaagtgtacagaacctggcccacccgcccgaagtggtactgactgacttccaaacactcgatggctctcagtacaaccctgtgaagcagcagctggttcgctatgccacttcgtgctacagttgctgtccgagactggcctctgtgttgctctactcagactatggtatcggtgaggtcccagtagaacctctggacgtgcccctcccctcaacaatccggcccgcctctccagtggccgggtcacctaagcaaccagtacggggctattatcgaggggcggtcggcgggaccttcgatagactgcacaacgcccacaaagtgcttctgtctgtggcgtgtattctcgctcaggaacaactagtggtgggtgtggcagataaggacctgctgaagtcgaagcttctgcccgagctgttacagccatatactgagagggtagaacatctatcagagtttctggtcgacatcaaaccatctctgacttttgatgttattcctctgttggacccctacggtccagcgggttcagatccgtctctggaatttctggtagtgtccgaggagacctacaggggaggcatggccatcaaccggttcagattggagaatgacctggaagagctcgccctgtatcagattcagctgctcaaggatctcagacatactgagaacgaggaggacaaagttagcagcagcagcttcaggcaacgaatgctaggaaacctattgcgcccaccttacgaacgtcctgagctgcccacctgtctgtatgtgattggcctgaccggaatctcaggcagcggaaaatcttccattgcacagaggctgaaagggctcggcgcctttgtgatcgacagtgatcatctcggacatagagcctatgcacccggtgggcctgcctatcagcctgttgttgaagccttcggaacagatattctgcacaaagacggtatcatcaaccgcaaggtgctgggcagcagagtgttcggaaacaagaaacagttgaaaatcctgacagacatcatgtggcccataattgctaaactggccagagaggaaatggatcgggctgtggctgagggcaagcgggtgtgtgttatcgacgcggccgttttgttagaagcaggctggcagaacttggtgcatgaagtgtggaccgcagtgatccctgagacagaggccgtgcgccggattgtggaacgcgacgggttaagcgaggcagccgctcagtccagacttcagtcccagatgagcggtcagcagctggtcgagcagtcgcacgtggtgctgtctactttgtgggaaccgcatataacacagcgtcaggtggagaaagcctgggctcttctacagaaaagaattccaaaaacccatcaggcgcttgactag

SEQ ID NO: 218432 - DNA, 810 bp, Artificial Sequence
  derived and/or modified sequence
atggcaattaaccgctttcgtctcgagaacgatttggaagagctggcattgtatcagattcagttactcaaagacctgcggcacaccgagaacgaggaggataaggtcagctcttccagctttcggcaacggatgcttgggaatctgctgcgacctccctacgaacggccagaactgcctacctgtctgtatgtgatcgggctcaccgggatcagcggcagcggaaagagttccatagctcagcgcctcaaaggcctcggtgctttcgtcatcgactccgatcaccttgggcacagggcctacgcccctggagggcctgcgtatcagccggtggttgaagctttcgggacggatatcctgcacaaggatggtataattaatcgtaaggtgctgggcagtagagtattcggcaataagaaacaattaaagatcttgaccgacatcatgtggccaatcatcgctaagttggcacgcgaagagatggaccgtgctgtagccgaaggtaagcgcgtttgtgtcatagacgctgccgtgttactcgaagccggatggcagaacctggtgcacgaggtgtggacggcggtgatccccgagaccgaggcagtgcgcagaattgttgaacgtgatgggttgagcgaagcggccgcacaaagtagattacagagccaaatgtccggccagcaactcgtggagcagtcccacgtcgtgctgtctacgctgtgggagcctcatatcacgcagaggcaggtggaaaaggcttgggctttgctgcaaaagcgaatcccaaaaacccaccaggcccttgattag

SEQ ID NO: 218433 - DNA, 1695 bp, Artificial Sequence
  derived and/or modified sequence
atggctgtgttccgcagcggcctgctggtgctgaccacccccctggccagcctggccccccggctggccagcatcctgaccagcgctgcccggctggtgaaccacaccctgtatgtgcacctgcagcccggcatgagcctggagggccctgcccagccccagagcagccctgtgcaggccacctttgaggtgctggacttcatcacccacctgtatgctggagcagatgtgcaccgccacctggatgtgcgcatcctgctgaccaacatccgcaccaagagcaccttcctgccccccctgcccacctctgtgcagaacctggcccaccccccagaggtggtgctgacagacttccagaccctggatggcagccagtacaaccctgtgaagcagcagctggtgcgctatgccaccagctgctacagctgctgcccccggctggcctctgtgctgctgtacagcgactatggcatcggggaggtgcctgtggagcccctggatgtgcccctgcccagcaccatccggcctgccagccctgtggccggcagccccaagcagcctgtgcggggctactacagaggagctgtgggcggcacctttgaccggctgcacaatgcccacaaggtgctgctgtctgtggcctgcatcctggcccaggagcagctggtggtgggcgtggccgacaaggacctgctgaagagcaagctgctgcctgagctgctgcagccctacacagagcgggtggagcacctgtctgagttcctggtggacatcaagcccagcctgacctttgatgtgatccccctgctggacccctacggccctgctggcagtgaccccagcctggagttcctggtggtgtctgaggagacctaccggggcggcatggccatcaaccgcttccggctggagaatgacctggaggagctggccctgtaccagatccagctgctgaaggacctgcggcacacagaaaatgaggaggacaaggtgagcagcagcagcttccggcagaggatgctgggcaacctgctgcggcccccctatgaaagacctgagctgcccacctgcctgtatgtgattggcctgaccggcatcagcggcagcggcaagagcagcatcgcccagaggctgaagggcctgggcgccttcgtcatcgacagcgaccacctgggccaccgggcctatgcccctgggggccctgcctaccagcctgtggtggaggccttcggcacagacatcctgcacaaggatggcatcatcaacaggaaggtgctgggcagccgggtgtttggaaacaagaagcagctgaagatcctgacagacatcatgtggcccatcatcgccaagctggcccgggaggagatggacagagctgtggccgagggcaagagggtgtgtgtgattgatgctgctgtgctgctggaggccggctggcagaacctggtgcatgaggtgtggacagctgtgattcctgagacagaggccgtgcggcgcatcgtggagagagatggcctgtctgaggccgccgcccagagccggctgcagagccagatgagcggccagcagctggtggagcagagccacgtggtgctgagcaccctgtgggagccccacatcacccagaggcaggtggagaaggcctgggccctgctgcagaagaggatccccaagacccaccaggccctggactag

SEQ ID NO: 218434 - DNA, 810 bp, Artificial Sequence
  derived and/or modified sequence
atggccatcaaccgcttccggctggagaatgacctggaggagctggccctgtaccagatccagctgctgaaggacctgcggcacacagaaaatgaggaggacaaggtgagcagcagcagcttccggcagaggatgctgggcaacctgctgcggcccccctatgaaagacctgagctgcccacctgcctgtatgtgattggcctgaccggcatcagcggcagcggcaagagcagcatcgcccagaggctgaagggcctgggcgcctttgtgattgacagcgaccacctgggccaccgggcctatgcccctgggggccctgcctaccagcctgtggtggaggcctttggaacagacatcctgcacaaggatggcatcatcaacaggaaggtgctgggcagccgggtgtttggaaacaagaagcagctgaagatcctgacagacatcatgtggcccatcatcgccaagctggcccgggaggagatggacagagctgtggccgagggcaagagggtgtgtgtgattgatgctgctgtgctgctggaggccggctggcagaacctggtgcatgaggtgtggacagctgtgattcctgagacagaagctgtgagaagaattgtggagagagatggcctgtctgaggccgccgcccagagccggctgcagagccagatgagcggccagcagctggtggagcagagccacgtggtgctgagcaccctgtgggagccccacatcacccagaggcaggtggagaaggcctgggccctgctgcagaagaggatccccaagacccaccaggccctggactag

SEQ ID NO: 218435 - DNA, 1695 bp, Artificial Sequence
  derived and/or modified sequence
atggccgtgttccggagcggcctgctggtgctgaccacccccctggcttccctagccccacgccttgcctctattctgacctcagcagccaggctggtgaaccacaccttgtatgtgcacttgcagcccggcatgtctctagagggccctgctcaaccccagagcagtcctgtgcaggccacattcgaggttcttgactttattacacatctgtacgcaggagcagatgttcatcggcatctggacgtccgcattctcctcacgaatattaggaccaaatccacattcttgcctcccctgcccaccagcgtacagaacttggcacatccaccggaggtagtcctgaccgattttcagaccctggacggctcgcagtataatccagtaaagcaacaattggtacggtacgctacctcctgctattcatgctgcccccgactcgcttctgttctgctgtatagtgactacggaataggagaggtgccagtcgagccgctcgacgtgccgcttccaagcacaatccgacctgcttcccctgtagccggctccccaaaacagcccgtccggggatactacagaggcgccgtgggaggaacctttgacaggctgcataacgcacacaaggtcctgctgagcgtcgcatgtatactggcgcaggaacagctggttgtcggcgtcgcagacaaggatctgttgaagagtaagttgctgcctgagctgttacaaccttacaccgaacgagtcgaacatttgtctgaattcctggtggacatcaagccctccctgacttttgatgtcatccctcttttggacccttacggaccagctggatcagacccctcgctggaatttttggtggtgagtgaggaaacctatcgtggtggaatggccatcaatcgattccgccttgaaaatgacttggaggagctggcattgtaccagatacagttattaaaagacctgcggcacacagaaaatgaagaagataaggtttcttcttccagtttccgacaaaggatgctgggaaacctattgagacccccgtatgagagaccagagctccccacatgtctctacgtgatcggcctcacagggatctccggatcaggaaagtccagcatagcacagcggctcaagggtctcggagcattcgtgatagattctgaccacttgggacacagggcctatgccccaggtggtccggcttatcagccagtagtcgaggccttcggtacggacattctgcataaggacggtataattaatcgcaaagtgcttggcagcagggtgtttggaaacaagaaacagctgaaaattctcaccgacatcatgtggccaatcattgccaagctagcgagagaggaaatggatagggcagtggccgagggcaaaagggtgtgcgtgatcgacgccgcagtcctgctcgaggcgggatggcagaatctcgtccatgaagtgtggactgccgtgatacctgagacggaggcagtaagacggatcgtggaaagagacggcttgtccgaggccgccgcgcaaagccgcctgcagagtcaaatgtccggtcagcagctagtcgaacagtcccacgtggttctaagcaccctctgggagccacatataacacagcgacaggtggagaaagcatgggccctgctccagaagagaatacccaagactcatcaagcactggactag

SEQ ID NO: 218436 - DNA, 1695 bp, Artificial Sequence
  derived and/or modified sequence
atggccgtgttccggagcggcctgctggtgctgaccacccccctggcctcactcgccccaaggttggctagcatcctgacctcggccgcgaggctggtgaatcacacgctgtacgttcatctccaaccaggtatgtctcttgagggccctgcacagccccagtcatctccagtgcaggccacattcgaggtgctcgacttcatcacgcatctctatgccggtgctgacgttcatcggcatctcgatgttcggattcttctgactaatattaggaccaagagtacctttcttcctccactgccgacctctgtacagaacctcgcacaccctcccgaggtggtgctgaccgatttccaaactttggatggaagccaatacaatccagtaaagcagcaactggtccgctacgccacctcttgttactcctgttgtccacgcctcgccagtgtcctgctgtatagcgattatggaataggagaggtgcctgttgaacctctcgatgtgcctctcccatccactattagaccagcttctccagtggctggctctccgaagcagcccgtgagaggctactacaggggagctgtagggggaactttcgatcgcctccataatgcacacaaagtgctactgtctgtcgcatgtattctggcacaggagcagcttgtcgttggtgtggccgataaagatcttctgaaatccaagttgttacccgaactgttacaaccttatactgagcgcgtggaacacctttcagagttcctagtcgatattaagcccagcctcaccttcgacgttatcccgctgctggatccctacggacccgccggaagtgacccttctctcgaatttctggtggtttccgaggaaacttatagagggggcatggctattaacagatttagactggagaacgacttagaggagttggctttgtaccaaatccagttactcaaagatttacgacatactgagaacgaagaggacaaggtgtcatcatcttcctttcgtcagcgtatgcttggcaacctactcaggcccccttacgaaagacccgagctacccacgtgtttgtacgtgattggactgactggtattagcggatctggaaagagttctattgcacagaggctgaaagggttaggggcctttgtgatagactcagaccacttaggccacagagcttacgcaccaggcgggcccgcgtaccagccagtcgtggaggcatttggaactgacatactgcacaaggatggcattattaacagaaaagtgctgggctcccgagtgttcgggaacaaaaaacagctcaagatcctgaccgatattatgtggcccattatagccaagttggcaagagaggagatggacagggctgtcgctgaaggtaaaagggtgtgcgttatcgatgctgctgtccttctggaggccggatggcagaacctcgtccatgaggtttggacagctgtcatcccagagaccgaagcagtgcgcaggatcgtggagagggacgggctaagcgaagctgcagcccaatctagactgcagagccagatgagcggccagcagctggtggaacagagccacgttgtcctatcgacactctgggagcctcatataactcagagacaggtggagaaggcttgggccctcctccaaaaacggatccctaaaacacaccaggcactggattag

SEQ ID NO: 218437 - DNA, 810 bp, Artificial Sequence
  derived and/or modified sequence
atggccatcaaccggttccggctggagaacgacctggaggagctggctctataccagattcagttgctgaaggatcttcgacacaccgaaaacgaagaggacaaggtgtctagtagctctttcaggcagagaatgctcggcaatctgctccggcccccatatgaaagacccgaattgcctacgtgcctctacgtgatcggcctgactggaatttcgggctccggtaagtcatcaatagcccagcggctcaagggattgggtgcgttcgtcattgactcggatcatctcggccaccgtgcatacgcgccggggggccccgcttaccagccagttgtggaggcctttggaactgatattctccacaaggacggaattattaatcgcaaagtactcgggagccgagtgtttggcaataagaagcagctcaagattctcaccgacatcatgtggcccattatcgccaaactggctcgcgaagaaatggatagagctgtggccgaaggaaaacgtgtgtgcgtcattgatgcggctgtcctactcgaggctggttggcaaaacttagttcacgaggtttggaccgcggtcattcccgaaaccgaagctgtcaggcggatcgtcgagcgagatggcctgagtgaggccgcagcacaatcaagactccagagccagatgtctggccagcagctcgtcgagcagagtcacgtggtgctttctacgctttgggagccacacatcactcagcgccaggtggaaaaggcgtgggccttactacaaaagagaatccccaaaacacatcaggctctggactag

SEQ ID NO: 218438 - DNA, 1695 bp, Artificial Sequence
  derived and/or modified sequence
atggccgtttttaggtctggcttattagtacttactacaccacttgccagccttgcgcctcgactcgccagcatcctgacatctgccgctaggctcgtgaatcacacactgtatgtgcatctccagcccggaatgtctctagaagggcctgcccagcctcagtcttcccctgtccaggctactttcgaagttctcgacttcattacccacttgtacgccggagctgacgttcataggcacctggatgtgcggatattgctgaccaacatcagaactaagagcaccttccttccacccctgcctacaagcgtccaaaatctggctcacccgcctgaggttgtgttgaccgactttcagacccttgacggatcccagtacaaccctgtaaaacagcagttggtacgctacgctacctcttgctacagctgttgtcctcggctggcgtctgtcctgttatactctgactacgggatcggcgaggtcccagtagagccccttgacgtccccctgccaagtaccatcagaccagccagtccggtggcgggatcccctaaacagccggttcgcggatattaccgaggagcagttggtggaacgtttgaccgcctgcataacgcccataaggtgcttctttctgtggcttgtatcctggcccaggaacaactggtggtaggagtggccgacaaagatctgcttaagtccaagcttctccccgaactgctgcagccttacacagagagggtggagcacttaagcgagttccttgtggacatcaagccctccctgaccttcgacgttatccctcttctggacccctacgggccagcaggcagcgacccatcactcgagttcttggtggtgagcgaggaaacttatcgtggaggcatggccattaacagattccgtctcgagaatgacctagaagagctagccctgtaccaaatccagttgctgaaagacctgcgtcatacggaaaacgaagaagataaagtgtcatcctcatcgtttaggcagaggatgctgggcaatctcctgcgacctccttacgagcgtccggagcttcccacctgtttatacgtaattggtcttactggcatttccggctccgggaagagctcaattgctcagcgcctaaaaggcctgggggcttttgtcattgactccgaccatttgggccaccgggcttacgctcccggagggccagcctaccagcctgttgtggaagctttcggtactgatatcctacataaggacgggattattaacagaaaggtcctgggaagccgggttttcggaaacaagaagcagctgaagattttgaccgacattatgtggcctatcattgccaagctggcccgagaggaaatggaccgcgctgtggccgaggggaaacgggtgtgcgtcatcgacgctgctgtccttctcgaagcaggctggcagaacctggtgcatgaggtttggaccgcagttataccggagactgaagcagtgaggcgcatcgtcgaacgggatggactgtctgaggctgccgctcaatctcgcttacagtcacaaatgtccgggcaacaactcgttgagcaaagtcacgtggtactctccactctctgggaacctcatataacccagagacaggtggagaaagcctgggcgctactacaaaaaaggatccccaagacccaccaggctctggattag

SEQ ID NO: 218439 - DNA, 1695 bp, Artificial Sequence
  derived and/or modified sequence
atggctgtatttagatctggactgctcgtcctcaccactcctttagcttctctggctcctcgactagcctccattttaacatctgcagctcgcctggtgaatcacacactgtacgtgcacctgcagccaggaatgtcgctagaagggccagcccaaccgcaatcatctcctgtacaagccacctttgaagtgctcgatttcatcacgcacctgtacgccggagctgacgtgcaccgtcatctggatgtgcgcatcttgctgacaaacattcgtactaagagcactttcttgcccccacttcccacctccgtgcaaaatctagctcaccctcccgaggtggtgttgacggattttcagacactcgacgggagccagtataaccccgtcaaacaacagctcgtccgatacgcaactagttgttattcttgttgtcccaggctagcttcagttctgctgtattcagattacggcatcggggaggtgcccgtggagcctctggatgtacctttaccgagtacgatcagacctgccagtcctgttgctggctcccctaagcaacccgtgaggggatattacaggggggctgtaggcggaacctttgaccgcctccataatgcccacaaggtcctgctgtcagtggcttgtattctcgcacaggagcaacttgtagtcggcgtggctgacaaggaccttctgaaatctaaattattaccggaattactgcaaccatataccgagcgtgtcgaacatctgagtgaattcctcgttgacattaagccgtccctgacctttgatgtgatcccacttctggatccttacggcccagctggatcggacccatccctagagtttctcgtggtgagcgaggaaacttatcgcggtggaatggcaatcaacaggtttcgcctagaaaacgatcttgaggagttagcgctttaccagatacagctgctcaaagacctgagacacactgagaacgaagaggataaggtctcatcttccagcttcagacaacgaatgctggggaacctcctgcgccctccatacgagaggcctgagctacctacgtgtctgtatgtcataggcctgactggaattagcggcagcggaaagtcttctatcgcccagagactgaagggcctgggagcatttgttatcgactcagatcatctgggccatcgggcttacgcccctgggggtcctgcctaccaaccagtcgtagaagccttcggtaccgatattctgcacaaggatgggattataaataggaaagtcctcgggtcacgggtgttcggcaacaagaagcaattaaaaatcttgactgacatcatgtggcccatcatcgctaaactggcgagagaggaaatggacagggcagtcgccgaaggcaagagggtttgtgtcattgacgccgctgtgttacttgaggccggttggcagaaccttgtgcacgaggtgtggaccgctgttatccccgagaccgaggctgtgaggcgcattgttgaacgagatgggctgtctgaggctgctgcccagtcacggcttcaatcacagatgtctggacagcagctggtcgaacaatcacacgtcgtgttgtcaaccttgtgggaacctcacatcacacagagacaagtggagaaagcctgggccctcctccagaaacgaattccgaagacacatcaagcccttgattag

SEQ ID NO: 218440 - DNA, 810 bp, Artificial Sequence
  derived and/or modified sequence
atggccatcaatcgttttcgactggagaacgatctggaggaattagctctgtaccagattcagctgcttaaagacctgcggcatacagagaatgaggaagacaaggtatcctcatcatcgttccggcagaggatgttagggaacctgcttcgccctccctacgagaggcctgaattgccaacctgtctttatgttattggcctgaccggtatctctggctccggaaagagtagcattgctcagaggctgaagggtctgggcgctttcgtgatcgattctgaccacctcggccatcgtgcttatgctcccggtggcccagcctatcagcctgtggtcgaagcattcgggacggacatcctccacaaggacggaataatcaacagaaaggtcctgggatcacgagtcttcggaaacaagaaacagctcaaaatcctgacagatattatgtggccaatcatagccaagttggccagggaggagatggatcgggcagttgcagaaggaaaacgcgtttgtgttattgatgctgccgtgttactggaagcaggatggcagaatttggttcacgaagtatggacagcggtgatacccgagaccgaagccgtgcgcaggatagtggagcgcgatgggctctcggaagcagcagctcaaagccgccttcagagccagatgtctggtcaacagctcgtggaacagtctcatgtggttctgagtaccctgtgggaaccacacatcacacagcggcaagtggaaaaagcttgggcattattgcaaaaaagaatacctaaaacccaccaggctctggactag

SEQ ID NO: 218441 - DNA, 2553 bp, Artificial Sequence
  derived and/or modified sequence
agaatcccgcgctgaagcgaagtcgagacgtttgaccttcctccgtttccgtagttccgagttgcggtttctccgttagtgcttccgggttgcagccagggaagcctccgcggtggtgcaagtggaacccaagccttgaggtttcagtgagtagggggccgacgtgagctttagcgtccccctttagcctccctcttcgattccttgaagaccctggtgcagcttagcaagagggcccaggatttttggatccccagccctgtgacaagggttcctgtccagtttccccctcccaggatttcgactcagttcagcgaagtcaccgccccgtctgagaaatgaggacaccaaggcttagagcacagccccgaggcgccgtctaccaggccccgtcccctcccccggctcctgtcggtcagcactgaaaccccgtccctgctccaggcctccttctctggggtccaaggtcccatacaggcctctgcctcggccgcaggcccttcagtcaccgtcgcctcgtctccctgactgtccgcaggcctgggcagcatggccgtattccggtcgggtctcctggtgctgacgacgccgctggcctccctagcccctcgcctggcctccatcctgacctcggcggcccggctggtgaatcacacactctatgttcacctgcagccgggcatgagcctggagggcccggctcagccccagtccagccccgtgcaggccacgtttgaggttcttgatttcatcacgcacctctatgctggcgccgacgtccacaggcacttggacgtcagaatcctactgaccaatatccgaaccaagagcacctttctccctcccctgcccacctcagtccagaatctcgcccacccgccagaagtcgtgttgacagatttccagaccctggatggaagccagtacaacccggtcaaacagcagctagtgcgttacgccaccagctgttacagctgttgtccgcgactggcctcggtgctgctatactccgattatgggataggagaagtgcccgtggagcccctggatgtccccttaccctccacgatcaggccagcttcccccgtggccgggtctccaaagcagccggtgcgtggctactaccgtggcgctgtcggtggcacgtttgaccgcctgcacaacgcccacaaggtgttgctcagtgtcgcgtgcatcctggcccaggagcagcttgtggtgggagtagcagacaaagatctgttgaagagcaagttgctccctgagctgctccaaccttatacagaacgtgtggaacatctgagtgaattcctggtggacatcaagccctccttgacttttgatgtcatccccctgctggacccctatgggcccgctggctctgacccctccctggagttcctggtggtcagcgaggagacctatcgtggggggatggccatcaaccgcttccgccttgagaatgacctggaggaacttgctttgtaccagatccagctgctgaaggacctcagacatacagagaatgaagaggacaaagtcagctcctccagcttccgccagcgaatgttggggaacctgcttcggcctccatatgaaaggccagagctccccacatgtctctatgtaattgggctgactggcatcagtggctctgggaagagctcaatagctcagcgactgaagggcctgggggcgtttgtcattgacagtgaccacctgggtcatcgggcctatgccccaggtggccctgcctaccagcctgtggtggaggcctttggaacagatattctccataaagatggcatcatcaacaggaaggtcctaggcagccgggtgtttgggaataagaagcagctgaagatactcacggacattatgtggccaattatcgcaaagctggcccgagaggagatggatcgggctgtggctgagggaaagcgtgtgtgtgtgattgatgccgctgtgttgcttgaagccggctggcagaacctggtccatgaggtgtggactgctgtcatcccagagactgaggctgtaagacgcattgtggagagggatggcctcagtgaagccgcggctcaaagccggctgcagagccagatgagcgggcagcagcttgtggaacagagccacgtggtgctcagcaccttgtgggagccgcatatcacccaacgccaggtggagaaagcctgggccctcttgcagaagcgcattcccaagactcatcaggccctcgactgaaaagttctcagtggggccagactggctcctggagctgacaagcgaccccgtggtgaggagaaatgggggccttgatgctcaccctggttcaggcccagaggtccaagctatactgtgcaggacatggccaggcctggtggacacaggaagcctacccaacacgctggtatttggccaacactgaggatgtggttcatgggggagcagtcccctccccactcttgcccatgggtgactcttacccacagctgactagggccagcgcaaatactggaacctgtaacagaattaaaggtgaatgttctgaga

SEQ ID NO: 218442 - DNA, 2417 bp, Artificial Sequence
  derived and/or modified sequence
agaatcccgcgctgaagcgaagtcgagacgtttgaccttcctccgtttccgtagttccgagttgcggtttctccgttagtgcttccgggttgcagccagggaagcctccgcggtggtgcaagtggaacccaagccttgaggtttcatttccccctcccaggatttcgactcagttcagcgaagtcaccgccccgtctgagaaatgaggacaccaaggcttagagcacagccccgaggcgccgtctaccaggccccgtcccctcccccggctcctgtcggtcagcactgaaaccccgtccctgctccaggcctccttctctggggtccaaggtcccatacaggcctctgcctcggccgcaggcccttcagtcaccgtcgcctcgtctccctgactgtccgcaggcctgggcagcatggccgtattccggtcgggtctcctggtgctgacgacgccgctggcctccctagcccctcgcctggcctccatcctgacctcggcggcccggctggtgaatcacacactctatgttcacctgcagccgggcatgagcctggagggcccggctcagccccagtccagccccgtgcaggccacgtttgaggttcttgatttcatcacgcacctctatgctggcgccgacgtccacaggcacttggacgtcagaatcctactgaccaatatccgaaccaagagcacctttctccctcccctgcccacctcagtccagaatctcgcccacccgccagaagtcgtgttgacagatttccagaccctggatggaagccagtacaacccggtcaaacagcagctagtgcgttacgccaccagctgttacagctgttgtccgcgactggcctcggtgctgctatactccgattatgggataggagaagtgcccgtggagcccctggatgtccccttaccctccacgatcaggccagcttcccccgtggccgggtctccaaagcagccggtgcgtggctactaccgtggcgctgtcggtggcacgtttgaccgcctgcacaacgcccacaaggtgttgctcagtgtcgcgtgcatcctggcccaggagcagcttgtggtgggagtagcagacaaagatctgttgaagagcaagttgctccctgagctgctccaaccttatacagaacgtgtggaacatctgagtgaattcctggtggacatcaagccctccttgacttttgatgtcatccccctgctggacccctatgggcccgctggctctgacccctccctggagttcctggtggtcagcgaggagacctatcgtggggggatggccatcaaccgcttccgccttgagaatgacctggaggaacttgctttgtaccagatccagctgctgaaggacctcagacatacagagaatgaagaggacaaagtcagctcctccagcttccgccagcgaatgttggggaacctgcttcggcctccatatgaaaggccagagctccccacatgtctctatgtaattgggctgactggcatcagtggctctgggaagagctcaatagctcagcgactgaagggcctgggggcgtttgtcattgacagtgaccacctgggtcatcgggcctatgccccaggtggccctgcctaccagcctgtggtggaggcctttggaacagatattctccataaagatggcatcatcaacaggaaggtcctaggcagccgggtgtttgggaataagaagcagctgaagatactcacggacattatgtggccaattatcgcaaagctggcccgagaggagatggatcgggctgtggctgagggaaagcgtgtgtgtgtgattgatgccgctgtgttgcttgaagccggctggcagaacctggtccatgaggtgtggactgctgtcatcccagagactgaggctgtaagacgcattgtggagagggatggcctcagtgaagccgcggctcaaagccggctgcagagccagatgagcgggcagcagcttgtggaacagagccacgtggtgctcagcaccttgtgggagccgcatatcacccaacgccaggtggagaaagcctgggccctcttgcagaagcgcattcccaagactcatcaggccctcgactgaaaagttctcagtggggccagactggctcctggagctgacaagcgaccccgtggtgaggagaaatgggggccttgatgctcaccctggttcaggcccagaggtccaagctatactgtgcaggacatggccaggcctggtggacacaggaagcctacccaacacgctggtatttggccaacactgaggatgtggttcatgggggagcagtcccctccccactcttgcccatgggtgactcttacccacagctgactagggccagcgcaaatactggaacctgtaacagaattaaaggtgaatgttctgaga

SEQ ID NO: 218443 - DNA, 1840 bp, Artificial Sequence
  derived and/or modified sequence
agaatcccgcgctgaagcgaagtcgagacgtttgaccttcctccgtttccgtagttccgagttgcggtttctccgttagtgcttccgggttgcagccagggaagcctccgcggtggtgcaagtggaacccaagccttgaggtttcatccagaatctcgcccacccgccagaagtcgtgttgacagatttccagaccctggatggaagccagtacaacccggtcaaacagcagctagtgcgttacgccaccagctgttacagctgttgtccgcgactggcctcggtgctgctatactccgattatgggataggagaagtgcccgtggagcccctggatgtccccttaccctccacgatcaggccagcttcccccgtggccgggtctccaaagcagccggtgcgtggctactaccgtggcgctgtcggtggcacgtttgaccgcctgcacaacgcccacaaggtgttgctcagtgtcgcgtgcatcctggcccaggagcagcttgtggtgggagtagcagacaaagatctgttgaagagcaagttgctccctgagctgctccaaccttatacagaacgtgtggaacatctgagtgaattcctggtggacatcaagccctccttgacttttgatgtcatccccctgctggacccctatgggcccgctggctctgacccctccctggagttcctggtggtcagcgaggagacctatcgtggggggatggccatcaaccgcttccgccttgagaatgacctggaggaacttgctttgtaccagatccagctgctgaaggacctcagacatacagagaatgaagaggacaaagtcagctcctccagcttccgccagcgaatgttggggaacctgcttcggcctccatatgaaaggccagagctccccacatgtctctatgtaattgggctgactggcatcagtggctctgggaagagctcaatagctcagcgactgaagggcctgggggcgtttgtcattgacagtgaccacctgggtcatcgggcctatgccccaggtggccctgcctaccagcctgtggtggaggcctttggaacagatattctccataaagatggcatcatcaacaggaaggtcctaggcagccgggtgtttgggaataagaagcagctgaagatactcacggacattatgtggccaattatcgcaaagctggcccgagaggagatggatcgggctgtggctgagggaaagcgtgtgtgtgtgattgatgccgctgtgttgcttgaagccggctggcagaacctggtccatgaggtgtggactgctgtcatcccagagactgaggctgtaagacgcattgtggagagggatggcctcagtgaagccgcggctcaaagccggctgcagagccagatgagcgggcagcagcttgtggaacagagccacgtggtgctcagcaccttgtgggagccgcatatcacccaacgccaggtggagaaagcctgggccctcttgcagaagcgcattcccaagactcatcaggccctcgactgaaaagttctcagtggggccagactggctcctggagctgacaagcgaccccgtggtgaggagaaatgggggccttgatgctcaccctggttcaggcccagaggtccaagctatactgtgcaggacatggccaggcctggtggacacaggaagcctacccaacacgctggtatttggccaacactgaggatgtggttcatgggggagcagtcccctccccactcttgcccatgggtgactcttacccacagctgactagggccagcgcaaatactggaacctgtaacagaattaaaggtgaatgttctgaga

SEQ ID NO: 218444 - DNA, 1695 bp, Artificial Sequence
  derived and/or modified sequence
atggccgtgttcagaagcggcctgctggtgctgaccacccccctggccagcctggcccccagactggccagcatcctgaccagcgccgccagactggtgaaccacaccctgtacgtgcacctgcagcccggcatgagcctggagggccccgcccagccccagagcagccccgtgcaggccaccttcgaggtgctggacttcatcacccacctgtacgccggcgccgacgtgcacagacacctggacgtgagaatcctgctgaccaacatcagaaccaagagcaccttcctgccccccctgcccaccagcgtgcagaacctggcccacccccccgaggtggtgctgaccgacttccagaccctggacggcagccagtacaaccccgtgaagcagcagctggtgagatacgccaccagctgctacagctgctgccccagactggccagcgtgctgctgtacagcgactacggcatcggcgaggtgcccgtggagcccctggacgtgcccctgcccagcaccatcagacccgccagccccgtggccggcagccccaagcagcccgtgagaggctactacagaggcgccgtgggcggcaccttcgacagactgcacaacgcccacaaggtgctgctgagcgtggcctgcatcctggcccaggagcagctggtggtgggcgtggccgacaaggacctgctgaagagcaagctgctgcccgagctgctgcagccctacaccgagagagtggagcacctgagcgagttcctggtggacatcaagcccagcctgaccttcgacgtgatccccctgctggacccctacggccccgccggcagcgaccccagcctggagttcctggtggtgagcgaggagacctacagaggcggcatggccatcaacagattcagactggagaacgacctggaggagctggccctgtaccagatccagctgctgaaggacctgagacacaccgagaacgaggaggacaaggtgagcagcagcagcttcagacagagaatgctgggcaacctgctgagacccccctacgagagacccgagctgcccacctgcctgtacgtgatcggcctgaccggcatcagcggcagcggcaagagcagcatcgcccagagactgaagggcctgggcgccttcgtgatcgacagcgaccacctgggccacagagcctacgcccccggcggccccgcctaccagcccgtggtggaggccttcggcaccgacatcctgcacaaggacggcatcatcaacagaaaggtgctgggcagcagagtgttcggcaacaagaagcagctgaagatcctgaccgacatcatgtggcccatcatcgccaagctggccagagaggagatggacagagccgtggccgagggcaagagagtgtgcgtgatcgacgccgccgtgctgctggaggccggctggcagaacctggtgcacgaggtgtggaccgccgtgatccccgagaccgaggccgtgagaagaatcgtggagagagacggcctgagcgaggccgccgcccagagcagactgcagagccagatgagcggccagcagctggtggagcagagccacgtggtgctgagcaccctgtgggagccccacatcacccagagacaggtggagaaggcctgggccctgctgcagaagagaatccccaagacccaccaggccctggactag

SEQ ID NO: 218445 - DNA, 810 bp, Artificial Sequence
  derived and/or modified sequence
atggccatcaacagattcagactggagaacgacctggaggagctggccctgtaccagatccagctgctgaaggacctgagacacaccgagaacgaggaggacaaggtgagcagcagcagcttcagacagagaatgctgggcaacctgctgagacccccctacgagagacccgagctgcccacctgcctgtacgtgatcggcctgaccggcatcagcggcagcggcaagagcagcatcgcccagagactgaagggcctgggcgccttcgtgatcgacagcgaccacctgggccacagagcctacgcccccggcggccccgcctaccagcccgtggtggaggccttcggcaccgacatcctgcacaaggacggcatcatcaacagaaaggtgctgggcagcagagtgttcggcaacaagaagcagctgaagatcctgaccgacatcatgtggcccatcatcgccaagctggccagagaggagatggacagagccgtggccgagggcaagagagtgtgcgtgatcgacgccgccgtgctgctggaggccggctggcagaacctggtgcacgaggtgtggaccgccgtgatccccgagaccgaggccgtgagaagaatcgtggagagagacggcctgagcgaggccgccgcccagagcagactgcagagccagatgagcggccagcagctggtggagcagagccacgtggtgctgagcaccctgtgggagccccacatcacccagagacaggtggagaaggcctgggccctgctgcagaagagaatccccaagacccaccaggccctggactag

SEQ ID NO: 218446 - protein, 1166 aa, Artificial Sequence
  derived and/or modified sequence
MSGRRCAGGGAACASAAAEAVEPAARELFEACRNGDVERVKRLVTPEKVNSRDTAGRKSTPLHFAAGFGRKDVVEYLLQNGANVQARDDGGLIPLHNACSFGHAEVVNLLLRHGADPNARDNWNYTPLHEAAIKGKIDVCIVLLQHGAEPTIRNTDGRTALDLADPSAKAVLTGEYKKDELLESARSGNEEKMMALLTPLNVNCHASDGRKSTPLHLAAGYNRVKIVQLLLQHGADVHAKDKGDLVPLHNACSYGHYEVTELLVKHGACVNAMDLWQFTPLHEAASKNRVEVCSLLLSYGADPTLLNCHNKSAIDLAPTPQLKERLAYEFKGHSLLQAAREADVTRIKKHLSLEMVNFKHPQTHETALHCAAASPYPKRKQICELLLRKGANINEKTKEFLTPLHVASEKAHNDVVEVVVKHEAKVNALDNLGQTSLHRAAYCGHLQTCRLLLSYGCDPNIISLQGFTALQMGNENVQQLLQEGISLGNSEADRQLLEAAKAGDVETVKKLCTVQSVNCRDIEGRQSTPLHFAAGYNRVSVVEYLLQHGADVHAKDKGGLVPLHNACSYGHYEVAELLVKHGAVVNVADLWKFTPLHEAAAKGKYEICKLLLQHGADPTKKNRDGNTPLDLVKDGDTDIQDLLRGDAALLDAAKKGCLARVKKLSSPDNVNCRDTQGRHSTPLHLAAGYNNLEVAEYLLQHGADVNAQDKGGLIPLHNAASYGHVDVAALLIKYNACVNATDKWAFTPLHEAAQKGRTQLCALLLAHGADPTLKNQEGQTPLDLVSADDVSALLTAAMPPSALPSCYKPQVLNGVRSPGATADALSSGPSSPSSLSAASSLDNLSGSFSELSSVVSSSGTEGASSLEKKEVPGVDFSITQFVRNLGLEHLMDIFEREQITLDVLVEMGHKELKEIGINAYGHRHKLIKGVERLISGQQGLNPYLTLNTSGSGTILIDLSPDDKEFQSVEEEMQSTVREHRDGGHAGGIFNRYNILKIQKVCNKKLWERYTHRRKEVSEENHNHANERMLFHGSPFVNAIIHKGFDERHAYIGGMFGAGIYFAENSSKSNQYVYGIGGGTGCPVHKDRSCYICHRQLLFCRVTLGKSFLQFSAMKMAHSPPGHHSVTGRPSVNGLALAEYVIYRGEQAYPEYLITYQIMRPEGMVDG

SEQ ID NO: 218447 - DNA, 3501 bp, Artificial Sequence
  derived and/or modified sequence
atgagcggcagaagatgcgccggcggcggcgccgcctgcgccagcgccgccgccgaggccgtggagcccgccgccagagagctgttcgaggcctgcagaaacggcgacgtggagagagtgaagagactggtgacccccgagaaggtgaacagcagagacaccgccggcagaaagagcacccccctgcacttcgccgccggcttcggcagaaaggacgtggtggagtacctgctgcagaacggcgccaacgtgcaggccagagacgacggcggcctgatccccctgcacaacgcctgcagcttcggccacgccgaggtggtgaacctgctgctgagacacggcgccgaccccaacgccagagacaactggaactacacccccctgcacgaggccgccatcaagggcaagatcgacgtgtgcatcgtgctgctgcagcacggcgccgagcccaccatcagaaacaccgacggcagaaccgccctggacctggccgaccccagcgccaaggccgtgctgaccggcgagtacaagaaggacgagctgctggagagcgccagaagcggcaacgaggagaagatgatggccctgctgacccccctgaacgtgaactgccacgccagcgacggcagaaagagcacccccctgcacctggccgccggctacaacagagtgaagatcgtgcagctgctgctgcagcacggcgccgacgtgcacgccaaggacaagggcgacctggtgcccctgcacaacgcctgcagctacggccactacgaggtgaccgagctgctggtgaagcacggcgcctgcgtgaacgccatggacctgtggcagttcacccccctgcacgaggccgccagcaagaacagagtggaggtgtgcagcctgctgctgagctacggcgccgaccccaccctgctgaactgccacaacaagagcgccatcgacctggcccccaccccccagctgaaggagagactggcctacgagttcaagggccacagcctgctgcaggccgccagagaggccgacgtgaccagaatcaagaagcacctgagcctggagatggtgaacttcaagcacccccagacccacgagaccgccctgcactgcgccgccgccagcccctaccccaagagaaagcagatctgcgagctgctgctgagaaagggcgccaacatcaacgagaagaccaaggagttcctgacccccctgcacgtggccagcgagaaggcccacaacgacgtggtggaggtggtggtgaagcacgaggccaaggtgaacgccctggacaacctgggccagaccagcctgcacagagccgcctactgcggccacctgcagacctgcagactgctgctgagctacggctgcgaccccaacatcatcagcctgcagggcttcaccgccctgcagatgggcaacgagaacgtgcagcagctgctgcaggagggcatcagcctgggcaacagcgaggccgacagacagctgctggaggccgccaaggccggcgacgtggagaccgtgaagaagctgtgcaccgtgcagagcgtgaactgcagagacatcgagggcagacagagcacccccctgcacttcgccgccggctacaacagagtgagcgtggtggagtacctgctgcagcacggcgccgacgtgcacgccaaggacaagggcggcctggtgcccctgcacaacgcctgcagctacggccactacgaggtggccgagctgctggtgaagcacggcgccgtggtgaacgtggccgacctgtggaagttcacccccctgcacgaggccgccgccaagggcaagtacgagatctgcaagctgctgctgcagcacggcgccgaccccaccaagaagaacagagacggcaacacccccctggacctggtgaaggacggcgacaccgacatccaggacctgctgagaggcgacgccgccctgctggacgccgccaagaagggctgcctggccagagtgaagaagctgagcagccccgacaacgtgaactgcagagacacccagggcagacacagcacccccctgcacctggccgccggctacaacaacctggaggtggccgagtacctgctgcagcacggcgccgacgtgaacgcccaggacaagggcggcctgatccccctgcacaacgccgccagctacggccacgtggacgtggccgccctgctgatcaagtacaacgcctgcgtgaacgccaccgacaagtgggccttcacccccctgcacgaggccgcccagaagggcagaacccagctgtgcgccctgctgctggcccacggcgccgaccccaccctgaagaaccaggagggccagacccccctggacctggtgagcgccgacgacgtgagcgccctgctgaccgccgccatgccccccagcgccctgcccagctgctacaagccccaggtgctgaacggcgtgagaagccccggcgccaccgccgacgccctgagcagcggccccagcagccccagcagcctgagcgccgccagcagcctggacaacctgagcggcagcttcagcgagctgagcagcgtggtgagcagcagcggcaccgagggcgccagcagcctggagaagaaggaggtgcccggcgtggacttcagcatcacccagttcgtgagaaacctgggcctggagcacctgatggacatcttcgagagagagcagatcaccctggacgtgctggtggagatgggccacaaggagctgaaggagatcggcatcaacgcctacggccacagacacaagctgatcaagggcgtggagagactgatcagcggccagcagggcctgaacccctacctgaccctgaacaccagcggcagcggcaccatcctgatcgacctgagccccgacgacaaggagttccagagcgtggaggaggagatgcagagcaccgtgagagagcacagagacggcggccacgccggcggcatcttcaacagatacaacatcctgaagatccagaaggtgtgcaacaagaagctgtgggagagatacacccacagaagaaaggaggtgagcgaggagaaccacaaccacgccaacgagagaatgctgttccacggcagccccttcgtgaacgccatcatccacaagggcttcgacgagagacacgcctacatcggcggcatgttcggcgccggcatctacttcgccgagaacagcagcaagagcaaccagtacgtgtacggcatcggcggcggcaccggctgccccgtgcacaaggacagaagctgctacatctgccacagacagctgctgttctgcagagtgaccctgggcaagagcttcctgcagttcagcgccatgaagatggcccacagcccccccggccaccacagcgtgaccggcagacccagcgtgaacggcctggccctggccgagtacgtgatctacagaggcgagcaggcctaccccgagtacctgatcacctaccagatcatgagacccgagggcatggtggacggctag

SEQ ID NO: 218448 - DNA, 3501 bp, Artificial Sequence
  derived and/or modified sequence
atgagtgggcgtaggtgcgctggaggaggcgcagcctgcgctagcgcagccgccgaagcagtggaaccggccgcccgggaattatttgaggcatgcagaaatggtgacgtggagcgggtgaaacgcctggttacaccagagaaagtcaactcgagggacacagcaggtcgaaaatcaacccctctgcacttcgcggctggctttgggagaaaagacgtagtcgaatacctgctccagaacggcgccaacgtacaggccagagacgatggcggcttaataccattacacaacgcttgcagcttcggccacgcggaggtcgtcaaccttttgcttcggcatggcgcggacccaaacgctagagacaactggaactacacacctctccacgaagctgcaatcaagggcaagatagacgtctgcatagtgctgcttcaacacggcgccgaacctacaataagaaacactgacggccgcactgccctagaccttgcagacccctcagccaaggctgttcttaccggggagtataaaaaagatgaactgctggagagtgcccggagcggcaatgaggaaaaaatgatggcactactgactcccctgaacgtcaattgccacgcctctgatgggcgcaagtccacgccactgcacctcgccgccggatataatcgcgtcaagatcgttcagctcctactgcaacacggggctgacgttcatgccaaagataagggcgatcttgtgccacttcacaacgcttgtagttatggacactatgaggttactgaactgctcgttaagcatggcgcatgtgtaaacgctatggatctctggcagttcacgccactccacgaagccgcttccaagaatagggtggaagtgtgctctctcctgttaagttacggcgccgacccgactttgctgaattgtcacaataagtcagccatagacctggccccaactccacagctgaaggaacgtctcgcttatgaattcaaaggtcattctctgcttcaggccgctcgagaagctgacgtcacacgcattaaaaagcacttgtcactcgagatggttaatttcaagcaccctcagacacacgagacggctttgcattgtgccgccgcctccccataccctaagcgtaagcagatatgcgaattacttctgcggaaaggggccaacatcaacgagaagacaaaggagtttctgactcctttgcatgtagcatccgagaaagcccacaacgatgtcgtcgaggtcgtcgttaagcacgaagcaaaagtgaatgctctggacaacctgggtcagacgagcctgcaccgggccgcgtactgcggccatttgcagacctgcagactactcctctcatatggatgcgaccccaacatcatcagcctacaaggcttcacagccctacaaatgggaaatgagaacgtgcagcaactgctgcaagaggggattagtttaggaaattcagaagctgatcgtcagctgctcgaagctgctaaagctggcgacgtcgagacagtgaagaaattatgtacggtgcagtcggtgaattgccgtgacatcgagggccgtcagagtactcctcttcacttcgctgctggatacaatcgggtgtctgtggtggaatacttgctccagcacggggccgatgtccatgccaaggacaaaggcggactggtgccactgcacaacgcttgctcttacggacattatgaggtggcggagttgttggtaaagcacggagccgtggtgaatgtggccgatctgtggaagttcactcccctgcacgaagctgccgcaaaaggcaagtacgagatttgtaaactgcttttgcaacatggcgccgatccaacgaaaaaaaaccgcgacggtaacaccccactcgaccttgtgaaagatggggatactgatatccaggacctgctgcggggggacgccgcattgcttgatgctgccaaaaagggttgcttagctagagtaaagaaattaagtagtccggataatgtgaattgccgggacacacaaggccgacacagtactcccctgcacctagccgctgggtataacaaccttgaagtggctgaatatctcttacagcacggcgccgatgttaacgcccaggacaaaggggggttaattcccttgcataacgcagcaagttacggccatgtggacgtagcagccctgttgatcaagtacaacgcctgtgtgaacgcaacagataagtgggccttcactcctctccatgaggccgcacaaaagggaaggacacaactgtgcgccctgttgcttgcacacggcgctgatccgactttaaaaaaccaggagggccagacccctctagacctagtcagcgctgatgacgtctctgcactcctgaccgccgcaatgcctcctagcgcactcccctcctgctataaacctcaagtcctgaatggagtgagaagcccaggggctaccgccgatgctctaagctccggaccatcgtccccttcctccctgtcagctgcaagttccttagacaacttatctggcagcttttccgagcttagcagtgtggtgtcctcctccgggaccgagggggctagttccttagagaaaaaagaggtgcccggcgtggactttagcattactcaattcgttagaaacttgggcctggagcatctgatggacatcttcgaaagggaacagatcacgttggacgttctcgttgagatgggccataaggaattgaaggagattggcatcaatgcctacggccacagacacaaacttatcaaaggcgtggaacgcctgatttcaggtcaacagggtctcaatccttacctgacccttaatacttctgggtcaggaaccattttgattgacctctcacccgacgacaaggaattccagagcgtggaagaagagatgcaatctaccgtgcgcgaacatagagatggaggacacgccggaggcattttcaacaggtacaatattcttaaaatccagaaggtgtgtaacaaaaagctctgggagcgctacactcacaggaggaaggaggtgtccgaagaaaatcacaatcatgctaatgaacgaatgctcttccacggttccccttttgttaacgccatcatccataagggctttgatgaaaggcacgcctacatcgggggcatgtttggcgcaggtatatatttcgcagagaattcttcaaaatccaaccagtacgtgtacggcattggcggcgggactggctgccccgttcacaaagatagatcatgttacatctgccataggcagcttttgttttgcagggttactctgggaaagtcgttcctgcagttcagcgcgatgaagatggctcacagccctccaggccaccatagtgtgaccggacgtcccagcgtgaacgggctggccctggctgaatatgtgatctatcggggcgaacaagcctaccccgaatacctcattacataccagatcatgaggcctgaaggcatggttgacggctag

SEQ ID NO: 218449 - DNA, 3501 bp, Artificial Sequence
  derived and/or modified sequence
atgagcggccgccgctgtgccggcggcggggccgcctgtgccagcgctgctgctgaggccgtggagcctgctgcccgggagctgtttgaggcctgcagaaatggagatgtggagcgggtgaagaggctggtgaccccagagaaggtgaacagccgggacacagctggcaggaagagcacccccctgcactttgctgctggcttcggcaggaaggatgtggtggagtacctgctgcagaatggagccaacgtgcaggccagagatgatggcggcctcatccccctgcacaatgcctgcagctttggacatgctgaggtggtgaacctgctgctgcggcatggagctgaccccaatgcccgggacaactggaactacacccccctgcatgaagctgccatcaagggcaagattgatgtgtgcatcgtgctgctgcagcacggggctgagcccaccatccggaacacagatggccgcacagccctggacctggccgaccccagcgccaaggctgtgctgactggagagtacaagaaggatgagctgctggagagcgcccggtctggaaatgaggagaagatgatggccctgctgacccccctgaatgtgaactgccacgccagtgatggcaggaagagcacccccctgcacctggccgccggctacaacagagtgaagatcgtgcagctgctgctgcagcacggggctgatgtgcacgccaaggacaagggggacctggtgcccctgcacaatgcctgcagctatggccactatgaggtgacagagctgctggtgaagcacggggcctgtgtgaatgccatggacctgtggcagttcacccccctgcacgaggccgccagcaagaacagagtggaggtgtgcagcctgctgctgtcctatggagctgaccccaccctgctgaactgccacaacaagagcgccatcgacctggcccccaccccccagctgaaggagcggctggcctatgagttcaagggccacagcctgctgcaggccgcccgggaggctgatgtgacccgcatcaagaagcacctgagcctggagatggtgaacttcaagcacccccagacccatgaaacagccctgcactgtgccgccgccagcccctaccccaagaggaagcagatctgtgagctgctgctgaggaaaggagccaacatcaatgagaagaccaaggagttcctgacccccctgcacgtggccagcgagaaggcccacaatgatgtggtggaggtggtggtgaagcatgaggccaaggtgaatgccctggacaacctgggccagaccagcctgcaccgggccgcctactgcggccacctgcagacctgccgcctgctgctgtcctatggctgtgaccccaacatcatcagcctgcagggcttcaccgccctgcagatgggaaatgaaaatgtgcagcagctgctgcaggagggcatcagcctgggcaacagcgaggccgaccggcagctgctggaggccgccaaggctggagatgtggagaccgtgaagaagctgtgcaccgtgcagagcgtgaactgccgggacatcgagggccggcagagcacccccctgcactttgctgctggctacaacagagtgtctgtggtggagtacctgctgcagcacggggctgatgtgcacgccaaggacaagggcggcctggtgcccctgcacaatgcctgcagctatggccactatgaggtggccgagctgctggtgaagcatggagctgtggtgaatgtggccgacctgtggaagttcacccccctgcatgaagctgctgccaagggcaagtatgagatctgcaagctgctgctgcagcacggggctgaccccaccaagaagaacagagatggcaacacccccctggacctggtgaaggatggagacacagacatccaggacctgctgcggggagatgctgccctgctggatgctgccaagaagggctgcctggcccgggtgaagaagctgagcagcccagacaacgtgaactgccgggacacccagggccgccacagcacccccctgcacctggccgccggctacaacaacctggaggtggccgagtacctgctgcagcacggggctgatgtgaatgcccaggacaagggcggcctcatccccctgcacaatgctgccagctatggccacgtggatgtggccgccctgctgatcaagtacaatgcctgtgtgaatgccacagacaagtgggccttcacccccctgcacgaggccgcccagaagggccgcacccagctgtgtgccctgctgctggcccatggagctgaccccaccctgaagaaccaggagggccagacccccctggacctggtgtctgcagatgatgtgtctgccctgctgacagctgccatgcctccttctgccctgcccagctgctacaagccccaggtgctgaatggagtgcgcagccctggggccacagcagatgccctgagcagcggccccagcagccccagcagcctgtctgctgccagcagcctggacaacctgagcggcagcttcagcgagctgagctctgtggtgagcagcagcggcacagagggcgccagcagcctggagaagaaggaggtgcctggggtggacttcagcatcacccagtttgtgaggaacctgggcctggagcacctgatggacatctttgagcgggagcagatcaccctggatgtgctggtggagatgggccacaaggagctgaaggagatcggcatcaatgcctacggccaccgccacaagctgatcaagggcgtggagcggctcatcagcggccagcagggcctgaacccctacctgaccctgaacaccagcggcagcggcaccatcctgattgacctgagcccagatgacaaggagttccagagcgtggaggaggagatgcagagcacagtgcgggagcacagagatggcggccatgctgggggcatcttcaaccgctacaacatcctgaagatccagaaggtgtgcaacaagaagctgtgggagcgctacacccacaggaggaaggaggtgtctgaggagaaccacaaccacgccaatgaaagaatgctgttccacggcagcccctttgtgaatgccatcatccacaagggctttgatgaaagacatgcctacatcggcggcatgtttggagctggcatctactttgctgagaacagcagcaagagcaaccagtatgtgtatggaattggaggcggcaccggctgccctgtgcacaaggacaggagctgctacatctgccaccggcagctgctcttctgccgggtgaccctgggcaagagcttcctgcagttcagcgccatgaagatggcccacagccccccaggccaccacagcgtgacaggccggcccagcgtgaatggcctggccctggccgagtatgtgatctacagaggagagcaggcctacccagagtacctgatcacctaccagatcatgaggcctgagggcatggtggatggatag

SEQ ID NO: 218450 - DNA, 3501 bp, Artificial Sequence
  derived and/or modified sequence
atgagcggccggcggtgcgccggcggcggcgccgcctgcgccagcgctgctgccgaggccgtcgaacccgcggcccgagagttgtttgaggcatgtcgaaacggggacgtggagcgcgtcaaaagactggtcacacctgaaaaggtgaactcaagagatacagctggccggaaatccacaccgctgcattttgccgctggcttcgggcggaaagacgtagtggaatacttactacagaatggtgcaaatgttcaagccagggatgatggtgggctgatccctctgcacaacgcctgcagcttcggacatgccgaggttgtgaatctcctccttcggcatggcgcggatccaaatgcaagggacaattggaactacacacctctgcacgaagcagcaattaaggggaagatcgatgtgtgcattgtcctgctgcagcacggcgctgagccaacaattcggaacacggacgggcgaacggcactcgaccttgcggacccatctgccaaggccgtgttgaccggtgaatacaagaaggacgagctattggagtcagccaggagcggtaacgaagaaaagatgatggcactgttaacccccctaaatgttaattgtcacgcatccgatggccgcaagagtacaccgcttcatctggctgcggggtataaccgcgtcaaaattgtgcaattattactgcagcacggcgctgatgtacatgcaaaagacaagggagacttagtaccgctgcataacgcttgctcctacggacactacgaagtgactgaactgcttgtcaagcatggagcttgtgtgaatgccatggacctctggcagttcacacctttgcatgaggctgcgtccaagaaccgcgtcgaggtctgtagccttctgctaagttacggcgctgatcctaccttgctcaattgccacaacaagagtgctattgatttagctcccactccacagttgaaagagaggttggcctatgagttcaaagggcactccctcctccaggctgccagagaggctgacgtgactcgcataaaaaagcatctcagcctggaaatggtcaactttaaacatcctcagacgcatgaaactgcactgcattgtgccgcagccagtccgtaccctaaaaggaaacaaatatgtgaactgctccttcggaagggtgccaacatcaatgaaaagactaaggagttcctgactcctcttcacgttgcgtcagagaaagcacataacgatgtagtggaggttgtcgtcaagcacgaggccaaggttaatgcacttgataacctgggccaaacaagtttgcatcgcgctgcgtattgtggtcacctccagacctgtagactgctcctcagttatggctgtgatcccaacataattagcctgcaaggtttcaccgccctccagatgggcaatgagaatgttcagcaactgctgcaggaaggaatttccctgggaaattcggaggctgacagacaactgctagaagcagccaaggccggggatgtagaaacagtgaagaagctatgcaccgtgcaatctgtaaattgtcgcgatattgaggggagacaaagcacaccacttcactttgctgccggctataatcgcgtcagcgtcgtggagtatttgctgcagcacggtgctgatgtgcatgccaaagataagggagggttagtgccccttcataacgcttgttcttatggccattacgaagtggccgaactgctggttaagcatggtgcggtggtaaatgtcgccgatttatggaaattcacaccactacacgaggcagctgcaaaaggcaagtacgaaatctgcaagctgcttctgcaacacggcgcggatcccacaaagaagaacagggatggaaatacgcccctggatttggtcaaggacggcgatacagacatccaggatctgcttcgaggtgacgcagcactcctggacgctgctaagaagggctgtctggctcgggtcaaaaagctatcctcaccagacaatgtcaactgtcgagacactcagggtcgacactccacgccacttcacctcgccgccggctacaataacctggaggttgccgaatatctactacaacacggtgcagatgtgaatgctcaggataaaggaggtctgatccctttgcataatgcagcctcttatggtcatgtggacgttgctgctctgctcattaagtataatgcgtgtgtcaatgccaccgataaatgggcctttacgcccctgcacgaagcagcccagaaagggcgaactcagctgtgtgctctgctgctggctcacggcgctgaccccacactgaagaatcaagagggacagacccctttagatttggtgagcgctgacgacgtatcagcactactgacggcagcaatgcccccttctgcgttgccctcgtgctacaaaccacaggtgcttaatggcgtccgttctccaggcgccactgctgatgccctgtccagcggcccatcctcaccctcatcactctccgctgcatccagtctggataacctgagcggcagcttctctgagctttctagtgttgtgagttctagcgggacagaaggtgcttcttcgttagaaaagaaggaagtccctggggtcgacttcagcattacccagttcgttaggaatctcggtttagagcacctgatggacatatttgagagggagcagataaccctcgatgtccttgtggaaatggggcacaaagaacttaaggagataggaattaacgcctacggccacagacacaaactgatcaagggggtggaacgattgattagtggtcagcagggacttaacccttacctgacacttaacacctcaggttcaggcaccattttgatcgatctgagtcccgatgacaaggagtttcagtctgtcgaagaggagatgcaatctactgtgcgggagcatcgggacggcggccacgcaggcgggatttttaacagatataacattctgaaaatacagaaagtgtgcaataagaaactctgggagagatacactcacaggcggaaggaggtgtctgaagagaatcacaatcacgccaatgagagaatgctgttccacggctcacccttcgtcaacgccattattcataaggggttcgatgaaagacacgcatatatcggtgggatgtttggcgctggcatctatttcgccgaaaacagcagtaaaagtaaccagtatgtctatggcatcggaggagggacaggatgccccgtgcacaaagacagatcctgttacatctgccaccggcaactcttattctgtcgtgtaacattaggaaaatcttttcttcagttcagcgccatgaagatggcacatagcccaccaggtcatcactctgtgacaggcagaccatccgtgaacgggctggctctcgccgagtatgttatctatcggggagaacaggcctaccccgaatatctaattacctaccaaattatgagaccggaggggatggtcgacggctag

SEQ ID NO: 218451 - DNA, 3501 bp, Artificial Sequence
  derived and/or modified sequence
atgtctggcagacgatgcgcgggtggaggggctgcctgcgcgagcgccgctgcagaggccgtggagcccgcagctagggaattattcgaggcgtgccgaaatggggacgtggagcgggtgaagcggctggtcactccagaaaaggtcaactcacgagacaccgctggcaggaaaagcacacccctgcactttgccgcaggatttggcaggaaggacgtggtggagtacctgctgcagaatggggcaaacgttcaagcgagggatgacgggggtctaatccctttgcacaacgcttgtagtttcggtcatgccgaggtggttaacctgctgttacggcatggtgccgacccaaacgccagagacaattggaattatacccctctccatgaagctgctatcaagggtaaaatcgatgtgtgtatcgtccttctccagcacggcgcagagcctaccatccggaacaccgatggtaggacggctctggacttggctgatccctccgcgaaggcagttttgaccggggagtacaaaaaagatgagctactggagtcagcccgttcaggcaatgaagaaaagatgatggcgctgctgaccccattgaatgtgaactgtcacgcctctgacggaaggaagagcacacctcttcacctcgctgcaggttataaccgcgttaagatcgtgcaactgctgttgcagcatggagcagacgtgcatgctaaagacaaaggcgacctcgtgccgctgcacaacgcatgcagttatggccactacgaggtgaccgaattgctggttaaacacggagcatgcgtgaatgctatggacctgtggcaattcactccccttcacgaggccgcaagtaagaatagagtggaggtttgcagcctcctgttgagctatggggctgacccaacgttactgaattgtcacaacaagtctgccattgatctggctcctactccgcaactcaaagaacggctggcctacgagttcaagggccatagcctcctccaggccgcacgggaagcagatgtgacccgtatcaagaagcacctgtccttggaaatggtgaattttaaacacccacagactcatgagacagctctacactgcgcggctgccagcccttatccaaagcgcaagcagatttgcgaactgctgttaagaaagggggcaaatataaacgaaaaaacgaaggaatttcttacgcctttgcatgtggcaagtgagaaggcccacaatgacgtggtagaagtggtggttaagcatgaagctaaagtgaatgccttggataacctaggccagacctccctacacagggcggcttactgcggccaccttcagacttgcagactgctgttgtcgtatgggtgtgaccccaatatcatatcactgcaggggtttaccgccctccagatggggaatgagaacgtgcagcaactgctccaggaggggatcagcttgggtaattctgaggctgatcgacagctcctcgaggcggctaaggccggagatgtcgagacagtgaagaaactctgcacagtacagtcggtgaattgcagagacatcgaaggtaggcaatccacgcccctgcatttcgccgcagggtacaatagggtgagcgtagttgagtacttactgcagcatggagcagacgtgcatgccaaggataaagggggactggtgcccttacataacgcttgtagctacgggcactatgaggtggccgaactgctggtgaaacacggcgcagtggtgaatgtggctgacctgtggaagtttaccccactgcatgaggccgctgcgaagggcaagtacgagatttgcaagcttttgcttcaacacggagctgaccccactaaaaagaaccgtgatggcaacactcctctcgatctcgtaaaagatggtgatactgacatacaagacctgctgaggggggacgccgctttgttggatgcagcgaagaagggttgtcttgcgagggtaaaaaaactctcatcccctgacaatgtgaattgtcgcgatacgcagggacgacactccacccctttgcacttggccgcaggttataataacttggaggtagcagaatatcttcttcaacatggagcggacgtcaatgcccaagacaagggagggctaattcctctgcacaatgcggcttcctacggccatgtcgacgtcgccgctctgctgatcaaatacaatgcatgcgttaatgctaccgataagtgggcgttcaccccgctgcacgaggcagcgcagaagggcagaacacagctgtgcgccctcctgcttgcacacggggcagatcctactctgaagaatcaggagggacagacacctctagacctagttagcgcagatgacgtgtctgcgttactaaccgcagcgatgccaccgagcgctctgccttcttgctataaacctcaggtactgaacggagtgcgctccccgggtgctaccgcagatgctctatcttctggacccagttctccatcatctctttcagctgcctcttctttggacaacttatcaggcagtttctccgaattgtcatcggtcgtcagcagctctggcaccgaaggcgcttcttcactagagaagaaggaggtccccggtgtcgacttttcaattactcagttcgtgcggaacctgggactggaacatctgatggacatctttgaacgggagcagatcactctggacgtactggtggagatgggacataaagaactgaaggagatcggcattaacgcctatggacacaggcacaaactcattaaaggagtggagaggttgattagcggccaacagggactcaatccatacttgaccttaaatacgtcagggagcggcactatcctgatcgatctatcccccgacgataaggaattccaatccgttgaggaagaaatgcaatctacagttcgagagcaccgtgatgggggacacgcaggcggaatatttaaccggtataatattctcaagatccagaaggtatgtaacaagaagctgtgggaacggtacacacacagacggaaagaggtgtcagaggagaaccacaaccacgcaaatgagaggatgttattccatgggagtcctttcgtgaatgccatcatccacaagggcttcgatgagcgccacgcttacattggtggcatgttcggagctggcatctacttcgcagaaaattcctctaagtctaaccaatatgtttacgggattggagggggaaccggatgcccagttcataaagataggtcttgttacatctgccacagacaactccttttctgcagagtcaccctggggaagagtttccttcaattctccgctatgaagatggcccacagcccaccgggtcaccattctgtgaccggccgaccatcggtgaatgggcttgcgctggccgagtacgtgatctacaggggtgaacaggcctatcccgagtatctgattacctaccagataatgcgtccagagggcatggtggatggctag

SEQ ID NO: 218452 - DNA, 6157 bp, Artificial Sequence
  derived and/or modified sequence
cgcgccgcctcgctagccgaaacctgcccagccggtgcccggccactgcgcacgcgcgggacgacgtcacgtgcgctcccggggctggacggagctggcaggaggggccttgccagcttccgccgccgcgtcgtttcaggacccggacggcggattcgcgctgcctccgccgccgcggggcagccggggggcagggagcccagcgaggggcgcgcgtgggcgcggccatgggactgcgccggatccggtgacagcagggagccaagcggcccgggccctgagcgcgtcttctccggggggcctcgccctcctgctcgcggggccggggctcctgctccggttgctggcgctgttgctggctgtggcggcggccaggatcatgtcgggtcgccgctgcgccggcgggggagcggcctgcgcgagcgccgcggccgaggccgtggagccggccgcccgagagctgttcgaggcgtgccgcaacggggacgtggaacgagtcaagaggctggtgacgcctgagaaggtgaacagccgcgacacggcgggcaggaaatccaccccgctgcacttcgccgcaggttttgggcggaaagacgtagttgaatatttgcttcagaatggtgcaaatgtccaagcacgtgatgatgggggccttattcctcttcataatgcatgctcttttggtcatgctgaagtagtcaatctccttttgcgacatggtgcagaccccaatgctcgagataattggaattatactcctctccatgaagctgcaattaaaggaaagattgatgtttgcattgtgctgttacagcatggagctgagccaaccatccgaaatacagatggaaggacagcattggatttagcagatccatctgccaaagcagtgcttactggtgaatataagaaagatgaactcttagaaagtgccaggagtggcaatgaagaaaaaatgatggctctactcacaccattaaatgtcaactgccacgcaagtgatggcagaaagtcaactccattacatttggcagcaggatataacagagtaaagattgtacagctgttactgcaacatggagctgatgtccatgctaaagataaaggtgatctggtaccattacacaatgcctgttcttatggtcattatgaagtaactgaacttttggtcaagcatggtgcctgtgtaaatgcaatggacttgtggcaattcactcctcttcatgaggcagcttctaagaacagggttgaagtatgttctcttctcttaagttatggtgcagacccaacactgctcaattgtcacaataaaagtgctatagacttggctcccacaccacagttaaaagaaagattagcatatgaatttaaaggccactcgttgctgcaagctgcacgagaagctgatgttactcgaatcaaaaaacatctctctctggaaatggtgaatttcaagcatcctcaaacacatgaaacagcattgcattgtgctgctgcatctccatatcccaaaagaaagcaaatatgtgaactgttgctaagaaaaggagcaaacatcaatgaaaagactaaagaattcttgactcctctgcacgtggcatctgagaaagctcataatgatgttgttgaagtagtggtgaaacatgaagcaaaggttaatgctctggataatcttggtcagacttctctacacagagctgcatattgtggtcatctacaaacctgccgcctactcctgagctatgggtgtgatcctaacattatatcccttcagggctttactgctttacagatgggaaatgaaaatgtacagcaactcctccaagagggtatctcattaggtaattcagaggcagacagacaattgctggaagctgcaaaggctggagatgtcgaaactgtaaaaaaactgtgtactgttcagagtgtcaactgcagagacattgaagggcgtcagtctacaccacttcattttgcagctgggtataacagagtgtccgtggtggaatatctgctacagcatggagctgatgtgcatgctaaagataaaggaggccttgtacctttgcacaatgcatgttcttatggacattatgaagttgcagaacttcttgttaaacatggagcagtagttaatgtagctgatttatggaaatttacacctttacatgaagcagcagcaaaaggaaaatatgaaatttgcaaacttctgctccagcatggtgcagaccctacaaaaaaaaacagggatggaaatactcctttggatcttgttaaagatggagatacagatattcaagatctgcttaggggagatgcagctttgctagatgctgccaagaagggttgtttagccagagtgaagaagttgtcttctcctgataatgtaaattgccgcgatacccaaggcagacattcaacacctttacatttagcagctggttataataatttagaagttgcagagtatttgttacaacacggagctgatgtgaatgcccaagacaaaggaggacttattcctttacataatgcagcatcttacgggcatgtagatgtagcagctctactaataaagtataatgcatgtgtcaatgccacggacaaatgggctttcacacctttgcacgaagcagcccaaaagggacgaacacagctttgtgctttgttgctagcccatggagctgacccgactcttaaaaatcaggaaggacaaacacctttagatttagtttcagcggatgatgtcagcgctcttctgacagcagccatgcccccatctgctctgccctcttgttacaagcctcaagtgctcaatggtgtgagaagcccaggagccactgcagatgctctctcttcaggtccatctagcccatcaagcctttctgcagccagcagtcttgacaacttatctgggagtttttcagaactgtcttcagtagttagttcaagtggaacagagggtgcttccagtttggagaaaaaggaggttccaggagtagattttagcataactcaattcgtaaggaatcttggacttgagcacctaatggatatatttgagagagaacagatcactttggatgtattagttgagatggggcacaaggagctgaaggagattggaatcaatgcttatggacataggcacaaactaattaaaggagtcgagagacttatctccggacaacaaggtcttaacccatatttaactttgaacacctctggtagtggaacaattcttatagatctgtctcctgatgataaagagtttcagtctgtggaggaagagatgcaaagtacagttcgagagcacagagatggaggtcatgcaggtggaatcttcaacagatacaatattctcaagattcagaaggtttgtaacaagaaactatgggaaagatacactcaccggagaaaagaagtttctgaagaaaaccacaaccatgccaatgaacgaatgctatttcatgggtctccttttgtgaatgcaattatccacaaaggctttgatgaaaggcatgcgtacataggtggtatgtttggagctggcatttattttgctgaaaactcttccaaaagcaatcaatatgtatatggaattggaggaggtactgggtgtccagttcacaaagacagatcttgttacatttgccacaggcagctgctcttttgccgggtaaccttgggaaagtctttcctgcagttcagtgcaatgaaaatggcacattctcctccaggtcatcactcagtcactggtaggcccagtgtaaatggcctagcattagctgaatatgttatttacagaggagaacaggcttatcctgagtatttaattacttaccagattatgaggcctgaaggtatggtcgatggataaatagttattttaagaaactaattccactgaacctaaaatcatcaaagcagcagtggcctctacgttttactcctttgctgaaaaaaaatcatcttgcccacaggcctgtggcaaaaggataaaaatgtgaacgaagtttaacattctgacttgataaagctttaataatgtacagtgttttctaaatatttcctgttttttcagcactttaacagatgccattccaggttaaactgggttgtctgtactaaattataaacagagttaacttgaaccttttatatgttatgcattgattctaacaaactgtaatgccctcaacagaactaattttactaatacaatactgtgttctttaaaacacagcatttacactgaatacaatttcatttgtaaaactgtaaataagagcttttgtactagcccagtatttatttacattgctttgtaatataaatctgttttagaactgcagcggtttacaaaattttttcatatgtattgttcatctatacttcatcttacatcgtcatgattgagtgatctttacatttgattccagaggctatgttcagttgttagttgggaaagattgagttatcagatttaatttgccgatgggagcctttatctgtcattagaaatctttctcatttaagaacttatgaatatgctgaagatttaatttgtgatacctttgtatgtatgagacacattccaaagagctctaactatgataggtcctgattactaaagaagcttctttactggcctcaatttctagctttcatgttggaaaattttctgcagtccttctgtgaaaattagagcaaagtgctcctgttttttagagaaactaaatcttgctgttgaacaattattgtgttcttttcatggaacataagtaggatgttacatttccagggtgggaagggtaatcctaaatcatttcccaatctattctaattaccttaaatctaaaggggaaaaaaaaaatcacaaacaggactgggtagttttttatcctaagtatattttttcctgttctttttacttggttttattgctgtatttatagccaatctatacatcatgggtaaacttaacccagaactataaaatgtagttgtctcagtcccctccaggcctcctgaatgggcaagtgcagtgaaacaggtgcttcttgctcctgggttttctctccatgatgttatgcccaattggaaatatgctgtcagtttgtgcaccatatggtgaccacgcctgtgctcagtttggcagctatagaaggaaatgctgtcccataaaatgccattcctattttctaatataaaactcttttccaggaagcatgcttaagcatcttgttacagagacatacatccattatggcttggcaatctcttttatttgttgactctagctcccttcaaagtcgaggaaagatctttactcacttaatgaggacattccccatcactgtctgtaccagttcacctttattttacgttttattcagtctgtaaattaactggccctttgcagtaacttgtacataaagtgctagaaaatcatgttccttgtcctgagtaagagttaatcagagtaaatgcatttctggagttgtttctgtgatgtaaattatgatcattatttaagaagtcaaatcctgatcttgaagtgctttttatacagctctctaataattacaaatatccgaaagtcatttcttggaacacaagtggagtatgccaaattttatatgaatttttcagattatctaagcttccaggttttataattagaagataatgagagaattaatggggtttatatttacattatctctcaactatgtagcccatattactcaccctatgagtgaatctggaattgcttttcatgtgaaatcattgtggtctatgagtttacaatactgcaaactgtgttattttatctaatccattgcttaatgagtgtgtttttccatgaatgaatataccgtggttcatatgttagcatggcagcattttcagatagctttttgtttgttgggaagttggggttttggggggagggggagtattagtacgttgcatgaaatagcttactttataatgatggaattgctttttcttttgtcttgtgatttttttttttgaagtgaaatttaactttttgtgcaagtagtactattatacccatcttcagtgtcttacttgtactgtatcacattccataccctcatttaattcttaataaaactgttcacttgtt

SEQ ID NO: 218453 - protein, 420 aa, Artificial Sequence
  derived and/or modified sequence
MWWRDLTRLRLWLKREAIPGEGRKAAKVNAGVGEKGIYTASSRGGPPSARSKAVTVVAEGAASRSWLSMDAPELGPGLVERLEQLATCPLCGGSFEDPVLLACEHSFCRACLARRWGTPPATGTEASPTACPCCGLPCPRRSLRSNVRLAVEVRISRELREKLAEPGARAGRRRGGRIPTMGCLDLPGEDMRKTWRRFEVPTSKSSNSEDDLPEDYPVVKKMLHRLTADLTLDPGTAHRRLLISADRRSVQLAPPGTPAPPDGPKRFDQLPAVLGAQGFGAGRHCWEVETADAASCRDSSGEDADDEESHYAVGAAGESVQRKGCVRLCPAGAVWAVEGRGGRLWALTAPEPTLLGGVEPPPRRIRVDLDWERGRVAFYDGRSLDLLYAFQAPGPLGERIFPLFCTCDPRAPLRIVPAES

SEQ ID NO: 218454 - protein, 420 aa, Artificial Sequence
  derived and/or modified sequence
MWWRDLTRLRLWLKREAIPGEGRKAAKVNAGVGEKGIYTASSRGGPPSARSKAVTVVAEGAASRSWLSMDAPELGPGLVERLEQLATCPLCGGSFEDPVLLACEHSFCRACLARRWGTPPATGTEASPTACPCCGLPCPRRSLRSNVRLAVEVRISRELREKLAEPGARAGRRRGGRIPTMGCLDLPGEDMRKTWRRFEVPTPKSSNSEDDLPEDYPVVKKMLHRLTADLTLDPGTAHRRLLISTDRRSVQLAPPGTPAPPDGPKRFDQLPAVLGAQGFGAGRHCWEVETADAASCRDSSGEDEDDEESHYAVGAAGESVQRKGCVRLCPAGAVWAVEGRGGRLWALTAPEPTLLGGVEPPPRRIRVDLDWERGRVAFYDGRSLDLLYAFQAPGPLGERIFPLFCTCDPRAPLRIVPAES

SEQ ID NO: 218455 - protein, 420 aa, Artificial Sequence
  derived and/or modified sequence
MWWRDLTRLRLWLKREAIPGEGRKAAKVNAGVGEKGIYTASSRGGPPSARSKAVTVVAEGAASRSWLSMDAPELGPGLVERLEQLATCPLCGGSFEDPVLLACEHSFCRACLARRWGTPPATGTEASPTACPCCGLPCPRRSLRSNVRLAVEVRISRELREKLAEPGARAGRRRGGRIPTMGCLDLPGEDMRKTWRRFEVPTSKSSNSEDDLPEDYPVVKKMLHRLTADLTLDPGTAHRRLLISADRRSVQLAPPGTPAPPDGPKRFDQLPAVLGAQGFGAGRHCWEVETADAASCRDSSGEDADDEESHYAVGAAGESVQRKGCVRLCPAGAVWAVGGRGGRLWALTAPEPTLLGGVEPPPRRIRVDLDWERGRVAFYDGRSLDLLYAFQAPGPLGERIFPLFCTCDPRAPLRIVPAES

SEQ ID NO: 218456 - protein, 420 aa, Artificial Sequence
  derived and/or modified sequence
MWWRDLTRLRLWLKREAIPGEGRKAAKVNAGVGEKGIYTASSRGGPPSARSKAVTVVAEGAASRSWLSMDAPELGPGLVERLEQLATCPLCGGSFEDPVLLACEHSFCRACLARRWGTPPATGTEASPTACPCCGLPCPRRSLRSNVRLAVEVRISRELREKLAEPGARAGRRRGGRIPTMGCLDLPGEDMRKTWRRFEVPTSKSSNSEDDLPEDYPVVKKMLHRLTADLTLDPGTAHRRLLISADRRSVQLAPPGTPAPPDGPKRFNQLPAVLGAQGFGAGRHCWEVETADAASCRDSSGEDADDEESHYAVGAAGESVQRKGCVRLCPAGAVWAVEGRGGRLWALTAPEPTLLGGVEPPPRRIRVDLDWERGRVAFYDGRSLDLLYAFQAPGPLGERIFPLFCTCDPRAPLRIVPAES

SEQ ID NO: 218457 - DNA, 1263 bp, Artificial Sequence
  derived and/or modified sequence
atgtggtggcgcgacctgactcggttgcgcctgtggcttaaaagggaggccataccaggtgaaggaaggaaagctgcaaaagtgaatgccggtgtgggtgagaaaggcatttacaccgcttcctcccgcgggggccctccttccgcccgaagcaaagcagtgaccgttgtggccgagggggctgccagtcgttcctggctcagcatggacgcccctgaactggggccaggattggtcgagagactggagcaattagctacctgccccctttgtgggggcagctttgaagacccagttctcctggcctgtgaacattcattttgtcgcgcttgtcttgctaggcgctggggtacgccgccagccaccggtacagaagccagccctaccgcctgcccatgctgtggtctcccatgcccacggcgcagcctaagatcaaatgtaagactggctgtcgaggtgcgcatcagccgggagctccgtgagaaactggccgagccaggggctagagccggccgacgccgcggcggccgcataccaactatgggatgcctggatctgccaggcgaagacatgcggaagacctggaggcggtttgaggtgccaacttcgaagtcctcaaactctgaagatgacctgcccgaagattatccggtcgttaagaagatgctccacagactgacggccgacctgacgctggatccagggactgcacaccgcaggttgcttataagtgcagaccgccgatccgtccagcttgcaccacctggaacacctgccccaccagacgggcctaaacgattcgaccagcttcccgccgtattgggggctcagggcttcggtgccgggagacactgctgggaggtggaaactgccgacgctgcttcatgtcgagactcctcaggagaggatgccgacgacgaagaatcacactatgctgtgggggccgcaggcgaatctgtgcaacgcaagggttgcgttaggctctgccctgctggagctgtgtgggctgtagaaggaagaggaggccgattgtgggccttaacggctcccgaaccaacattgcttggtggagttgaaccgcccccaaggagaataagagtggacctcgactgggagcgcggtcgagtagccttttatgacgggcgttccctggacctgttgtatgccttccaggctccagggccgctgggcgagaggattttccctcttttttgcacctgcgacccacgcgccccactgcgcatcgtccctgctgaatcttag

SEQ ID NO: 218458 - DNA, 1263 bp, Artificial Sequence
  derived and/or modified sequence
atgtggtggcgtgatttaacaaggctccgtctgtggctcaagagggaagcaattcctggggagggcagaaaggcagccaaggtgaacgcaggggtgggagaaaagggcatctatactgcttcaagtaggggcggcccaccatccgctaggagtaaagccgtgactgtagtggccgagggcgcagcctcaagaagctggctgagtatggacgcaccagaactcggcccagggctggtggagagactcgaacaattagccacctgcccactttgcgggggttccttcgaggatcccgtactcctggcttgcgagcattccttttgcagggcttgtcttgcaagacgctggggaactcccccagccaccggcacagaagcgtcaccaacagcgtgcccgtgctgcggccttccatgcccaaggcgttctctcagatctaacgtaaggctagccgtggaagtgagaatttcaagggaattgcgggaaaagcttgcagagcccggagctagagccgggcggcgtcgtgggggacgtatacccactatgggttgcttggacctgccaggcgaggatatgcgtaagacatggcgccggtttgaggttcccacccctaaatcctccaatagtgaggacgatctgcctgaggactatcccgtggtaaagaaaatgttgcaccggcttactgccgatctcaccctcgacccaggaacggctcacagacggctattgatatcaactgacagaaggtccgttcaacttgcaccccctggcactcctgcccctcccgatggccccaagagatttgaccagttaccagccgtgctcggggctcaagggttcggagcaggcaggcattgctgggaggtggaaacagcagacgcagcatcgtgcagagattctagtggtgaggacgaggacgacgaggagtcgcattatgccgtcggggcagcaggggaatccgtccagaggaagggttgcgttcgcctgtgtcctgccggtgccgtgtgggctgtagaaggccgggggggccgactgtgggccctgacggcccccgagcccacactgctgggaggcgttgagccaccccccagaaggatcagagtggacttggattgggagcgcggccgcgtcgcattttatgacgggagatctctggatctgctttacgccttccaggcccctggccccctaggggaaagaatctttcccctgttttgcacttgcgatcctcgggctcctctgaggattgtccctgcggaatcctag

SEQ ID NO: 218459 - DNA, 1263 bp, Artificial Sequence
  derived and/or modified sequence
atgtggtggcgagacctgacccgtctgcggctctggctcaaacgtgaggcaatcccaggtgagggaaggaaggccgctaaggtcaacgctggggtgggcgagaagggaatatacaccgcctcctccaggggcggaccgcctagtgcacgttctaaagcagttacagtcgtggccgagggggccgctagccgcagctggctctctatggatgcccctgagctgggacccgggctcgtcgaaaggctggaacagctggccacctgtcccttgtgtggagggagttttgaagatcccgtccttttggcttgcgaacattccttctgtagagcctgcctggcaagacgctggggcacgccgcccgcaaccggtactgaggctagccccacggcttgcccttgctgcgggctcccttgccctcggagatctctcagaagtaacgtccgactggctgtggaggttaggataagtcgggaactgagggaaaagttggccgaaccgggagcgcgagcgggtcggagaaggggaggccggattcctaccatgggctgtttggatctcccgggggaagacatgcgaaagacgtggcggagatttgaggtaccgaccagcaagagcagcaacagtgaagacgacttgcctgaggactacccagttgtcaaaaagatgctccatcgcctcacagcggacctcacgctcgaccccggcacagcacatagaagactgcttatctcagctgacaggaggagcgttcagctggcacctcccggcaccccagccccaccagacggcccaaaaaggtttgatcagctgcccgccgttttaggcgcacaagggttcggtgccgggagacattgttgggaggtggagacagccgacgctgccagctgcagggatagtagcggtgaggatgccgacgatgaagagtctcattacgccgtgggcgccgccggcgaatccgtccagaggaaaggttgtgtccgcctctgcccggccggggccgtttgggcagtgggagggaggggcggaagactgtgggctctcaccgctcctgagcccacgctgctcggtggagttgaaccaccgccgagacgtatccgtgtggatctcgactgggaacggggccgcgtggccttctacgatgggcgttctcttgatctgctatatgctttccaggcaccaggacccctgggagaacgtattttccctctgttctgcacatgcgacccaagggcacctcttagaatagtccctgccgagagctag

SEQ ID NO: 218460 - DNA, 1263 bp, Artificial Sequence
  derived and/or modified sequence
atgtggtggcgggatctgactcgactcagattgtggttaaagcgggaggctattcctggggagggtagaaaggccgccaaagtcaatgcaggtgtcggtgagaaaggtatctataccgcgtcctcccgtggaggacctccttccgcgcgttcaaaggctgtcaccgtagtggccgagggagcggcttctcggagctggttgtctatggatgctcctgagttgggcccaggcctggttgagcggctagagcagctggcaacttgccccttgtgcgggggtagtttcgaagaccctgttctgttagcttgcgagcattcattctgtcgcgcttgcctggctcggcggtggggcacacctccagcaacgggcaccgaagcgagccctacagcctgcccctgttgcggactcccttgtcctaggcggagtttgagaagcaatgtcagattggctgttgaggttagaataagccgcgaacttagagaaaagctcgccgagccaggcgccagggctggccggagacgcggcggccgcatacccacaatgggctgtctcgacctaccaggcgaggatatgaggaagacctggagacggtttgaggtgccaacctctaaaagtagcaattccgaagacgacttgccagaggattacccagtggtgaaaaagatgctgcaccgactaaccgccgacctcacgctagatcccggtacagcccaccgacgactgctcatttccgccgatcggagaagtgtgcagttagcaccacccggcactcctgcacccccggatggtcctaagcgcttcgatcagctgccagccgtactaggtgcgcagggttttggcgctggcaggcattgctgggaggtagagacagccgatgcggccagctgtcgcgactcgtctggagaagacgcagacgatgaggagtcccattatgctgtgggcgctgccggggaaagtgtccagaggaaaggttgcgtcaggctttgccccgcaggtgcagtatgggccgtggagggcagaggcggccgcttgtgggcgctgacggcccctgagcccactctgctcggtggcgttgaacctccgcctcgacgaatcagggtggatcttgattgggagagaggtcgggtcgctttttatgatggccggtctctcgacctcctttatgcctttcaggcccccggacctttaggagaaagaatcttccctctgttctgtacctgcgatccaagagcccctttgagaatcgtgcccgctgagtcatag

SEQ ID NO: 218461 - DNA, 1263 bp, Artificial Sequence
  derived and/or modified sequence
atgtggtggcgagatcttactcggctgcgcttgtggctcaagcgagaagccatccctggagaaggcaggaaagccgctaaagtaaatgctggcgttggtgagaagggtatatataccgccagttcgcgcggcgggccgccctctgcccgctctaaagccgtcactgttgttgccgaaggtgccgcaagtaggagctggttatcgatggatgctcctgagctgggaccaggactggtggagcgcctggagcagttggcaacttgccctctctgtgggggaagttttgaagaccccgtcctgctggcatgtgaacatagcttctgtcgcgcctgcctagctagacggtggggtacacctcctgcaaccggaacggaggcctctcccactgcctgtccctgttgtgggttgccgtgcccgcggcggagtcttagaagcaatgtcaggcttgctgtggaggttcggatctcccgcgaactccgggagaaattggccgagcccggcgccagagctgggcgaagacgcggtggtagaatccctacaatgggctgcctggacctgcctggggaagatatgaggaaaacctggcgaagattcgaggtccctactagcaaatccagcaactccgaggacgatttaccagaggattatccggtggttaaaaaaatgctgcatcgcctgactgcagatctcactttagaccccggcactgctcaccgtagactattgatctcagccgacaggcggagtgttcagctggctccccctggcactccagcgcccccagacgggcccaagcggttcgatcagctccctgccgtgctgggggcccagggcttcggcgcaggacgccattgctgggaagtagagacggccgacgccgcctcctgtcgagacagttctggcgaggatgctgacgacgaggagagtcactacgccgttggagcagctggggagagtgtacagcggaagggatgcgtgcgtttatgcccggctggtgcagtctgggccgttgaagggcgcggtggccggttgtgggcactgacagccccagaaccaactcttctcgggggcgttgaacccccacccagacgcataagagttgacttagattgggaacgaggtcgggtagctttttacgacggccggtccctggacctgctttacgcatttcaggcgccaggcccactcggtgagcgaatattcccgctcttctgcacctgcgacccaagggctccgctgagaatcgtgccagcggagagttag

SEQ ID NO: 218462 - DNA, 1263 bp, Artificial Sequence
  derived and/or modified sequence
atgtggtggagagatttgactcgtctcagactgtggctgaagagagaagccatccccggcgaggggagaaaagctgcaaaagttaatgctggcgttggagagaagggcatctacaccgctagcagccgagggggacctcccagcgcacggtctaaggctgtcaccgttgtcgccgaaggagctgcctctagaagctggctgagcatggatgcacctgagctcggtcccggattggtggaaagactggagcaattagccacatgccctctgtgcgggggttcgttcgaggatcccgtcttgctggcctgcgagcactctttttgcagggcttgcttggctcgcagatggggcacccctccagctacaggcaccgaggcttccccgactgcgtgcccctgttgtgggctgccttgccccagaagaagcctacggagcaatgtgagactggccgttgaggtcaggatttcccgagagctccgggaaaagttggccgaaccaggagccagagccggccgccggaggggaggaagaatcccaaccatgggctgcttggatctgcctggcgaggacatgagaaagacttggcgacggttcgaggtgcctacctccaagagctcaaacagcgaagacgatcttcctgaagattacccagtagttaaaaaaatgctccaccggctaactgctgacttgacactcgacccgggaacagcacacaggagactgctgattagcgcagatcgccggagtgtccagctcgctccaccgggcacacccgcgcctcctgatggccctaagaggttcaaccaattgcctgctgttctaggcgcccagggatttggagctggcaggcattgctgggaagttgaaacagcagatgctgcctcttgccgggatagttctggagaagacgctgatgacgaagagagccactatgctgtgggcgctgcgggcgagtccgtacaacggaagggttgcgtgcggctgtgcccagcaggcgccgtgtgggccgtcgagggtcgaggtggacgtctgtgggctctcaccgctcctgaacctacactccttgggggggtggaacctcctcccagacggatccgagtggatctggactgggagaggggcagagtcgccttttacgacggaaggtctcttgacctgttgtatgctttccaggctccagggccgcttggagagcgaatctttccactgttttgcacctgtgaccctagagctcctctcagaatagtgcctgccgaatcctag

SEQ ID NO: 218463 - DNA, 1263 bp, Artificial Sequence
  derived and/or modified sequence
atgtggtggagagatctgacccgcctgagattatggctgaaacgagaggcaatacccggagaaggacgaaaggccgcgaaagtcaacgctggggttggggagaagggcatctataccgcatccagtagggggggacctccttccgcccggagcaaagccgtgactgtcgtggcagaaggggctgcttctcggagctggcttagcatggacgcacccgagttagggcctgggctggttgagaggctggaacagctcgcaacctgccccctgtgtggtggctctttcgaggatcctgtcctgctcgcctgtgaacactcgttttgtagggcatgcctggcccggcgatgggggacgccacctgctacaggaactgaagcaagtccaaccgcgtgtccttgttgtgggctcccatgtcctaggaggagcctcaggtccaacgtgcggcttgccgtggaagttcgaatttcccgggaattacgggaaaagttggctgaacctggtgctagagccgggagaagacgcggcggaagaattcccaccatgggatgtcttgacttgcctggcgaagacatgcgtaaaacctggaggcgttttgaagtgcccacttccaagagctctaattccgaggatgaccttccagaagattaccccgtcgtgaagaagatgcttcatcggttgacggccgatcttaccctcgacccaggtaccgcccacaggcgtcttttaatctccgctgacagacggagcgtgcaattagcaccacccggaaccccagcaccccctgacggccccaagcgcttcgatcagttgccggcagttctaggggcccagggctttggggctggcaggcattgttgggaagtcgagaccgcagacgccgccagctgtagagattcatccggggaggacgctgatgatgaggaaagccattacgcagtaggggctgctggggagtcagtacagagaaaagggtgcgtaaggctttgcccggccggggccgtgtgggctgttgaaggtcggggtgggcgactgtgggccctgacagcgcccgaacctaccctgctaggaggcgtcgagccgccaccacgtaggattagggtggatctagactgggagaggggtcgagtggctttttacgacggccggtccttagatttactctacgccttccaggcacccggtcccttgggcgaacgcatctttcccctcttctgtacttgtgaccctagggcgcctctcaggatcgtgccagcagaaagctag

SEQ ID NO: 218464 - DNA, 1263 bp, Artificial Sequence
  derived and/or modified sequence
atgtggtggagggatttgacccgactccgactttggttgaaacgggaagccatacctggcgagggccggaaggccgctaaagtgaatgctggcgtcggcgaaaaagggatttatacggcatcctcccgtggcggcccaccttccgcaaggtccaaagcagtcacggtcgtagccgagggcgctgcatcccggagttggctgagcatggacgcacccgagcttggccccggcctggtggaaaggctggagcagctcgccacctgcccgctgtgtggtggctcatttgaagatccggttctgctggcatgcgaacattccttctgcagggcatgcttggctaggagatgggggacccctcccgctaccggaaccgaagcctcacccaccgcctgtccctgttgcgggcttccctgccccagacgatctcttagatctaacgttaggctggctgtcgaagtgcggatttcccgggaattaagagagaagctcgcagaaccaggcgctcgggccggccgcagaaggggcggccgaatccccaccatgggatgcttggatctgccaggggaggacatgaggaaaacatggcggcgttttgaggtccccacttcaaagagttctaactcggaagatgacctgcccgaggactatcctgtggtcaagaagatgctgcaccgacttaccgccgacttaaccctggatcccggaactgcccatcgtaggctgctcatctcagctgatcgtcggtctgtccagttggccccccccgggacgcctgccccgcctgatggcccgaagcgcttcgatcagctcccggccgtgctcggtgcccaaggattcggggcggggcggcactgctgggaagtcgagactgccgatgcagctagctgccgggatagctctggtgaggatgcagatgacgaggaatctcactatgctgtaggagcagccggggaatccgttcagagaaagggctgtgttaggctgtgtcccgccggtgccgtatgggctgtagaggggcgcgggggacgtctttgggcactgactgcccccgaacccacattattgggcggtgttgagccccctcccaggcggattcgggttgaccttgactgggaacgcggtagagtggcattttacgacggacggagcctcgatctgctgtacgcgtttcaggccccaggccctcttggcgagagaatcttcccattattctgtacctgtgaccctcgagcccccctccgtattgttcctgctgaatcatag

SEQ ID NO: 218465 - DNA, 1263 bp, Artificial Sequence
  derived and/or modified sequence
atgtggtggagggacctgacccggctgcggctgtggctgaagcgggaggccatccctggagagggcaggaaggccgccaaggtgaatgctggggtgggggagaagggcatctacacagccagcagccggggcggcccccccagcgcccggagcaaggctgtgacagtggtggccgagggcgccgccagccgctcctggctgtccatggatgcccctgagctgggccctggcctggtggagcggctggagcagctggccacctgccccctgtgtggcggcagctttgaggaccctgtgctgctggcctgtgagcacagcttctgccgggcctgcctggcccggcgctggggcaccccaccagccaccggcacagaggccagccccacagcctgcccctgctgcggcctgccctgcccccggcgcagcctgcggagcaatgtgcggctggccgtggaggtgcgcatcagccgggagctgcgggagaagctggccgagcccggggcccgggccggcagaagaagaggaggccgcatccccaccatgggctgcctggacctgcctggagaggacatgaggaagacctggaggagatttgaggtgcccaccagcaagagcagcaacagtgaagatgacctgcctgaggactaccctgtggtgaagaagatgctgcaccggctgacagctgacctgaccctggaccccggcacagcccaccggcggctgctgatctctgctgacagaagatctgtgcagctggcccctcctggcaccccagcccccccagatggccccaagagatttgaccagctgcctgctgtgctgggcgcccagggctttggagctggccgccactgctgggaggtggagacagcagatgctgccagctgccgggacagcagcggggaggatgctgatgatgaggagagccactatgctgtgggcgccgccggggagagcgtgcagaggaagggctgtgtgcggctgtgcccagctggagctgtgtgggccgtggagggccggggcggccgcctgtgggccctgacagcccctgagcccaccctgctgggcggcgtggagcccccaccccggcgcatccgggtggacctggactgggagcggggccgggtggccttctatgatggccgcagcctggacctgctgtatgccttccaggcccctggccccctgggggagcgcatcttccccctcttctgcacctgtgacccccgggcccccctgagaattgtgcctgctgagagctag

SEQ ID NO: 218466 - DNA, 1263 bp, Artificial Sequence
  derived and/or modified sequence
atgtggtggagggacctgacccggctgcggctgtggctgaagcgggaggccatccctggagagggcaggaaggccgccaaggtgaatgctggggtgggggagaagggcatctacacagccagcagccggggcggcccccccagcgcccggagcaaggctgtgacagtggtggccgagggcgccgccagccgctcctggctgtccatggatgcccctgagctgggccctggcctggtggagcggctggagcagctggccacctgccccctgtgtggcggcagctttgaggaccctgtgctgctggcctgtgagcacagcttctgccgggcctgcctggcccggcgctggggcaccccaccagccaccggcacagaggccagccccacagcctgcccctgctgcggcctgccctgcccccggcgcagcctgcggagcaatgtgcggctggccgtggaggtgcgcatcagccgggagctgcgggagaagctggccgagcccggggcccgggccggcagaagaagaggaggccgcatccccaccatgggctgcctggacctgcctggagaggacatgaggaagacctggaggagatttgaggtgcccacccccaagagcagcaacagtgaagatgacctgcctgaggactaccctgtggtgaagaagatgctgcaccggctgacagctgacctgaccctggaccccggcacagcccaccggcggctgctgatcagcacagacagaagatctgtgcagctggcccctcctggcaccccagcccccccagatggccccaagagatttgaccagctgcctgctgtgctgggcgcccagggctttggagctggccgccactgctgggaggtggagacagcagatgctgccagctgccgggacagcagcggggaggatgaagatgatgaggagagccactatgctgtgggcgccgccggggagagcgtgcagaggaagggctgtgtgcggctgtgcccagctggagctgtgtgggccgtggagggccggggcggccgcctgtgggccctgacagcccctgagcccaccctgctgggcggcgtggagcccccaccccggcgcatccgggtggacctggactgggagcggggccgggtggccttctatgatggccgcagcctggacctgctgtatgccttccaggcccctggccccctgggggagcgcatcttccccctcttctgcacctgtgacccccgggcccccctgagaattgtgcctgctgagagctag

SEQ ID NO: 218467 - DNA, 1263 bp, Artificial Sequence
  derived and/or modified sequence
atgtggtggagggacctgacccggctgcggctgtggctgaagcgggaggccatccctggagagggcaggaaggccgccaaggtgaatgctggggtgggggagaagggcatctacacagccagcagccggggcggcccccccagcgcccggagcaaggctgtgacagtggtggccgagggcgccgccagccgctcctggctgtccatggatgcccctgagctgggccctggcctggtggagcggctggagcagctggccacctgccccctgtgtggcggcagctttgaggaccctgtgctgctggcctgtgagcacagcttctgccgggcctgcctggcccggcgctggggcaccccaccagccaccggcacagaggccagccccacagcctgcccctgctgcggcctgccctgcccccggcgcagcctgcggagcaatgtgcggctggccgtggaggtgcgcatcagccgggagctgcgggagaagctggccgagcccggggcccgggccggcagaagaagaggaggccgcatccccaccatgggctgcctggacctgcctggagaggacatgaggaagacctggaggagatttgaggtgcccaccagcaagagcagcaacagtgaagatgacctgcctgaggactaccctgtggtgaagaagatgctgcaccggctgacagctgacctgaccctggaccccggcacagcccaccggcggctgctgatctctgctgacagaagatctgtgcagctggcccctcctggcaccccagcccccccagatggccccaagagatttgaccagctgcctgctgtgctgggcgcccagggctttggagctggccgccactgctgggaggtggagacagcagatgctgccagctgccgggacagcagcggggaggatgctgatgatgaggagagccactatgctgtgggcgccgccggggagagcgtgcagaggaagggctgtgtgcggctgtgcccagctggagctgtgtgggccgtgggcggccggggcggccgcctgtgggccctgacagcccctgagcccaccctgctgggcggcgtggagcccccaccccggcgcatccgggtggacctggactgggagcggggccgggtggccttctatgatggccgcagcctggacctgctgtatgccttccaggcccctggccccctgggggagcgcatcttccccctcttctgcacctgtgacccccgggcccccctgagaattgtgcctgctgagagctag

SEQ ID NO: 218468 - DNA, 1263 bp, Artificial Sequence
  derived and/or modified sequence
atgtggtggagggacctgacccggctgcggctgtggctgaagcgggaggccatccctggagagggcaggaaggccgccaaggtgaatgctggggtgggggagaagggcatctacacagccagcagccggggcggcccccccagcgcccggagcaaggctgtgacagtggtggccgagggcgccgccagccgctcctggctgtccatggatgcccctgagctgggccctggcctggtggagcggctggagcagctggccacctgccccctgtgtggcggcagctttgaggaccctgtgctgctggcctgtgagcacagcttctgccgggcctgcctggcccggcgctggggcaccccaccagccaccggcacagaggccagccccacagcctgcccctgctgcggcctgccctgcccccggcgcagcctgcggagcaatgtgcggctggccgtggaggtgcgcatcagccgggagctgcgggagaagctggccgagcccggggcccgggccggcagaagaagaggaggccgcatccccaccatgggctgcctggacctgcctggagaggacatgaggaagacctggaggagatttgaggtgcccaccagcaagagcagcaacagtgaagatgacctgcctgaggactaccctgtggtgaagaagatgctgcaccggctgacagctgacctgaccctggaccccggcacagcccaccggcggctgctgatctctgctgacagaagatctgtgcagctggcccctcctggcaccccagcccccccagatggccccaagcgcttcaaccagctgcctgctgtgctgggcgcccagggctttggagctggccgccactgctgggaggtggagacagcagatgctgccagctgccgggacagcagcggggaggatgctgatgatgaggagagccactatgctgtgggcgccgccggggagagcgtgcagaggaagggctgtgtgcggctgtgcccagctggagctgtgtgggccgtggagggccggggcggccgcctgtgggccctgacagcccctgagcccaccctgctgggcggcgtggagcccccaccccggcgcatccgggtggacctggactgggagcggggccgggtggccttctatgatggccgcagcctggacctgctgtatgccttccaggcccctggccccctgggggagcgcatcttccccctcttctgcacctgtgacccccgggcccccctgagaattgtgcctgctgagagctag

SEQ ID NO: 218469 - DNA, 1263 bp, Artificial Sequence
  derived and/or modified sequence
atgtggtggcgggacctgacccggctgcggctgtggctgaagcgggaggcaatccctggagagggacggaaagcagctaaagtcaacgccggtgtgggcgaaaaaggtatctacactgcctcgtccaggggggggccgcccagtgctagatctaaggcagtgacagtggtcgcagagggggctgcatctcggtcctggctgtcaatggatgctcccgaactgggacccggcctggtagagaggctagaacagctcgccacttgccccctttgtggaggctccttcgaagacccggttcttctagcttgcgagcactccttttgcagagcatgcctggcacgccggtggggaactcccccggcgactggtaccgaggctagccccacagcctgtccctgctgcggtctgccctgtcctcgaagatcacttcggagcaacgtgcgcctagccgttgaggtgcggatatcgagggagttacgcgagaaactagccgagcccggggcgcgagccggccgtaggagaggtggtagaatacctacgatggggtgtctggacttaccaggagaagacatgcgcaaaacgtggcgtaggttcgaggtcccgacttcaaaatcttctaactccgaagacgacttgcctgaggattacccagttgtgaaaaagatgcttcatcgcctgactgccgaccttacactcgatcccggtactgcgcaccgaagacttcttatctctgctgatcggcgtagcgtacagctcgccccacctggaactcccgctcctcctgacggccccaagagattcgaccaactgcccgctgttctcggagctcaaggctttggagccggacgccactgttgggaagtcgagaccgcagacgcggctagctgtcgcgatagctccggagaggatgctgatgatgaagaatctcattatgccgtgggtgctgccggggaatcagtccagaggaaggggtgcgtgcggctgtgccctgccggcgccgtttgggccgtggagggtagaggcggcaggctgtgggcgctgaccgctccagaacccacgttactcgggggtgtggaacccccacctcgccggattagagtggacctggattgggagcgcggccgcgttgctttttatgatggcagaagcctggacctgctgtatgctttccaggcccctggacctctgggtgagaggatctttcctctgttttgcacctgcgatcccagagccccactaagaattgtgcctgctgagtcttag

SEQ ID NO: 218470 - DNA, 1263 bp, Artificial Sequence
  derived and/or modified sequence
atgtggtggcgggacctgacccggctgcggctgtggctgaagcgggaggctattcccggagagggcagaaaggctgccaaagtaaatgctggagttggggaaaagggaatctacacggccagtagtagaggaggcccgccaagtgcacgcagtaaagccgttactgttgtagcggaaggagctgccagcaggtcctggctgagcatggatgcaccagaactagggcctggacttgttgagcggcttgaacagttggctacatgtcctctctgtggtggtagcttcgaagatcccgtgctgctggcatgtgaacattccttctgtcgtgcctgtctggcacgtcggtggggaacaccccccgccacgggcacagaggcatcacctacagcctgcccctgttgcgggcttccatgtccccgccgctccctgagaagcaatgtgcgactcgcagttgaagtgcggatctctcgggaattgcgcgagaagctggccgaaccaggtgcaagggctggcagaagaagggggggacgaatcccaacaatgggttgtctggacttgcctggggaagacatgcggaaaacttggcgaaggtttgaagtcccgacccctaagtcctccaactcagaggatgatctccctgaagactatcctgtcgttaagaagatgctccatcgccttactgccgacctgacactggacccaggcacagcacataggaggttgttgataagtaccgatcgaaggagcgtgcagctggcccccccaggaacccccgcgccccccgatggaccaaagcggtttgaccaactgcccgccgtgcttggcgcacagggatttggcgccggccggcattgttgggaagtggaaactgccgatgccgcatcttgccgggatagctccggggaggacgaagacgatgaagaaagccattacgccgtgggcgcagcaggtgagtcagtgcagagaaaggggtgcgttaggctgtgtcctgcgggcgcggtgtgggctgtagagggccgtggagggagattgtgggcccttacggcgcccgaacctaccctgctgggcggagttgaacctcctccaaggaggattagggttgaccttgattgggagaggggaagggtggctttctatgacggtagatccctggacctcctgtatgcctttcaagcccccggacctctgggggagcgcattttcccgctgttctgcacatgtgatcctcgcgctcctctccgcatagttcccgcagaatcttag

SEQ ID NO: 218471 - DNA, 1263 bp, Artificial Sequence
  derived and/or modified sequence
atgtggtggcgggacctgacccggctgcggctgtggctgaagcgggaggccatccccggggaaggcaggaaggcggcaaaagtgaacgccggagttggtgagaaaggaatctacactgcctcaagtagagggggacccccttcagcgagatcaaaagccgtgaccgtagttgccgaaggcgccgcaagtcggagctggctatctatggatgctcccgagctgggaccagggctggtggagcgtttagagcagctcgccacctgccccctatgtggcggaagtttcgaggatccagtgcttctggcctgcgaacactccttctgccgtgcctgcctggctcggaggtggggaacccctcctgcaacaggcacagaggcttcccccacagcatgcccttgttgtggtctcccctgcccgaggcgaagtctccgctcaaacgtgagactcgccgtggaagtgaggatttcgcgcgagctgagagagaaactggccgagccaggggcccgggccggtcggcggaggggcggccggatccccacaatgggttgcctcgacttaccaggggaggatatgcggaagacctggcggagattcgaagtgcctacttcgaaatccagcaactccgaggacgatttgcccgaggactacccagtggtgaagaagatgctccaccgcttgaccgccgatctcaccctcgacccggggacagcacatcggcgcctcctaattagcgccgacaggaggagcgtgcaacttgccccaccaggtacaccggctccaccagatggcccaaaacggttcgatcagcttcccgcggtgctgggggctcagggtttcggagccggaagacactgttgggaagtggagacagccgacgctgcctcctgtcgagacagcagcggcgaggatgcagatgacgaagaatcccactacgctgtgggggctgcaggcgaatctgtgcaacggaaaggctgcgtgaggctgtgtcccgcaggcgcagtgtgggccgtgggagggagaggaggacgcctgtgggcacttacagccccggaaccaacactgctgggtggtgtggagccccccccccgtcgcattagggtcgatctggattgggaaagaggcagggtggccttttatgacggacgatctctcgatttgctgtatgcctttcaggcgccagggcccttgggtgagcggatcttccccctgttctgtacctgtgaccccagagcccccctacgcatcgttcctgccgaatcctag

SEQ ID NO: 218472 - DNA, 1263 bp, Artificial Sequence
  derived and/or modified sequence
atgtggtggcgggacctgacccggctgcggctgtggctgaagcgggaggccatccctggagagggaaggaaagcagctaaggtgaatgctggagtgggagagaaggggatatacaccgcctcatcccgtggcgggccccccagcgcccgatctaaagccgtgacagtcgtggctgaaggggcggcctcaaggagttggctgtctatggacgctcctgagctcgggcctggactggtcgaacgtctggagcagttagctacttgccctctgtgcggtggctcgtttgaagacccagtactccttgcctgtgaacacagcttctgcagagcctgtctggcacggcggtggggaacaccgcctgcaaccggaaccgaggcctcaccgacagcatgtccctgctgtggattgccctgccccaggagatcactccgctccaatgtgcgactggccgtcgaggttcgaataagtcgggaattacgcgaaaaattagcagagcctggcgcccgcgcaggacggcggagaggagggagaatccctactatgggttgcctggacctaccaggagaggacatgcgcaagacctggcgccgattcgaagttccgacctccaaatcctctaatagcgaggacgatctcccggaagactatccagtggtaaaaaagatgctgcatcgccttaccgccgatctaacactcgatccgggtaccgctcatcgcaggttgctcatatctgccgacagacgcagcgtgcagctggccccacccggcacccctgcccctccggatggccccaagaggttcgatcagctgcccgcagttttgggagcgcagggatttggcgccggcaggcattgttgggaggtggagaccgcagatgccgcgtcctgtcgagattcatccggagaagacgctgatgatgaagagagccactacgctgttggtgccgccggggagtcggtgcagcgcaaaggatgtgtccgcctttgtcctgcaggggccgtgtgggcggtggaaggtaggggtggaaggctgtgggctttgaccgccccagagcccaccttactgggtggagttgagccgcccccacggcgtattcgagtggatctggattgggaacgagggcgggtggctttttatgatggccggtctctcgatttattatacgccttccaggcgccaggtccccttggtgagagaatttttccactgttttgcacatgtgatcctcgcgctccattacggatagtgccagcagaatcttag

SEQ ID NO: 218473 - DNA, 1263 bp, Artificial Sequence
  derived and/or modified sequence
atgtggtggcgggacctgacccggctgcggctgtggctgaagcgggaagcaataccgggcgagggtaggaaagccgccaaggtaaacgcaggcgtcggtgagaagggcatttatactgcctccagtagaggaggacctccatcagcgaggtctaaggccgtgacagtggttgctgagggcgccgcatcccgaagctggctgtccatggacgccccagagttggggcccggcctagtcgaacggctggagcagctagcgacctgccccttgtgtggaggatccttcgaggaccccgtgctgctggcctgtgaacactcattctgccgcgcttgtcttgcaagacggtggggaactcctccagccacaggtactgaggccagtcccactgcctgcccctgttgcggtctgccttgcccaaggcgtagcctgcgaagcaatgtacgtctcgctgttgaggtccgtatttcaagagagctccgcgagaaactggccgagccaggagctagagctggtcgccgtaggggaggccggatcccaaccatggggtgcctcgacctccccggagaggacatgcggaagacctggcggcgttttgaagttccaaccagtaaaagctctaacagtgaggacgacctgccagaagattaccctgtggtgaagaagatgcttcacaggctgacggccgacttgaccctcgatcccggtaccgcccaccgcagactgttgattagcgccgacaggcgcagcgtccaactagcaccaccaggcacccctgctcctccagacggcccaaaacgctttgaccagctccctgctgttcttggagctcagggctttggagccgggcggcactgctgggaggtggaaactgccgacgccgcgtcgtgccgggactcgagtggtgaggacgctgacgacgaggaatcacactatgccgtcggcgcagctggggaaagtgttcagagaaagggatgtgttaggctgtgcccggctggggcagtatgggccgtagaaggccggggtgggcgattgtgggcacttaccgcacccgagccaactctcttggggggggttgaaccccccccacgccggattagggttgacctagattgggagcgcggacgtgtcgctttttacgacggccgctcattggacctactctacgccttccaagctcccggcccactcggcgagagaattttcccactgttttgtacctgcgacccccgcgccccccttaggattgtccccgcagaatcttag

SEQ ID NO: 218474 - DNA, 1263 bp, Artificial Sequence
  derived and/or modified sequence
atgtggtggcgggacctgacccggctgcggctgtggctgaagcgggaagctataccaggcgaagggcgaaaggctgcgaaggttaatgccggcgtgggtgaaaagggtatctacacagccagctctcgcggcggccctccgagcgcacgttccaaagctgtgacagtcgtggccgagggcgctgcctcacgaagttggttgtctatggacgctccagagctgggcccaggactcgttgagcgcttggagcaactggctacctgccccctgtgcgggggttcctttgaggatcccgtgctgctcgcctgcgagcacagtttctgccgggcttgtctcgccagacggtggggtactcctccagccacaggcacagaagcctcccctaccgcttgtccctgttgtggtctgccatgcccaaggaggagcttacgcagcaacgtgcggctggcagtcgaggtcagaatttctagagagctccgggaaaagttagctgagcccggtgcccgcgccggcaggcgcagagggggaagaattccaaccatgggctgcctggatttacccggggaggatatgcggaagacttggcgccggtttgaagttccgacttccaaatcctccaatagtgaagacgacttgcctgaagactaccccgtggtcaaaaaaatgctccaccgcctgactgctgaccttactctggacccagggacagcccacagaaggcttttgatcagcgccgaccgcagaagcgtacagctcgctccgcccggtacacccgcaccacctgatgggcctaaaaggttcaaccaactccccgccgtccttggggcccaaggtttcggagccgggcggcactgctgggaagtagaaaccgcggatgctgcttcctgcagagattcttccggagaggacgcagacgatgaagagtcccactatgccgttggagccgcgggcgaatctgtccaaaggaaagggtgtgtgcgtctgtgcccagctggcgctgtgtgggccgttgaaggtcgagggggtaggctgtgggccctgactgccccggaacctaccctgctgggcggtgttgagccacctccccgacgcatccgtgtggacctagattgggagcggggccgggttgctttctatgacggccggagtctggacttgctgtacgcattccaggctcctggccccttgggcgagagaatcttccctttgttttgtacatgcgacccccgcgcacccttgcggatagtaccagcagagtcttag

SEQ ID NO: 218475 - DNA, 1263 bp, Artificial Sequence
  derived and/or modified sequence
atgtggtggcgggacctgacccggctgcggctgtggctgaagcgggaggcgatacctggagaaggccgcaaagcagcaaaagtgaatgctggcgtgggagagaagggcatctacacagcttcttcacgcggtggccccccaagcgccaggtccaaggcagtgacagttgttgctgagggcgctgccagccgaagttggctctccatggatgctcctgaactcggcccagggctggttgaaagactagaacagcttgccacctgtcctctgtgtggtggctccttcgaagaccccgtcctgttggcctgcgagcattcattttgtcgggcttgtcttgcacggcgctggggaacccctcccgccaccgggaccgaggcttcaccaacagcctgcccctgctgtggtctgccatgccccaggcggtctctcaggtcaaatgttaggctggccgtggaggtgcgtatcagccgggagctgagggaaaaattggctgagccaggagctcgagcaggaagacggagggggggtcgcattcccacgatggggtgcctcgatcttcccggtgaagatatgaggaagacttggcgccgatttgaggtcccgacctccaagtctagtaatagcgaggatgacctgcctgaggactatccagtggtgaaaaaaatgttacatcgcctaacagctgacttgacattagatcctggcacggcccataggaggctgctcatttccgccgaccgccgcagcgtgcagctggcccctcccgggactccggctccacctgacgggcctaaacgattcgatcagttgccagcggtcctgggggcacaggggttcggcgctggaaggcattgttgggaagtcgagacagctgatgcagcctcgtgcagagatagctctggcgaagatgctgacgatgaggaatcacactatgctgtaggtgccgccggagagtcagtacaacgtaaaggatgcgtgcggctttgcccggccggcgctgtgtgggctgtggaagggcgcggtggtcgattgtgggcattgactgcaccagagccaaccttactgggaggtgtggagccaccaccaagaaggattcgggtcgatctggactgggagagaggtcgggtggctttctacgacgggcggtcactggacttactgtacgcatttcaggcacccggaccactgggagagaggatcttcccactgttctgcacctgcgacccccgggcacccctgcggatcgttcctgcagaaagctag

SEQ ID NO: 218476 - DNA, 1263 bp, Artificial Sequence
  derived and/or modified sequence
atgtggtggcgggacctgacccggctgcggctgtggctgaagcgggaggcgatccccggagagggacgtaaggcagccaaggtgaacgccggagtcggtgagaaaggcatctataccgcatcctcccggggtggccctcctagtgcacgcagtaaggcagttacagtggtggcagaaggtgccgcgtcccgctcttggctttcaatggatgcacccgagcttggccccggcctggtagagcgactggaacagctggccacgtgcccactgtgcggcggatccttcgaggatccagtcttactcgcgtgtgagcattctttctgtcgtgcctgcctcgctaggcgttggggcaccccaccagccacagggactgaggctagccctaccgcgtgcccatgctgcggcctgccctgccccaggaggtccttgcgatccaatgttaggttggccgtcgaagttcgaatcagtcgagagctgagagagaagctagctgaacccggcgctcgggcagggcgtaggagaggcggaagaattcctactatgggctgcttggacctcccaggcgaggatatgcggaaaacatggaggaggttcgaggtacctactagtaagagttcaaacagcgaggacgacctcccagaggactatcctgtagtcaagaaaatgctccaccggctgacggccgatctgactctggaccccggcacagcccaccgtcgtctcctcatcagtgcggatcggcgctctgtgcagctcgccccacctggcacccccgctcctcccgacggtcccaaaaggttcgaccagttgccggccgtactcggcgcccaggggttcggcgcgggcaggcactgctgggaggtggagaccgcggacgccgcaagctgccgcgactcttcgggggaagacgctgacgacgaggagtcacattacgccgtgggggccgccggagaaagcgtccagagaaagggctgcgtgaggctgtgtcctgctggagctgtctgggctgtagagggtcggggaggacgactctgggccctgaccgcgcctgaacccaccttgcttggtggcgtggaaccccctccccggaggattagagttgatctcgactgggaaagaggtcgggtggctttttatgatggtaggtctctggatttgctctatgcatttcaggcccccggtcctctgggagagcggatcttccctctcttttgtacttgcgatccaagggctccgctaaggatagtgccggctgaatcttag

SEQ ID NO: 218477 - DNA, 1263 bp, Artificial Sequence
  derived and/or modified sequence
atgtggtggcgcgacctgacccggcttcgcctctggctgaagcgcgaggctatccctggcgaggggaggaaagcagctaaagtcaacgctggagttggggagaagggtatttataccgcttctagccgcggagggcctccttctgctaggtctaaggccgttacagtggtcgcagagggcgctgccagtagaagttggctgagcatggacgccccagaactcggccctgggttggtggaaaggttggaacagctggccacatgcccactgtgtggcggaagcttcgaagaccctgtgcttctcgcctgtgagcatagcttctgcagggcctgcctagcaaggagatggggcacccctcctgctactggaactgaggcctctcccacggcctgcccgtgttgcggattgccttgcccaagacggtcactccgctccaacgtgcgattggcagtggaggttaggatatcacgagagttgagggagaaactcgccgagcctggagctagagctggtcggaggcgcggtgggaggattccaactatgggatgcctggatctcccaggggaagacatgagaaaaacctggcgcagattcgaagttccaacgtctaaaagttcaaactctgaggacgatctgccggaagattaccctgtcgtgaaaaaaatgctccatcgccttactgcggatctgaccctcgatccaggaacagcccaccgacgccttttgatttctgctgaccgcaggtctgtccagctggctccaccgggtactccagccccacctgacgggcctaagcgcttcgatcagctgcctgccgttctaggtgcccaaggattcggtgccggtcgccattgctgggaagtggagacagccgacgctgcatcatgccgagactccagcggggaggacgcggatgacgaagaatctcattacgcagtgggcgctgctggcgaaagtgtccaacgaaaggggtgcgtgcgtctttgccccgcaggagccgtgtgggctgtcgagggaagaggcggacggctgtgggccctcacagcccctgagccaaccctgcttgggggtgtggagccaccgcctcgacgcatccgggtcgacttggactgggagcgcggacgcgtcgctttttacgatggaagatcccttgatctgctctacgccttccaggcccctggacccctaggcgagaggatcttcccactattttgtacttgcgacccccgagccccactgcgcattgtgccggcagagtcttag

SEQ ID NO: 218478 - DNA, 1263 bp, Artificial Sequence
  derived and/or modified sequence
atgtggtggcgggatctgacccgtcttagattgtggttgaagagggaagccattcccggtgagggaaggaaggcagccaaggtcaatgcaggtgtgggcgagaaaggtatttacacagcctcttctagaggcggaccaccaagcgcacgctccaaggcagttactgtggtggcagagggcgcagccagccgctcctggctgagcatggacgcacccgagctggggccaggcctcgtggagaggctggagcaactggcaacctgcccactgtgcggtggatcgttcgaagacccggttctgctggcctgcgagcacagcttctgccgcgcatgcctggccaggagatggggaacgccccctgcgaccggcactgaagctagtcctactgcttgcccctgctgcggtctgccttgtccaagacggagcctgagatcaaacgtgagactcgctgtggaagttaggatctcaagagagttgcgggaaaaattggccgaacccggtgctcgagccggacgcagaaggggagggagaattccaactatgggttgcttagatctgcccggtgaagacatgcgcaagacttggcgacgattcgaagtccccacaccaaaatcttccaacagcgaggatgatctcccggaagattaccctgtcgtgaaaaaaatgctacaccgcctgacagcggatctcaccctggacccgggaaccgcgcaccggcgactgctaatctcaaccgatcgacgttcggtccagctggccccacccggaacccctgcacccccagacggacctaagcggttcgatcaactcccggctgtgctcggcgctcaaggattcggtgctggcaggcactgttgggaggtcgagaccgccgatgccgctagctgtagggactcatccggcgaggatgaagatgacgaagaatcccactacgctgtgggagccgctggggagagcgtgcagcgaaagggctgtgtccgcctgtgccccgctggcgctgtctgggccgttgaggggcgaggcggtaggctatgggcactgacagccccagaaccgacgctccttggtggcgtagagccccctcccagaaggatccgcgtggaccttgactgggaaagaggtagagtggcattctacgacggtcggagcctggacctattgtatgctttccaggcccctggcccacttggagaaagaatcttccccctgttttgtacttgcgaccctagagcaccgctgaggattgtacctgcagagtcatag

SEQ ID NO: 218479 - DNA, 1263 bp, Artificial Sequence
  derived and/or modified sequence
atgtggtggagggatctgacaagacttagactgtggctgaaacgagaggccatcccaggagaaggccgaaaagcggctaaagtgaacgcgggagtaggggagaaaggaatttacaccgctagctctcgcggtgggccaccgtccgcgaggagcaaggccgtgactgtcgttgccgaaggcgctgccagtcggtcttggctctccatggacgcccctgaacttggaccaggactggtggagagactagaacaattggccacgtgtcctctctgcggtggaagctttgaagatcccgtactgcttgcatgcgagcatagcttctgtcgggcttgcttggctaggcggtggggcactccaccagccactgggactgaggcctctcctaccgcttgcccatgttgcgggctgccgtgcccccgaagatctctcagaagtaatgtgagattagctgtggaagtgcgtatatctcgtgaattaagagagaagcttgccgagcctggagctcgagccggtaggagacggggtggcaggattcctaccatggggtgcttagatctgcccggagaggacatgcgcaagacctggcggaggttcgaggtgcccacctcaaaaagttccaacagcgaagatgatctgcccgaagactatcctgtggtgaagaaaatgttgcatagattaaccgcggacctgaccctagatccaggcaccgcacaccggaggttactgatatccgcagatagacgctccgtacaactggcccctccaggtactcccgctcccccagatgggccaaaacggtttgaccagcttcccgctgttctcggtgcccaggggttcggagctggccgacattgctgggaagtggaaacagccgacgccgcttcctgtcgagacagctctggcgaggacgccgatgacgaagagagtcactacgctgttggagctgccggagagagtgtgcaaagaaagggttgcgtgagactctgtcccgctggggcagtgtgggcagtcgggggtagaggtggtagattgtgggccctaacagctccggaaccaaccctgttggggggagtggaacctccacccaggaggattagagtggatttggattgggagaggggcagagtggccttttatgatggcagaagcctcgatctgctctatgctttccaagcgcctggaccattaggcgaacgcatatttcccctcttctgtacttgcgatcctcgcgcaccgctgcgcatagtgccggctgagtcctag

SEQ ID NO: 218480 - DNA, 1263 bp, Artificial Sequence
  derived and/or modified sequence
atgtggtggagagatcttaccaggttgcggctgtggctaaaacgtgaggctatccctggcgaagggaggaaagcagcaaaagttaatgctggcgtgggagagaagggcatctacacagccagttcgagaggagggcctccatctgctcgttccaaggcggtcactgtagtggccgagggagccgcaagcaggtcctggctgtccatggacgctccggaactcggcccaggtctcgtcgagcgactggaacagctggccacttgtcccttatgtgggggatcttttgaagatcccgtgctcctcgcctgcgagcactctttctgtagggcttgcttagcacgtcgctggggaacacccccagcaacagggaccgaggccagcccaacagcatgcccatgttgcggcttaccatgtcccagacggtcattgaggagcaacgtgagactggctgtcgaagtgcgtattagccgcgaactgcgggaaaaactcgcagaacccggagctagagctggacggaggcgaggcggtcgcatccctactatgggctgcctggatctaccaggcgaggacatgcgtaagacctggagaagatttgaggtcccgacctcaaagtcaagcaacagcgaggatgatctgcctgaggattatccagtggtcaagaagatgcttcaccgtctgaccgctgacctaacactagatcctgggactgcacaccgacgcttgctgatctccgcagataggcggagtgtccagctcgcccctccaggcacccccgcaccacccgacggaccaaagcgttttgatcagctccccgctgtgctgggcgctcaaggttttggcgcaggacggcattgctgggaagtggaaactgcagacgctgcaagttgcagggactcgtccggtgaggatgcagacgacgaggagagccactatgctgtcggagcagctggtgagtctgtgcagaggaaagggtgtgtcagattatgccccgctggtgctgtctgggctgtggagggacgaggtggtaggctatgggctctaacagcccctgagcccaccctgctcggtggcgtcgagccaccaccccgacgcattagggtggacttagattgggagagaggacgtgtggccttttacgacgggaggtccctggatctactctacgccttccaggcccctggtcctctgggagagagaatcttcccactcttctgtacatgtgacccacgggcacctctgcggatcgtgccggctgagagctag

SEQ ID NO: 218481 - DNA, 1263 bp, Artificial Sequence
  derived and/or modified sequence
atgtggtggcgggatttaactcggctccgattatggcttaagagagaggccatccccggtgaagggcgaaaggctgctaaagttaacgccggagtaggtgaaaaaggtatttacacagcaagcagcaggggaggtccgcctagtgccagatccaaggccgtgaccgtggtcgccgaaggtgccgcttccagaagttggctgagcatggacgccccagagctgggccctgggctggtggagcgcctagagcagttggccacctgcccactttgtggcggatcattcgaagatcctgtgcttctggcctgcgaacacagtttttgtagagcttgcctggcccgacggtggggaacaccgcctgccaccggcacggaggccagtccgacagcttgcccgtgctgcggccttccgtgccctcgtcggtctctaaggtccaatgtgcgactggctgtggaggtccgaatttcacgggagctgagggagaaactggctgaaccaggcgcaagagcgggaagacgcagaggagggcgtatcccgaccatgggctgcctggacttaccgggagaagatatgagaaagacatggcggaggttcgaggtacccacgtcaaaaagctcaaacagcgaggatgacctgccggaggattatccagtcgtcaagaaaatgcttcatagattgactgctgatctcactctggatcctgggactgcccatcggcgactgcttatctcggccgacagacgctccgtccagctagctccaccgggtactcctgcccctccagacggtccgaagcgcttcgatcagttaccagcggttctgggggcacaaggattcggggctgggaggcattgctgggaagtggagacggctgacgccgcaagttgtcgcgactcctccggtgaggacgctgatgacgaggagtcacattacgctgtgggagccgcaggtgagagcgtccagagaaaaggttgtgtgagactctgcccagccggagcggtgtgggctgtggaagggcgtggtgggagattatgggctctgactgctccggagcctaccctgctaggcggagtagaacctccaccaaggagaatccgggtggacttagactgggagcggggaagggtggccttttatgacggtcgctccctggacctgctctatgctttccaggccccagggccattgggtgaaagaatatttcccctcttctgtacttgcgaccctagggccccactgcggatagtgcctgctgaaagttag

SEQ ID NO: 218482 - DNA, 1263 bp, Artificial Sequence
  derived and/or modified sequence
atgtggtggcgggacctgacacgactgagactgtggctgaagcgggaggcaattccaggagagggacgcaaggccgctaaggtcaatgccggtgtaggggaaaaagggatttacaccgcctcatctagagggggacctccatcagcaaggtcaaaagctgttacggtagtggccgagggagcggctagtaggagctggctgtcaatggatgcgccagaactggggccaggactggtggagaggctagagcagcttgccacttgtcctctgtgcgggggatccttcgaggaccccgtcctcctcgcctgcgagcactcattttgtcgagcttgcttagccagacgatggggaacaccgcctgccactggaaccgaagctagccccactgcatgcccctgttgtggcctgccttgcccaaggcgttccttaagaagtaatgtcagattagctgtggaagtcaggatctcccgggaactccgagaaaaactagccgagcccggagcgcgagccggaaggagaaggggcggtagaatccccactatgggctgtctcgacttgcctggcgaagacatgcgaaagacctggcggaggtttgaggttcccacaagcaaaagcagtaattccgaggacgacctacccgaagactatccagttgtcaaaaagatgcttcacaggctgaccgcagatctgactttggatccaggtacagctcacaggagactgcttatcagtgcggaccgcaggtctgttcagttagcaccaccaggcaccccagcgcctcccgatgggccaaagagatttaaccagcttcccgcagtgctcggcgctcagggcttcggtgccggacgacactgctgggaggttgaaacagcagatgcggctagctgcagggattcctccggcgaggacgcagatgacgaggagtcccactacgccgtgggggcagctggggaatctgtccagaggaagggatgtgtgagactctgccccgctggtgccgtgtgggctgtggaaggtagaggcggaagactgtgggcccttaccgcccctgaacccactcttctgggcggtgtggaaccccctccccgaaggatccgcgtagacttggactgggagcgaggcagggtcgctttctatgacggcaggagcctggacttactgtacgcatttcaggctccaggccctctgggggaacgcatttttcctctgttctgtacctgtgaccccagggcccctctaaggatcgtgcccgctgagtcatag

SEQ ID NO: 218483 - DNA, 1263 bp, Artificial Sequence
  derived and/or modified sequence
atgtggtggagggacctgacacgccttcggctatggctgaaaagagaagccatcccgggagagggcaggaaagctgctaaggtgaacgctggggtgggcgaaaagggaatctatacagctagcagccgcggtggacccccatccgcccgaagcaaagccgtgactgtggtagctgaaggcgcagcctcaaggagctggttgtccatggacgcgccagaacttggtcctgggctggtggagagactggaacagctggcaacatgtcccctctgcggagggtcctttgaggatcctgtactgctggcttgtgaacacagcttctgccgcgcttgcctggctaggagatggggtacccccccagctacaggaacagaagcaagccctactgcctgcccctgctgcggtctgccgtgtcctcggcgaagtctcagaagcaacgtcaggctcgcagtcgaggtgaggatctcgagggaattgcgggagaaactcgccgaacccggagctcgcgctggcagaaggaggggcggtagaattcctactatgggctgtctggacttgcccggtgaagatatgagaaagacatggcgcagattcgaggtgcctacttccaaatccagcaattcggaagacgacttgcctgaggattatccagttgtgaagaaaatgctgcatagactgacagccgacctgactctagatccaggcaccgcacatagacgtttgctaatatcggccgatcggagaagcgtacagctcgctccaccgggaaccccggctccacccgacgggccaaagcgtttcgatcagttgcctgcagtgttgggagcacagggcttcggcgctgggaggcactgctgggaggtggaaacggccgacgccgcaagttgtagggacagctcaggagaagatgcagacgacgaagaatctcactacgccgtgggggctgctggtgagtcagtacagagaaagggttgtgtgcgcctctgtccagcgggagccgtgtgggctgtcgaaggaaggggcggtaggctatgggctttgaccgctccggaaccgaccctgctcggcggtgtggaacctccccctcgcaggattagggtcgatcttgactgggagcgcggtagagtcgccttttacgatgggcgatcactggatcttctttacgccttccaggcccctggcccactgggtgaacggatctttccactgttctgtacatgcgatcctagagcacctctcagaatcgtacctgcagaaagctag

SEQ ID NO: 218484 - DNA, 1263 bp, Artificial Sequence
  derived and/or modified sequence
atgtggtggcgggacctgaccagactcaggctgtggctgaagagagaggcaataccaggcgaggggaggaaggctgcaaaagtgaatgctggcgtcggggaaaaaggcatatataccgctagctcacgtggtgggccaccgtccgctagatccaaagctgttacagtggtcgctgagggggcagcatcccgatcctggctgtcgatggacgcacctgagctgggcccaggcctggtggaacggttggaacagctggccacctgtccactctgtggagggtctttcgaggatcctgttcttcttgcatgtgagcatagcttttgcagagcctgtcttgcaaggcggtggggtacgcctcctgcgactggaactgaggctagccctacggcctgcccctgctgtggcttgccatgcccacgtcgctccctcaggagcaatgttcggctggctgtggaggtccgtatatctagggaactcagagagaagctggccgagccaggcgctcgcgctggacgccgtaggggaggaaggatcccaacaatgggttgcttagatctgcctggcgaagacatgcgcaaaacttggcggagattcgaggtgcctacctcgaaaagctcaaactccgaggatgacctccccgaagattacccggtagtcaagaaaatgcttcacagactcaccgccgatctgacgttagaccctggtacagctcaccgccgtctgctgattagtgctgacagacggtctgtccagcttgcccctccaggcaccccggctccaccagatggtccaaagcgcttcgaccagctgccagccgtgctgggagctcagggctttggcgcaggcagacattgctgggaagtcgagactgccgatgcggcttcttgccgcgattcctccggcgaggatgcggatgatgaagagtcccattacgccgtgggcgctgcaggcgaatctgttcaaaggaagggctgcgttagactctgtcctgccggagccgtctgggcagtggaaggtaggggcggacgcctctgggcattgacagcccctgaacctaccctgctcggaggggtcgagccccctcctaggcgtatcagagtggacttggattgggaacgcggacgtgtggccttctatgacggccgtagcctggatctgctttatgcatttcaggctccaggccctctgggcgagagaatctttcctctgttttgcacatgcgatcctagagccccattgcgaatagttcccgcagagagctag

SEQ ID NO: 218485 - DNA, 2206 bp, Artificial Sequence
  derived and/or modified sequence
cccaaaccttacccgggaagcaggagaaccagatgaggcgttacgcaaggcctggtgtttacctcccgtgggagcctcctccctccctataaagcctgatgtggtggagagatttgacgagactgagactctggttgaagagagaggcaatcccaggagaggggcggaaagcggcaaaagttaatgcgggagtcggagagaagggcatctacacagcaagcagcaggggcggcccgccatctgcgcgctcgaaggcggtcacggtggtcgcggaaggggcggcgtccagatcctggctttccatggatgcgcccgagctgggcccggggctggtggagcgtctggagcagctggcgacgtgtcctctgtgcgggggctccttcgaggacccggtgcttctggcgtgcgagcacagcttctgccgcgcgtgtctggcccgccgctgggggactccgccggcgaccggcaccgaggcttcccccaccgcctgtccctgctgcggcctgccgtgtccccgccgcagcctgaggtctaatgtgcggctggcggtggaggtgcgaatcagccgcgagctgcgagagaagctggctgagcctggggcccgtgcggggagacgccgaggggggcgcatccccaccatgggctgcctggacctgcccggagaggatatgaggaagacatggagacgatttgaagtcccaacatccaagtcatctaattcagaggatgatctccctgaagattatccagtggtcaaaaaaatgcttcatagactgacagccgacctgaccctggaccctgggaccgcacaccgccgcctgctcatctccgccgaccgccgcagcgtacaactggccccaccagggacgcccgcgccccctgacggccccaagcgcttcgatcagctcccagctgtgctgggtgcgcagggcttcggggccggccgccactgctgggaggtggagactgcggacgccgcctcctgcagagactcttctggggaggatgcggacgacgaggagagccactatgcagtgggcgcggccggggaatcagtgcaacgcaagggctgcgtaaggctgtgccctgcgggggccgtgtgggccgtggagggccgcggcggccgcctgtgggccctcacggcacccgaacccaccctgctgggcggtgttgagcccccgccgcggcgcattcgcgtggacctggactgggagcggggccgcgtggccttctacgacggccgctcactcgacctgctttacgccttccaggcgcctggccccctgggggagcgcatcttcccgctgttctgcacctgcgaccctcgtgctccgctccgcattgtaccagcggaaagctgagtctcgtctccaactagaagtttggcccggccactggccctgcagctgctttttgggggtggaattccccactcatttctgggaacacattcacacgcccattgcaggagtattaatagcaacccacattttcgccccaaaataatgagacctcacctggtctccacgtttccacgtccctgctcaaaaccaaatccattcctgccttctggctctcagaatcttctctcccctacagctactacagtacttcctgacttctcccattcaaaccattctaggcctgcaatggggaacaggccctccccatcagtattggtaaagtgaccatgattcctacatagaggctctgctggtcaaatacttgactcccactcttgccactcctagctccagaagggctcagggccttccccacagatctaaggactgggctaccctgcctgtccactgaggtttctcctaaaacaagaggcttgactctggtctgggccctgtggccctctgggaagctttgtacctcttttgcaggatctgggggtggggagggacaagctagttccccaacctcctatgactgctttctatgctcacagccttttttccataagaaccttcttgaaacttctccccgcacatactcacggaaaggaaccaatggtgctatttcccctctctcctcctcaacctgggaatacttcagacatctccaaactcatccttgtgtatagtctcacacccttccccataagtataaatgggcccatatttaacacattttgtgattttgggttatttattttgtgcatctgtggcaataaatgagatctcagtggtggtatgga

SEQ ID NO: 218486 - DNA, 2161 bp, Artificial Sequence
  derived and/or modified sequence
ggcgttacgcaaggcctggtgtttacctcccgtgggagcctcctccctccctataaagcctgatgtggtggagagatttgacgagactgagactctggttgaagagagaggcaatcccaggagaggggcggaaagcggcaaaagttaatgcgggagtcggagagaagggcatctacacagcaagcagcaggggcggcccgccatctgcgcgctcgaaggcggtcacggtggtcgcggaaggggcggcgtccagatcctggctttccatggatgcgcccgagctgggcccggggctggtggagcgtctggagcagctggcgacgtgtcctctgtgcgggggctccttcgaggacccggtgcttctggcgtgcgagcacagcttctgccgcgcgtgtctggcccgccgctgggggactccgccggcgaccggcaccgaggcttcccccaccgcctgtccgtgctgcggcctgccgtgtccccgccgcagcctgaggtctaatgtgcggctggcggtggaggtgcgaatcagccgcgagctgcgagagaagctggctgagcctggggcccgtgcggggagacgccgaggggggcgcatccccaccatgggctgcctggacctgcccggagaggatatgaggaagacatggagacgatttgaagtcccaacacccaagtcatctaattcagaggatgatctccctgaagattatccagtggtcaaaaaaatgcttcatagactgacagccgacctgaccctggaccctgggaccgcacaccgccgcctgctcatctccaccgaccgccgcagcgtacaactggccccaccagggacgcccgcgccccctgacggccccaagcgcttcgatcagctcccagctgtgctgggtgcgcagggcttcggggccggccgccactgctgggaggtggagactgcggacgccgcctcctgcagagactcttctggggaggatgaggacgacgaggagagccactatgcagtgggcgcggccggggaatcagtgcaacgcaagggctgcgtaaggctgtgccctgcgggggccgtgtgggccgtggagggccgcggcggccgcctgtgggccctcacggcacccgagcccaccctgctgggcggtgttgagcccccgccgcggcgcattcgcgtggacctggactgggagcggggccgcgtggccttctacgacggccgctcactcgacctgctttacgccttccaggcgcctggccccctgggggagcgcatcttcccgctgttctgcacctgcgaccctcgtgctccgctccgcattgtaccagcggaaagctgagtctcgtctccaactagaagtttggcccggccactggccctgcagctgctttttgggcgtggaattccccactcatttctgggaacacattcacacgcccattgcaggagtattaatagcaacccacattttcgccccaaaataatgagacctcacctggtctccacgtttccacatccctgctcaaaaccaaatccattcctgccttctggctctcagaatcttctctcccctacagctactacagtacttcctgacttctcccattcaaaccattctaggcctgcaatggggaacaggccctccccatcagtattggtaaagtgaccatgattcctacatagaggctctgctggtcaaatacttgactcccactcttgccactcctagctccagaagggctcagggccttccccacagatctaaggactgggctaccctgcctgtccactgaggtttctcctaaaacaagaggcttgactctggtctgggccctgtggccctctgggaagctttgtactcttttgcaggatctgggggtggggagggacaagctagttccccaacctcctatgactgctttctatgctcacagccttttttccataagaaccttcttgaaacttctccccgcacatacggaaaggaaccaatggtgctatttcccctctctcctcctcaacctgggaatacttcagacatctccaaactcatccttgtgtatagtctcacacccttccccataagtataaatgggcccatatttaacacattttgtgattttgggttatttattttgtgcatctgtggcaataaatgagatctcagtggtggta

SEQ ID NO: 218487 - DNA, 2206 bp, Artificial Sequence
  derived and/or modified sequence
cccaaaccttacccgggaagcaggagaaccagatgaggcgttacgcaaggcctggtgtttacctcccgtgggagcctcctccctccctataaagcctgatgtggtggagagatttgacgagactgagactctggttgaagagagaggcaatcccaggagaggggcggaaagcggcaaaagttaatgcgggagtcggagagaagggcatctacacagcaagcagcaggggcggcccgccatctgcgcgctcgaaggcggtcacggtggtcgcggaaggggcggcgtccagatcctggctttccatggatgcgcccgagctgggcccggggctggtggagcgtctggagcagctggcgacgtgtcctctgtgcgggggctccttcgaggacccggtgcttctggcgtgcgagcacagcttctgccgcgcgtgtctggcccgccgctgggggactccgccggcgaccggcaccgaggcttcccccaccgcctgtccctgctgcggcctgccgtgtccccgccgcagcctgaggtctaatgtgcggctggcggtggaggtgcgaatcagccgcgagctgcgagagaagctggctgagcctggggcccgtgcggggagacgccgaggggggcgcatccccaccatgggctgcctggacctgcccggagaggatatgaggaagacatggagacgatttgaagtcccaacatccaagtcatctaattcagaggatgatctccctgaagattatccagtggtcaaaaaaatgcttcatagactgacagccgacctgaccctggaccctgggaccgcacaccgccgcctgctcatctccgccgaccgccgcagcgtacaactggccccaccagggacgcccgcgccccctgacggccccaagcgcttcgatcagctcccagctgtgctgggtgcgcagggcttcggggccggccgccactgctgggaggtggagactgcggacgccgcctcctgcagagactcttctggggaggatgcggacgacgaggagagccactatgcagtgggcgcggccggggaatcagtgcaacgcaagggctgcgtaaggctgtgccctgcgggggccgtgtgggccgtggggggccgcggcggccgcctgtgggccctcacggcacccgaacccaccctgctgggcggtgttgagcccccgccgcggcgcattcgcgtggacctggactgggagcggggccgcgtggccttctacgacggccgctcactcgacctgctttacgccttccaggcgcctggccccctgggggagcgcatcttcccgctgttctgcacctgcgaccctcgtgctccgctccgcattgtaccagcggaaagctgagtctcgtctccaactagaagtttggcccggccactggccctgcagctgctttttgggggtggaattccccactcatttctgggaacacattcacacgcccattgcaggagtattaatagcaacccacattttcgccccaaaataatgagacctcacctggtctccacgtttccacgtccctgctcaaaaccaaatccattcctgccttctggctctcagaatcttctctcccctacagctactacagtacttcctgacttctcccattcaaaccattctaggcctgcaatggggaacaggccctccccatcagtattggtaaagtgaccatgattcctacatagaggctctgctggtcaaatacttgactcccactcttgccactcctagctccagaagggctcagggccttccccacagatctaaggactgggctaccctgcctgtccactgaggtttctcctaaaacaagaggcttgactctggtctgggccctgtggccctctgggaagctttgtacctcttttgcaggatctgggggtggggagggacaagctagttccccaacctcctatgactgctttctatgctcacagccttttttccataagaaccttcttgaaacttctccccgcacatactcacggaaaggaaccaatggtgctatttcccctctctcctcctcaacctgggaatacttcagacatctccaaactcatccttgtgtatagtctcacacccttccccataagtataaatgggcccatatttaacacattttgtgattttgggttatttattttgtgcatctgtggcaataaatgagatctcagtggtggtatgga

SEQ ID NO: 218488 - DNA, 2206 bp, Artificial Sequence
  derived and/or modified sequence
cccaaaccttacccgggaagcaggagaaccagatgaggcgttacgcaaggcctggtgtttacctcccgtgggagcctcctccctccctataaagcctgatgtggtggagagatttgacgagactgagactctggttgaagagagaggcaatcccaggagaggggcggaaagcggcaaaagttaatgcgggagtcggagagaagggcatctacacagcaagcagcaggggcggcccgccatctgcgcgctcgaaggcggtcacggtggtcgcggaaggggcggcgtccagatcctggctttccatggatgcgcccgagctgggcccggggctggtggagcgtctggagcagctggcgacgtgtcctctgtgcgggggctccttcgaggacccggtgcttctggcgtgcgagcacagcttctgccgcgcgtgtctggcccgccgctgggggactccgccggcgaccggcaccgaggcttcccccaccgcctgtccctgctgcggcctgccgtgtccccgccgcagcctgaggtctaatgtgcggctggcggtggaggtgcgaatcagccgcgagctgcgagagaagctggctgagcctggggcccgtgcggggagacgccgaggggggcgcatccccaccatgggctgcctggacctgcccggagaggatatgaggaagacatggagacgatttgaagtcccaacatccaagtcatctaattcagaggatgatctccctgaagattatccagtggtcaaaaaaatgcttcatagactgacagccgacctgaccctggaccctgggaccgcacaccgccgcctgctcatctccgccgaccgccgcagcgtacaactggccccaccagggacgcccgcgccccctgacggccccaagcgcttcgatcagctcccagctgtgctgggtgcgcagggcttcggggccggccgccactgctgggaggtggagactgcggacgccgcctcctgcagagactcttctggggaggatgcggacgacgaggagagccactatgcagtgggcgcggccggggaatcagtgcaacgcaagggctgcgtaaggctgtgccctgcgggggccgtgtgggccgtggagggccgcggcggccgcctgtgggccctcacggcacccgaacccaccctgctgggcggtgttgagcccccgccgcggcgcattcgcgtggacctggactgggagcggggccgcgtggccttctacgacggccgctcactcgacctgctttacgccttccaggcgcctggccccctgggggagcgcatcttcccgctgttctgcacctgcgaccctcgtgctccgctccgcattgtaccagcggaaagctgagtctcgtctccaactagaagtttggcccggccactggccctgcagctgctttttgggggtggaattccccactcatttctgggaacacattcacacgcccattgcaggagtattaatagcaacccacattttcgccccaaaataatgagacctcacctggtctccacgtttccacgtccctgctcaaaaccaaatccattcctgccttctggctctcagaatcttctctcccctacagctgctacagtacttcctgacttctcccattcaaaccattctaggcctgcaatggggaacaggccctccccatcagtattggtaaagtgaccatgattcctacatagaggctctgctggtcaaatacttgactcccactcttgccactcctagctccagaagggctcagggccttccccacagatctaaggactgggctaccctgcctgtccactgaggtttctcctaaaacaagaggcttgactctggtctgggccctgtggccctctgggaagctttgtacctcttttgcaggatccgggggtggggagggacaagctagttccccaacctcctatgactgctttctatgctcacagccttttttccataagaaccttcttgaaacttctccccgcacatactcacggaaaggaaccaatggtgctatttcccctctctcctcctcaacctgggaatacttcagacatctccaaactcatccttgtgtatagtctcacacccttccccataagtataaatgggcccatatttaacacattttgtgattttgggttatttattttgtgcatctgtggcaataaatgagatctcagtggtggtatgga

SEQ ID NO: 218489 - DNA, 2206 bp, Artificial Sequence
  derived and/or modified sequence
cccaaaccttacccgggaagcaggagaaccagatgaggcgttacgcaaggcctggtgtttacctcccgtgggagcctcctccctccctataaagcctgatgtggtggagagatttgacgagactgagactctggttgaagagagaggcaatcccaggagaggggcggaaagcggcaaaagttaatgcgggagtcggagagaagggcatctacacagcaagcagcaggggcggcccgccatctgcgcgctcgaaggcggtcacggtggtcgcggaaggggcggcgtccagatcctggctttccatggatgcgcccgagctgggcccggggctggtggagcgtctggagcagctggcgacgtgtcctctgtgcgggggctccttcgaggacccggtgcttctggcgtgcgagcacagcttctgccgcgcgtgtctggcccgccgctgggggactccgccggcgaccggcaccgaggcttcccccaccgcctgtccctgctgcggcctgccgtgtccccgccgcagcctgaggtctaatgtgcggctggcggtggaggtgcgaatcagccgcgagctgcgagagaagctggctgagcctggggcccgtgcggggagacgccgaggggggcgcatccccaccatgggctgcctggacctgcccggagaggatatgaggaagacatggagacgatttgaagtcccaacatccaagtcatctaattcagaggatgatctccctgaagattatccagtggtcaaaaaaatgcttcatagactgacagccgacctgaccctggaccctgggaccgcacaccgccgcctgctcatctccgccgaccgccgcagcgtacaactggccccaccagggacgcccgcgccccctgacggccccaagcgcttcaatcagctcccagctgtgctgggtgcgcagggcttcggggccggccgccactgctgggaggtggagactgcggacgccgcctcctgcagagactcttctggggaggatgcggacgacgaggagagccactatgcagtgggcgcggccggggaatcagtgcaacgcaagggctgcgtaaggctgtgccctgcgggggccgtgtgggccgtggagggccgcggcggccgcctgtgggccctcacggcacccgaacccaccctgctgggcggtgttgagcccccgccgcggcgcattcgcgtggacctggactgggagcggggccgcgtggccttctacgacggccgctcactcgacctgctttacgccttccaggcgcctggccccctgggggagcgcatcttcccgctgttctgcacctgcgaccctcgtgctccgctccgcattgtaccagcggaaagctgagtctcgtctccaactagaagtttggcccggccactggccctgcagctgctttttgggggtggaattccccactcatttctgggaacacattcacacgcccattgcaggagtattaatagcaacccacattttcgccccaaaataatgagacctcacctggtctccacgtttccacgtccctgctcaaaaccaaatccattcctgccttctggctctcagaatcttctctcccctacagctactacagtacttcctgacttctcccattcaaaccattctaggcctgcaatggggaacaggccctccccatcagtattggtaaagtgaccatgattcctacatagaggctctgctggtcaaatacttgactcccactcttgccactcctagctccagaagggctcagggccttccccacagatctaaggactgggctaccctgcctgtccactgaggtttctcctaaaacaagaggcttgactctggtctgggccctgtggccctctgggaagctttgtacctcttttgcaggatctgggggtggggagggacaagctagttccccaacctcctatgactgctttctatgctcacagccttttttccataagaaccttcttgaaacttctccccgcacatactcacggaaaggaaccaatggtgctatttcccctctctcctcctcaacctgggaatacttcagacatctccaaactcatccttgtgtatagtctcacacccttccccataagtataaatgggcccatatttaacacattttgtgattttgggttatttattttgtgcatctgtggcaataaatgagatctcagtggtggtatgga

SEQ ID NO: 218490 - DNA, 2206 bp, Artificial Sequence
  derived and/or modified sequence
cccaaaccttacccgggaagcaggagaaccagatgaggcgttacgcaaggcctggtgtttacctcccgtgggagcctcctccctccctataaagcctgatgtggtggagagatttgacgagactgagactctggttgaagagagaggcaatcccaggagaggggcggaaagcggcaaaagttaatgcgggagtcggagagaagggcatctacacagcaagcagcaggggcggcccgccatctgcgcgctcgaaggcggtcacggtggtcgcggaaggggcggcgtccagatcctggctttccatggatgcgcccgagctgggcccggggctggtggagcgtctggagcagctggcgacgtgtcctctgtgcgggggctccttcgaggacccggtgcttctggcgtgcgagcacagcttctgccgcgcgtgtctggcccgccgctgggggactccgccggcgaccggcaccgaggcttcccccaccgcctgtccctgctgcggcctgccgtgtccccgccgcagcctgaggtctaatgtgcggctggcggtggaggtgcgaatcagccgcgagctgcgagagaagctggctgagcctggggcccgtgcggggagacgccgaggggggcgcatccccaccatgggctgcctggacctgcccggagaggatatgaggaagacatggagacgatttgaagtcccaacatccaagtcatctaattcagaggatgatctccctgaagattatccagtggtcaaaaaaatgcttcatagactgacagccgacctgaccctggaccctgggaccgcacaccgccgcctgctcatctccgccgaccgccgcagcgtacaactggccccaccagggacgcccgcgccccctgacggccccaagcgcttcgatcagctcccagctgtgctgggtgcgcagggcttcggggccggccgccactgctgggaggtggagactgcggacgccgcctcctgcagagactcttctggggaggatgcggacgacgaggagagccactatgcagtgggcgcggccggggaatcagtgcaacgcaagggctgcgtaaggctgtgccctgcgggggccgtgtgggccgtggagggccgcggcggccgcctgtgggccctcacggcacccgaacccaccctgctgggcggtgttgagcccccgccgcggcgcattcgcgtggacctggactgggagcggggccgcgtggccttctacgacggccgctcactcgacctgctttacgccttccaggcgcctggccccctgggggagcgcatcttcccgctgttctgcacctgcgaccctcgtgctccgctccgcattgtaccagcggaaagctgagtctcgtctccaactagaagtttggcccggccactggccctgcagctgctttttgggggtggaattccccactcatttctgggaacacattcacacgcccattgcaggagtattaatagcaacccacattttcgccccaaaataatgagacctcacctggtctccacgtttccacgtccctgctcaaaaccaaatccattcctgccttctggctctcagaatcttctctcccctacagctactacagtacttcctgacttctcccattcaaaccattctaggcctgcaatggggaacaggccctccccatcagtattggtaaagtgaccatgattcctacatagaggctctgctggtcaaatacttgactcccactcttgccactcctagctccagaagggctcagggccttccccacagatctaaggactgggctaccctgcctgtccactgaggtttctcctaaaacaagaggcttgactctggtctgggccctgtggccctctgggaagctttgtacctcttttgcaggatccgggggtggggagggacaagctagttccccaacctcctatgactgctttctatgctcacagccttttttccataagaaccttcttgaaacttctccccgcacatactcacggaaaggaaccaatggtgctatttcccctctctcctcctcaacctgggaatacttcagacatctccaaactcatccttgtgtatagtctcacacccttccccataagtataaatgggcccatatttaacacattttgtgattttgggttatttattttgtgcatctgtggcaataaatgagatctcagtggtggtatgga

SEQ ID NO: 218491 - DNA, 1263 bp, Artificial Sequence
  derived and/or modified sequence
atgtggtggagagacctgaccagactgagactgtggctgaagagagaggccatccccggcgagggcagaaaggccgccaaggtgaacgccggcgtgggcgagaagggcatctacaccgccagcagcagaggcggcccccccagcgccagaagcaaggccgtgaccgtggtggccgagggcgccgccagcagaagctggctgagcatggacgcccccgagctgggccccggcctggtggagagactggagcagctggccacctgccccctgtgcggcggcagcttcgaggaccccgtgctgctggcctgcgagcacagcttctgcagagcctgcctggccagaagatggggcaccccccccgccaccggcaccgaggccagccccaccgcctgcccctgctgcggcctgccctgccccagaagaagcctgagaagcaacgtgagactggccgtggaggtgagaatcagcagagagctgagagagaagctggccgagcccggcgccagagccggcagaagaagaggcggcagaatccccaccatgggctgcctggacctgcccggcgaggacatgagaaagacctggagaagattcgaggtgcccaccagcaagagcagcaacagcgaggacgacctgcccgaggactaccccgtggtgaagaagatgctgcacagactgaccgccgacctgaccctggaccccggcaccgcccacagaagactgctgatcagcgccgacagaagaagcgtgcagctggccccccccggcacccccgccccccccgacggccccaagagattcgaccagctgcccgccgtgctgggcgcccagggcttcggcgccggcagacactgctgggaggtggagaccgccgacgccgccagctgcagagacagcagcggcgaggacgccgacgacgaggagagccactacgccgtgggcgccgccggcgagagcgtgcagagaaagggctgcgtgagactgtgccccgccggcgccgtgtgggccgtggagggcagaggcggcagactgtgggccctgaccgcccccgagcccaccctgctgggcggcgtggagcccccccccagaagaatcagagtggacctggactgggagagaggcagagtggccttctacgacggcagaagcctggacctgctgtacgccttccaggcccccggccccctgggcgagagaatcttccccctgttctgcacctgcgaccccagagcccccctgagaatcgtgcccgccgagagctag

SEQ ID NO: 218492 - DNA, 1263 bp, Artificial Sequence
  derived and/or modified sequence
atgtggtggagagacctgaccagactgagactgtggctgaagagagaggccatccccggcgagggcagaaaggccgccaaggtgaacgccggcgtgggcgagaagggcatctacaccgccagcagcagaggcggcccccccagcgccagaagcaaggccgtgaccgtggtggccgagggcgccgccagcagaagctggctgagcatggacgcccccgagctgggccccggcctggtggagagactggagcagctggccacctgccccctgtgcggcggcagcttcgaggaccccgtgctgctggcctgcgagcacagcttctgcagagcctgcctggccagaagatggggcaccccccccgccaccggcaccgaggccagccccaccgcctgcccctgctgcggcctgccctgccccagaagaagcctgagaagcaacgtgagactggccgtggaggtgagaatcagcagagagctgagagagaagctggccgagcccggcgccagagccggcagaagaagaggcggcagaatccccaccatgggctgcctggacctgcccggcgaggacatgagaaagacctggagaagattcgaggtgcccacccccaagagcagcaacagcgaggacgacctgcccgaggactaccccgtggtgaagaagatgctgcacagactgaccgccgacctgaccctggaccccggcaccgcccacagaagactgctgatcagcaccgacagaagaagcgtgcagctggccccccccggcacccccgccccccccgacggccccaagagattcgaccagctgcccgccgtgctgggcgcccagggcttcggcgccggcagacactgctgggaggtggagaccgccgacgccgccagctgcagagacagcagcggcgaggacgaggacgacgaggagagccactacgccgtgggcgccgccggcgagagcgtgcagagaaagggctgcgtgagactgtgccccgccggcgccgtgtgggccgtggagggcagaggcggcagactgtgggccctgaccgcccccgagcccaccctgctgggcggcgtggagcccccccccagaagaatcagagtggacctggactgggagagaggcagagtggccttctacgacggcagaagcctggacctgctgtacgccttccaggcccccggccccctgggcgagagaatcttccccctgttctgcacctgcgaccccagagcccccctgagaatcgtgcccgccgagagctag

SEQ ID NO: 218493 - DNA, 1263 bp, Artificial Sequence
  derived and/or modified sequence
atgtggtggagagacctgaccagactgagactgtggctgaagagagaggccatccccggcgagggcagaaaggccgccaaggtgaacgccggcgtgggcgagaagggcatctacaccgccagcagcagaggcggcccccccagcgccagaagcaaggccgtgaccgtggtggccgagggcgccgccagcagaagctggctgagcatggacgcccccgagctgggccccggcctggtggagagactggagcagctggccacctgccccctgtgcggcggcagcttcgaggaccccgtgctgctggcctgcgagcacagcttctgcagagcctgcctggccagaagatggggcaccccccccgccaccggcaccgaggccagccccaccgcctgcccctgctgcggcctgccctgccccagaagaagcctgagaagcaacgtgagactggccgtggaggtgagaatcagcagagagctgagagagaagctggccgagcccggcgccagagccggcagaagaagaggcggcagaatccccaccatgggctgcctggacctgcccggcgaggacatgagaaagacctggagaagattcgaggtgcccaccagcaagagcagcaacagcgaggacgacctgcccgaggactaccccgtggtgaagaagatgctgcacagactgaccgccgacctgaccctggaccccggcaccgcccacagaagactgctgatcagcgccgacagaagaagcgtgcagctggccccccccggcacccccgccccccccgacggccccaagagattcgaccagctgcccgccgtgctgggcgcccagggcttcggcgccggcagacactgctgggaggtggagaccgccgacgccgccagctgcagagacagcagcggcgaggacgccgacgacgaggagagccactacgccgtgggcgccgccggcgagagcgtgcagagaaagggctgcgtgagactgtgccccgccggcgccgtgtgggccgtgggcggcagaggcggcagactgtgggccctgaccgcccccgagcccaccctgctgggcggcgtggagcccccccccagaagaatcagagtggacctggactgggagagaggcagagtggccttctacgacggcagaagcctggacctgctgtacgccttccaggcccccggccccctgggcgagagaatcttccccctgttctgcacctgcgaccccagagcccccctgagaatcgtgcccgccgagagctag

SEQ ID NO: 218494 - DNA, 1263 bp, Artificial Sequence
  derived and/or modified sequence
atgtggtggagagacctgaccagactgagactgtggctgaagagagaggccatccccggcgagggcagaaaggccgccaaggtgaacgccggcgtgggcgagaagggcatctacaccgccagcagcagaggcggcccccccagcgccagaagcaaggccgtgaccgtggtggccgagggcgccgccagcagaagctggctgagcatggacgcccccgagctgggccccggcctggtggagagactggagcagctggccacctgccccctgtgcggcggcagcttcgaggaccccgtgctgctggcctgcgagcacagcttctgcagagcctgcctggccagaagatggggcaccccccccgccaccggcaccgaggccagccccaccgcctgcccctgctgcggcctgccctgccccagaagaagcctgagaagcaacgtgagactggccgtggaggtgagaatcagcagagagctgagagagaagctggccgagcccggcgccagagccggcagaagaagaggcggcagaatccccaccatgggctgcctggacctgcccggcgaggacatgagaaagacctggagaagattcgaggtgcccaccagcaagagcagcaacagcgaggacgacctgcccgaggactaccccgtggtgaagaagatgctgcacagactgaccgccgacctgaccctggaccccggcaccgcccacagaagactgctgatcagcgccgacagaagaagcgtgcagctggccccccccggcacccccgccccccccgacggccccaagagattcaaccagctgcccgccgtgctgggcgcccagggcttcggcgccggcagacactgctgggaggtggagaccgccgacgccgccagctgcagagacagcagcggcgaggacgccgacgacgaggagagccactacgccgtgggcgccgccggcgagagcgtgcagagaaagggctgcgtgagactgtgccccgccggcgccgtgtgggccgtggagggcagaggcggcagactgtgggccctgaccgcccccgagcccaccctgctgggcggcgtggagcccccccccagaagaatcagagtggacctggactgggagagaggcagagtggccttctacgacggcagaagcctggacctgctgtacgccttccaggcccccggccccctgggcgagagaatcttccccctgttctgcacctgcgaccccagagcccccctgagaatcgtgcccgccgagagctag

SEQ ID NO: 218495 - protein, 213 aa, Artificial Sequence
  derived and/or modified sequence
MQLPLALCLVCLLVHTAFRVVEGQGWQAFKNDATEIIPELGEYPEPPPELENNKTMNRAENGGRPPHHPFETKDVSEYSCRELHFTRYVTDGPCRSAKPVTELVCSGQCGPARLLPNAIGRGKWWRPSGPDFRCIPDRYRAQRVQLLCPGGEAPRARKVRLVASCKCKRLTRFHNQSELKDFGTEAARPQKGRKPRPRARSAKANQAELENAY

SEQ ID NO: 218496 - DNA, 642 bp, Artificial Sequence
  derived and/or modified sequence
atgcagctacctctggccctgtgtctggtttgcctcctcgtgcataccgcattccgcgtggtggaaggccaaggctggcaggcatttaaaaacgatgcaactgagattatacctgaactgggcgagtacccagaaccacctcctgaactggagaacaacaaaaccatgaatagggccgagaatggggggcgtccgccccaccatccctttgaaacaaaggacgtgtctgaatactcctgccgggaactgcatttcactcgatatgtaaccgatgggccttgccgatcagccaagcctgtcaccgaactggtgtgctccggtcagtgcggaccagcccgtcttcttccaaatgctatcggcaggggaaagtggtggagaccgtccggcccagacttccgttgcattcctgatcgctaccgggcccagagggtgcagttgctctgtcccggcggcgaggctcccagggctcgtaaagtgaggctggtggcttcttgcaaatgtaagcgcttaaccagattccacaaccagagcgagcttaaggacttcggcaccgaggccgcgcgccctcagaagggaaggaagccaaggcccagagcacgctccgccaaggcaaaccaggcagaactggagaacgcgtattag

SEQ ID NO: 218497 - DNA, 642 bp, Artificial Sequence
  derived and/or modified sequence
atgcagctgcccctggccctgtgcctggtgtgcctgctggtgcacacagccttccgggtggtggagggccagggctggcaggccttcaagaatgatgccacagagatcatccctgagctgggggagtacccagagcccccacctgagctggagaacaacaagaccatgaacagagcagaaaatggaggccggcccccccaccacccctttgagaccaaggatgtgtctgagtacagctgccgggagctgcacttcacccgctacgtgacagatggcccctgccgcagcgccaagcctgtgacagagctggtgtgcagcggccagtgtggccctgcccggctgctgcccaatgccatcggccggggcaagtggtggaggcccagcggccctgacttccgctgcatcccagaccgctaccgggcccagagggtgcagctgctgtgccctggaggagaggccccccgggccaggaaggtgcggctggtggccagctgcaagtgcaagaggctgacccgcttccacaaccagagcgagctgaaggactttggaacagaggccgcccggccccagaagggcaggaagccccggccccgggcccggagcgccaaggccaaccaggccgagctggagaatgcctactag

SEQ ID NO: 218498 - DNA, 642 bp, Artificial Sequence
  derived and/or modified sequence
atgcagctgcccctggccctgtgcctggtgtgcctgctggtgcacaccgcttttcgcgtggttgagggccaggggtggcaggccttcaaaaacgacgcgacagagataatacccgagctgggagaatatcccgagcctccccccgaactggaaaataataaaacaatgaatcgggccgaaaacggcggaagaccacctcaccacccgttcgagaccaaagacgtgtcagagtactcatgcagggagctgcattttaccagatatgtgactgatggtccttgcagatctgcaaagcccgtgacggagctggtgtgtagcggccaatgtgggcccgcgcgccttcttccaaacgctatcggcaggggtaagtggtggaggccaagtggacccgacttccgatgtattccagatcgctacagagcccagagagtccagctgctgtgcccaggtggtgaggctcctagagcccgcaaggtgcgtcttgtagcgagttgtaaatgcaaacgactgacccgctttcataaccagagtgaactgaaggacttcggcacagaggccgcacgcccgcagaaaggtcgaaaacccagaccacgtgcccggtctgcaaaggcaaaccaggccgagttagagaacgcctattag

SEQ ID NO: 218499 - DNA, 642 bp, Artificial Sequence
  derived and/or modified sequence
atgcaactgccactggctctgtgtttggtatgtctgctggtgcacacagcatttagggtggtggagggccagggttggcaggcctttaaaaatgatgccaccgaaatcatccctgagttgggagaataccccgaacctcctcctgagctggagaataacaagactatgaatagagctgagaacggcggtaggcctccacaccatccctttgaaactaaggatgtcagcgagtattcctgtcgggagcttcatttcacccgttacgtgacggatggcccatgtagatccgctaagccagtgaccgaacttgtatgcagtggccagtgcgggcctgcgcgactcctcccgaacgccattggaaggggaaagtggtggaggccatccggacccgacttcaggtgcatccccgacaggtacagagcccagcgcgtacaattattatgccccggaggcgaggccccaagagcccgaaaggtcagactggtggccagctgtaaatgcaaaaggctgacacggttccacaatcaaagtgaactgaaggacttcggaactgaggcagcccgaccccaaaaaggacgcaagccaagaccaagggcccgaagtgccaaagccaatcaggcagaactagagaacgcctattag

SEQ ID NO: 218500 - DNA, 2296 bp, Artificial Sequence
  derived and/or modified sequence
agagcctgtgctactggaaggtggcgtgccctcctctggctggtaccatgcagctcccactggccctgtgtctcgtctgcctgctggtacacacagccttccgtgtagtggagggccaggggtggcaggcgttcaagaatgatgccacggaaatcatccccgagctcggagagtaccccgagcctccaccggagctggagaacaacaagaccatgaaccgggcggagaacggagggcggcctccccaccacccctttgagaccaaagacgtgtccgagtacagctgccgcgagctgcacttcacccgctacgtgaccgatgggccgtgccgcagcgccaagccggtcaccgagctggtgtgctccggccagtgcggcccggcgcgcctgctgcccaacgccatcggccgcggcaagtggtggcgacctagtgggcccgacttccgctgcatccccgaccgctaccgcgcgcagcgcgtgcagctgctgtgtcccggtggtgaggcgccgcgcgcgcgcaaggtgcgcctggtggcctcgtgcaagtgcaagcgcctcacccgcttccacaaccagtcggagctcaaggacttcgggaccgaggccgctcggccgcagaagggccggaagccgcggccccgcgcccggagcgccaaagccaaccaggccgagctggagaacgcctactagagcccgcccgcgcccctccccaccggcgggcgccccggccctgaacccgcgccccacatttctgtcctctgcgcgtggtttgattgtttatatttcattgtaaatgcctgcaacccagggcagggggctgagaccttccaggccctgaggaatcccgggcgccggcaaggcccccctcagcccgccagctgaggggtcccacggggcaggggagggaattgagagtcacagacactgagccacgcagccccgcctctggggccgcctacctttgctggtcccacttcagaggaggcagaaatggaagcattttcaccgccctggggttttaagggagcggtgtgggagtgggaaagtccagggactggttaagaaagttggataagattcccccttgcacctcgctgcccatcagaaagcctgaggcgtgcccagagcacaagactgggggcaactgtagatgtggtttctagtcctggctctgccactaacttgctgtgtaaccttgaactacacaattctccttcgggacctcaatttccactttgtaaaatgagggtggaggtgggaataggatctcgaggagactattggcatatgattccaaggactccagtgccttttgaatgggcagaggtgagagagagagagagaaagagagagaatgaatgcagttgcattgattcagtgccaaggtcacttccagaattcagagttgtgatgctctcttctgacagccaaagatgaaaaacaaacagaaaaaaaaaagtaaagagtctatttatggctgacatatttacggctgacaaactcctggaagaagctatgctgcttcccagcctggcttccccggatgtttggctacctccacccctccatctcaaagaaataacatcatccattggggtagaaaaggagagggtccgagggtggtgggagggatagaaatcacatccgccccaacttcccaaagagcagcatccctcccccgacccatagccatgttttaaagtcaccttccgaagagaagtgaaaggttcaaggacactggccttgcaggcccgagggagcagccatcacaaactcacagaccagcacatcccttttgagacaccgccttctgcccaccactcacggacacatttctgcctagaaaacagcttcttactgctcttacatgtgatggcatatcttacactaaaagaatattattgggggaaaaactacaagtgctgtacatatgctgagaaactgcagagcataatactgccacccaaaaatctttttgaaaatcatttccagacaacctcttactttctgtgtagtttttaattgttaaaaaaaaaaagttttaaacagaagcacatgacatatgaaagcctgcaggactggtcgtttttttggcaattcttccacgtgggacttgtccacaagaatgaaagtagtggtttttaaagagttaagttacatatttattttctcacttaagttatttatgcaaaagtttttcttgtagagaatgacaatgttaatattgctttatgaattaacagtctgttcttccagagtccagagacattgttaataaagacaatgaatcatgaccg

SEQ ID NO: 218501 - DNA, 642 bp, Artificial Sequence
  derived and/or modified sequence
atgcagctgcccctggccctgtgcctggtgtgcctgctggtgcacaccgccttcagagtggtggagggccagggctggcaggccttcaagaacgacgccaccgagatcatccccgagctgggcgagtaccccgagcccccccccgagctggagaacaacaagaccatgaacagagccgagaacggcggcagacccccccaccaccccttcgagaccaaggacgtgagcgagtacagctgcagagagctgcacttcaccagatacgtgaccgacggcccctgcagaagcgccaagcccgtgaccgagctggtgtgcagcggccagtgcggccccgccagactgctgcccaacgccatcggcagaggcaagtggtggagacccagcggccccgacttcagatgcatccccgacagatacagagcccagagagtgcagctgctgtgccccggcggcgaggcccccagagccagaaaggtgagactggtggccagctgcaagtgcaagagactgaccagattccacaaccagagcgagctgaaggacttcggcaccgaggccgccagaccccagaagggcagaaagcccagacccagagccagaagcgccaaggccaaccaggccgagctggagaacgcctactag

SEQ ID NO: 218502 - protein, 482 aa, Artificial Sequence
  derived and/or modified sequence
MASLGPAAAGEQASGAEAEPGPAGPPPPPSPSSLGPLLPLQREPLYNWQATKASLKERFAFLFNSELLSDVRFVLGKGRGAAAAGGPQRIPAHRFVLAAGSAVFDAMFNGGMATTSAEIELPDVEPAAFLALLRFLYSDEVQIGPETVMTTLYTAKKYAVPALEAHCVEFLTKHLRADNAFMLLTQARLFDEPQLASLCLDTIDKSTMDAISAEGFTDIDIDTLCAVLERDTLSIRESRLFGAVVRWAEAECQRQQLPVTFGNKQKVLGKALSLIRFPLMTIEEFAAGPAQSGILSDREVVNLFLHFTVNPKPRVEYIDRPRCCLRGKECCINRFQQVESRWGYSGTSDRIRFTVNRRISIVGFGLYGSIHGPTDYQVNIQIIEYEKKQTLGQNDTGFSCDGTANTFRVMFKEPIEILPNVCYTACATLKGPDSHYGTKGLKKVVHETPAASKTVFFFFSSPGNNNGTSIEDGQIPEIIFYT

SEQ ID NO: 218503 - DNA, 3308 bp, Artificial Sequence
  derived and/or modified sequence
agtcctgttacacctcccgcggccgcgcacagcggcaacccgggcgtgcgggggcgcgcgcggtcagggaggggcctgcggaggcgcgaggcccccggaagcgcctttcccggaaggcagggaggcagcgccggcctccggaggcggcctgggcgatggcggcggagttttgtccataacgtgggcaaccgcgcagctggaggatggcctcactcgggcctgccgcagctggggagcaggcgtcgggggctgaggcggagccgggccccgcggggccgccgccgccgccctcaccgtcctctctggggcccctgctccccctgcagcgggaacctctctacaactggcaggcgaccaaggcgtcgctgaaggagcgcttcgccttcctcttcaactcggagctgctgagcgatgtgcgcttcgtactgggcaagggtcgcggcgccgccgccgctgggggcccgcagcgcatccccgcccaccgcttcgtgctggcggccggcagcgccgtctttgacgccatgttcaacggcggcatggccaccacgtcggccgagatcgagctgccggacgtggagcccgcagccttcctggcgctgctgagatttctatattcagatgaagttcaaattggtccagaaacagttatgaccactctttatactgccaagaaatacgcagtcccagccttggaagcacactgtgtagaatttctcaccaaacatcttagggcagataatgcctttatgttacttactcaggctcgattatttgatgaacctcagcttgctagtctttgtctagatacaatagacaaaagcacaatggatgcaataagtgcagaagggtttactgatattgatatagatacactctgtgcagttttagagagagacacactcagtattcgagaaagtcgactttttggagctgttgtacgctgggcagaagcagaatgtcagagacaacaattacctgtgacttttgggaataaacaaaaagttctaggaaaagcactttccttaatccggttcccactgatgacaattgaggaatttgcagcaggtcctgctcaatctggaattttgtcagatcgtgaagtggtaaacctctttcttcattttactgtcaaccctaaaccccgagttgaatacattgaccgaccaagatgctgtctcaggggaaaggaatgctgcatcaatagattccagcaagtagaaagccgctggggttacagtgggacgagtgatcgaatcagattcacagttaatagaaggatctctatagttggatttggcttgtatggatctattcatggccctacagattatcaagtgaatatacagatcattgaatatgagaaaaagcaaaccctgggacagaatgataccggctttagttgtgatgggacagctaacacattcagggtcatgttcaaggaacccatagagatcctgcccaatgtgtgctacacagcatgtgcaacactcaaaggtccagattcccactatggcacaaaaggattgaagaaagtagtgcatgagacacctgctgcaagcaagactgtttttttcttttttagttcccctggcaataataatggcacttcaatagaagatggacaaattccagaaatcatattttatacataatttagcattataatacatcttggctaaataataccatacaatctagtgtcaaaaacataaatggccacaaaaaagtagtttgagtgttatgaatatttaaaattgtaagataagaaacagtttcttagagcagatagaaaaatgcttatttaaatctttgcatgatttaaaaacagattttccattttcttacaactttaagagaaaagaactgggtttaatggtttaaaaaaaagcacagctttttcaccttcatcttgtataatttcatagattggctgacttagggtctttcaatagtttgggaattgaaagattcttgttatatatagctagtttgggtttgtttttgttttaactattttgaaggttaggtgagatgggcaaataggcttaactattttgaaggttggatgaaaagagatgggtcagtattcctacagaattcttattaactcaaataactaaatttcagaaaattaagaagctgactttatatttggtggtttgaagtatcttgttgttagcatttgtaataatgctaaaaaaggcctaataaaatgcccaagaaaatattcagtgcatttatagagaaggatattttgtagtagtatagtaatgtgttatgtagtacagttttaaagctataaatggaattttgtgtaaattcacaaaaatgtgatataaacaggatctaagactggattccctgtcactaaactgcaccactatacctgtctctctgtgtgggggacactgctgatgattcccaagattgagatgatgacggtgatgacgactgggtgaacagccatcacttcaacattgtgataatccttcacagcaagaaaccgaataaaatactaacatttctaacaactgctctgacattgtaaagagatccaacagaatcactcctgctgaaaaatacgctttctgccacctacacatttctatttaggaagtaaaatttgcttcatggtcatgaccccattagtcagtgttacagctgtgttggggataggaagtatatctggcagattgatatttatacacttttttataaagcagattttaaaatatagtaacatccatttttttcccttgaaagtgattctcttataaaaaatgaaagtggagtttaaggtatatcaaatcgttgtggaaggtgattaaaaatcaaaattcttttaaatatcaacttaattttttctaagtaagatacaaaaaattttcatctaaagtaatatttcactttatattgtaaagaaggtaggtatattggtggctgaggtctcttgaaattgctaaagggaaatttttctatggtaatgctcttacggatataaacctcagttaaatggaattatctatgggatgtgtggttctggttaactaaaaattaaccagtaaacactctgtagtaaccattacagaaaatacttctgccttaaaaaatatgatatgccagagatgagttagtgtttcttgacgttggagaccttttaaatgcctcatctgttgtactgaacaattgaaactgcatgcagccataaaagggacaagaaacagaactgtttactaactttgggacatcccctggagtttttaaaaataaataaatatatatatatataaaaaaaaaaaaaaaaaaaa

SEQ ID NO: 218504 - DNA, 1449 bp, Artificial Sequence
  derived and/or modified sequence
atggcctccctggggcctgcagcagccggtgaacaagccagcggcgcagaggcagagccaggccctgctggcccccctcctccaccctcgcctagcagcctgggtcctctgctgccactacagcgggagcccctgtataactggcaggccacaaaggcctcattgaaagagcgcttcgcatttctttttaacagcgagttgttatcggatgtgaggttcgtcctgggtaagggcagaggggccgccgcggccggagggccgcagaggatcccggcgcaccgattcgtgcttgccgccggatccgccgtgtttgatgctatgtttaacggcggaatggcgaccacctctgccgaaattgagctgcccgatgtggagcccgcagcttttttagccctcctcaggtttttgtactctgacgaggtccagatagggccagaaacggtcatgacaactctctatacagcaaaaaagtatgcagttcccgcattggaagctcactgcgtcgaatttctgacaaagcacctaagggcagacaacgcctttatgctgcttacacaggcccggctgttcgacgaaccgcagcttgcatctctttgtctggacactattgacaagagtacaatggatgccatttcggccgagggcttcaccgacatcgacattgataccctctgtgctgtcctcgagagagataccctctctatcagggagtcaaggctgttcggggctgtggtacggtgggccgaagctgaatgccagaggcagcagctgccagtgaccttcggcaacaagcaaaaagtgctgggcaaggctctgagtcttatccggttcccactaatgaccattgaagagttcgccgccgggccggctcagagcggcatcctatccgatcgcgaagtcgtcaatctgttcttgcacttcaccgtcaaccccaaaccacgagttgaatacattgacagacccagatgctgcctgagaggcaaggagtgttgcatcaaccggtttcagcaggtcgagtcacgttggggctacagtggcacatccgatagaatccgattcacagtgaacaggcgaattagcattgtaggctttggtttgtatggaagtatccacgggccaactgactaccaggtcaatatacaaatcatcgagtacgagaagaagcagaccctgggccagaatgataccggctttagctgcgacggtaccgctaacactttccgtgtgatgttcaaagaacccatcgagattctgcccaacgtgtgctataccgcctgtgccactctgaagggccccgattcacactacggtactaagggcttaaaaaaagtggtacatgagacccccgctgcgtccaagaccgtttttttctttttctcttccccagggaataacaatgggacaagcatcgaggacggccagatcccggagattattttttacacctag

SEQ ID NO: 218505 - DNA, 1449 bp, Artificial Sequence
  derived and/or modified sequence
atggccagcctgggccctgctgctgctggggagcaggccagcggggctgaggccgagcccggccctgctggccccccacctccacccagccccagcagcctgggccccctgctgcccctgcagcgggagcccctgtacaactggcaggccaccaaggccagcctgaaggagagatttgccttcctgttcaacagcgagctgctgagtgatgtgcgctttgtgctgggcaagggcagaggagctgctgctgctgggggcccccagaggatcccagcccacagatttgtgctggccgccggcagcgctgtgtttgatgccatgtttaatggaggcatggccaccaccagcgctgagattgagctgcctgatgtggagcctgctgccttcctggccctgctgcgcttcctgtacagtgatgaggtgcagatcggccctgagaccgtgatgaccaccctgtacacagccaagaagtatgctgtgcctgccctggaggcccactgtgtggagttcctgaccaagcacctgcgggctgacaatgccttcatgctgctgacccaggcccggctgtttgatgagccccagctggccagcctgtgcctggacaccatcgacaagagcaccatggatgccatctctgctgagggcttcacagacattgatattgacaccctgtgtgctgtgctggagcgggacaccctgagcatccgggagagccggctgtttggagctgtggtgcgctgggccgaggccgagtgccagaggcagcagctgcctgtgacctttggaaacaagcagaaggtgctgggcaaggccctgagcctcatccgcttccccctgatgaccatcgaggagtttgctgctggccctgcccagagcggcatcctgagtgaccgggaggtggtgaacctcttcctgcacttcaccgtgaaccccaagccccgggtggagtacatcgaccggccccgctgctgcctgcggggcaaggagtgctgcatcaaccgcttccagcaggtggagagccgctggggctacagcggcaccagtgaccgcatccgcttcaccgtgaacagacgcatcagcatcgtgggcttcggcctgtatggcagcatccacggccccacagactaccaggtgaacatccagatcattgaatatgagaagaagcagaccctgggccagaatgacaccggcttcagctgtgatggaacagccaacaccttccgggtgatgttcaaggagcccatcgagatcctgcccaacgtgtgctacacagcctgtgccaccctgaagggccctgacagccactacggcaccaagggcctgaagaaggtggtgcatgagaccccagctgccagcaagacagtgttcttcttcttcagcagccctggcaacaacaacggcaccagcattgaagatggccagatccctgagatcatcttctacacctag

SEQ ID NO: 218506 - DNA, 1449 bp, Artificial Sequence
  derived and/or modified sequence
atggccagcctgggccccgccgccgccggcgagcaggccagcggcgccgaagcggaacctggccccgcgggtccaccacctcctccttccccgtcaagcctgggtcctctgctccctctacagcgcgagcccctgtataactggcaggccacaaaagcctcattaaaggaacgctttgcatttctctttaacagtgagttgctgtccgatgtgcgctttgtgttggggaagggtaggggcgccgctgctgcaggcgggccccagcgcatccccgctcaccgctttgtgttagcggctgggagtgccgtgttcgacgccatgtttaatggcgggatggccactacatccgctgaaatcgagctgcccgacgtcgagccggcagcattccttgcgcttctgcgatttctgtattctgatgaagtacagataggacccgagactgtaatgactacactgtacactgcgaagaaatatgcagtgcccgcactggaggctcactgtgtggaatttttgaccaaacacttgcgcgctgacaacgcttttatgttgctcacacaggcccggttattcgacgagccacagctggccagcctctgcctcgatacaatagacaaaagtactatggacgctatatccgctgaaggttttacagacattgacatcgataccctgtgcgctgtgctagagcgagataccctctccattagagaaagcaggctgttcggtgccgtcgttcggtgggccgaggcagagtgtcagcggcaacagctgccggtcacattcggtaataaacagaaggtgttggggaaagccctgtcgctgatccgctttcctctgatgactatcgaagaatttgccgcaggtcctgcacagtcaggtatactgagcgatcgggaggttgtgaatctttttctgcacttcacagttaacccaaagccgcgcgttgaatatattgataggcctcgttgctgtttgcggggaaaggagtgttgtatcaatcggttccagcaggtcgagtcacggtggggctattccggaactagcgatagaatccggtttaccgtgaacagacgcatctctatcgtgggctttgggctttacggttccatccacggccctacagattatcaagtaaacatacagattatcgagtacgagaagaagcagactctgggtcagaatgatactggcttttcatgcgacggaacagcgaataccttcagggtgatgtttaaggagcccatcgaaatcttgcctaatgtgtgttacacggcatgtgcaacactcaaagggccggactctcattacggcactaagggactcaaaaaggtcgtgcacgagaccccagccgcaagtaagaccgtcttctttttctttagttctcccggaaataacaacgggacatccatagaggacgggcaaatacctgaaatcatcttttacacatag

SEQ ID NO: 218507 - DNA, 1449 bp, Artificial Sequence
  derived and/or modified sequence
atggccagcctgggacccgcagctgccggagagcaagcaagcggtgcggaggcagagcccggaccagctggcccaccacctccaccaagtccgagctcgctaggacccttgctgcccctgcagcgcgagcccctctataactggcaggccaccaaggcctcactcaaggagagatttgcattcttattcaacagtgagctcttgtccgatgtgcgctttgtgctgggaaaaggcagaggcgctgccgcagccggtggtcctcagcgaattccggctcacaggtttgtgttagctgcgggatccgccgtttttgacgctatgtttaatgggggaatggcgaccacctcagcagagatagaattgccggacgtggaaccggcagccttcctcgcactcctgcgttttttatactctgacgaggtgcagattgggcctgaaaccgttatgaccacactctacacagccaagaaatacgccgtcccggctctcgaagcacactgtgtggaattcctcactaagcacctcagggcagacaatgcatttatgctgttaacccaagccaggctatttgatgagcctcagctggcttctttgtgtctagatacgattgataagtcaactatggatgctatttccgcagagggcttcactgacatagacatcgatacactatgtgcagttctggagcgcgataccttgagcattcgagagtccagactcttcggcgcagtcgtcaggtgggccgaagccgagtgccagaggcagcagttgcccgtaacattcggtaataagcagaaagtgttgggaaaggcgctctccctgatccggtttcctctgatgacaattgaggagtttgccgctggtcccgctcaaagcggcattctgtcagaccgtgaggttgtaaatttgttcttgcattttaccgtgaatccgaagcctcgggtggagtatatagaccgtccacgctgctgcttaagagggaaggaatgttgcattaaccgcttccagcaagtggagagcagatgggggtatagcggcacttcggatcgaatcaggttcaccgtcaataggagaatctccattgtggggtttggcctgtacggttcgattcacgggcctaccgattaccaggtgaacatccagattattgaatatgagaagaaacagaccctagggcaaaatgatacaggcttctcctgcgacggtaccgccaacaccttccgcgtaatgtttaaagagcccatcgagatcctgcccaatgtttgctacactgcttgcgctacgctgaagggtcccgacagccactatggcaccaagggactgaagaaggttgttcacgaaaccccagcggcaagcaaaactgtattcttctttttctcttccccgggtaacaataacgggacatccattgaggacggccagattcctgagataattttttacacttag

SEQ ID NO: 218508 - DNA, 3297 bp, Artificial Sequence
  derived and/or modified sequence
agtcctgttacacctcccgcggccgcgcacagcggcaacccgggcgtgcgggggcgcgcgcggtcagggaggggcctgcggaggcgcgaggcccccggaagcgcctttcccggaaggcagggaggcagcgccggcctccggaggcggcctgggcgatggcggcggagttttgtccataacgtgggcaaccgcgcagctggaggatggcctcactcgggcctgccgcagctggggagcaggcgtcgggggctgaggcggagccgggccccgcggggccgccgccgccgccctcaccgtcctctctggggcccctgctccccctgcagcgggaacctctctacaactggcaggcgaccaaggcgtcgctgaaggagcgcttcgccttcctcttcaactcggagctgctgagcgatgtgcgcttcgtactgggcaagggtcgcggcgccgccgccgctgggggcccgcagcgcatccccgcccaccgcttcgtgctggcggccggcagcgccgtctttgacgccatgttcaacggcggcatggccaccacgtcggccgagatcgagctgccggacgtggagcccgcagccttcctggcgctgctgagatttctatattcagatgaagttcaaattggtccagaaacagttatgaccactctttatactgccaagaaatacgcagtcccagccttggaagcacactgtgtagaatttctcaccaaacatcttagggcagataatgcctttatgttacttactcaggctcgattatttgatgaacctcagcttgctagtctttgtctagatacaatagacaaaagcacaatggatgcaataagtgcagaagggtttactgatattgatatagatacactctgtgcagttttagagagagacacactcagtattcgagaaagtcgactttttggagctgttgtacgctgggcagaagcagaatgtcagagacaacaattacctgtgacttttgggaataaacaaaaagttctaggaaaagcactttccttaatccggttcccactgatgacaattgaggaatttgcagcaggtcctgctcaatctggaattttgtcagatcgtgaagtggtaaacctctttcttcattttactgtcaaccctaaaccccgagttgaatacattgaccgaccaagatgctgtctcaggggaaaggaatgctgcatcaatagattccagcaagtagaaagccgctggggttacagtgggacgagtgatcgaatcagattcacagttaatagaaggatctctatagttggatttggcttgtatggatctattcatggccctacagattatcaagtgaatatacagatcattgaatatgagaaaaagcaaaccctgggacagaatgataccggctttagttgtgatgggacagctaacacattcagggtcatgttcaaggaacccatagagatcctgcccaatgtgtgctacacagcatgtgcaacactcaaaggtccagattcccactatggcacaaaaggattgaagaaagtagtgcatgagacacctgctgcaagcaagactgtttttttcttttttagttcccctggcaataataatggcacttcaatagaagatggacaaattccagaaatcatattttatacataatttagcattataatacatcttggctaaataataccatacaatctagtgtcaaaaacataaatggccacaaaaaagtagtttgagtgttatgaatatttaaaattgtaagataagaaacagtttcttagagcagatagaaaaatgcttatttaaatctttgcatgatttaaaaacagattttccattttcttacaactttaagagaaaagaactgggtttaatggtttaaaaaaaagcacagctttttcaccttcatcttgtataatttcatagattggctgacttagggtctttcaatagtttgggaattgaaagattcttgttatatatagctagtttgggtttgtttttgttttaactattttgaaggttaggtgagatgggcaaataggcttaactattttgaaggttggatgaaaagagatgggtcagtattcctacagaattcttattaactcaaataactaaatttcagaaaattaagaagctgactttatatttggtggtttgaagtatcttgttgttagcatttgtaataatgctaaaaaaggcctaataaaatgcccaagaaaatattcagtgcatttatagagaaggatattttgtagtagtatagtaatgtgttatgtagtacagttttaaagctataaatggaattttgtgtaaattcacaaaaatgtgatataaacaggatctaagactggattccctgtcactaaactgcaccactatacctgtctctctgtgtgggggacactgctgatgattcccaagattgagatgatgacggtgatgacgactgggtgaacagccatcacttcaacattgtgataatccttcacagcaagaaaccgaataaaatactaacatttctaacaactgctctgacattgtaaagagatccaacagaatcactcctgctgaaaaatacgctttctgccacctacacatttctatttaggaagtaaaatttgcttcatggtcatgaccccattagtcagtgttacagctgtgttggggataggaagtatatctggcagattgatatttatacacttttttataaagcagattttaaaatatagtaacatccatttttttcccttgaaagtgattctcttataaaaaatgaaagtggagtttaaggtatatcaaatcgttgtggaaggtgattaaaaatcaaaattcttttaaatatcaacttaattttttctaagtaagatacaaaaaattttcatctaaagtaatatttcactttatattgtaaagaaggtaggtatattggtggctgaggtctcttgaaattgctaaagggaaatttttctatggtaatgctcttacggatataaacctcagttaaatggaattatctatgggatgtgtggttctggttaactaaaaattaaccagtaaacactctgtagtaaccattacagaaaatacttctgccttaaaaaatatgatatgccagagatgagttagtgtttcttgacgttggagaccttttaaatgcctcatctgttgtactgaacaattgaaactgcatgcagccataaaagggacaagaaacagaactgtttactaactttgggacatcccctggagtttttaaaaataaataaatatatatatatataaaaaaaac

SEQ ID NO: 218509 - DNA, 1449 bp, Artificial Sequence
  derived and/or modified sequence
atggccagcctgggccccgccgccgccggcgagcaggccagcggcgccgaggccgagcccggccccgccggccccccccccccccccagccccagcagcctgggccccctgctgcccctgcagagagagcccctgtacaactggcaggccaccaaggccagcctgaaggagagattcgccttcctgttcaacagcgagctgctgagcgacgtgagattcgtgctgggcaagggcagaggcgccgccgccgccggcggcccccagagaatccccgcccacagattcgtgctggccgccggcagcgccgtgttcgacgccatgttcaacggcggcatggccaccaccagcgccgagatcgagctgcccgacgtggagcccgccgccttcctggccctgctgagattcctgtacagcgacgaggtgcagatcggccccgagaccgtgatgaccaccctgtacaccgccaagaagtacgccgtgcccgccctggaggcccactgcgtggagttcctgaccaagcacctgagagccgacaacgccttcatgctgctgacccaggccagactgttcgacgagccccagctggccagcctgtgcctggacaccatcgacaagagcaccatggacgccatcagcgccgagggcttcaccgacatcgacatcgacaccctgtgcgccgtgctggagagagacaccctgagcatcagagagagcagactgttcggcgccgtggtgagatgggccgaggccgagtgccagagacagcagctgcccgtgaccttcggcaacaagcagaaggtgctgggcaaggccctgagcctgatcagattccccctgatgaccatcgaggagttcgccgccggccccgcccagagcggcatcctgagcgacagagaggtggtgaacctgttcctgcacttcaccgtgaaccccaagcccagagtggagtacatcgacagacccagatgctgcctgagaggcaaggagtgctgcatcaacagattccagcaggtggagagcagatggggctacagcggcaccagcgacagaatcagattcaccgtgaacagaagaatcagcatcgtgggcttcggcctgtacggcagcatccacggccccaccgactaccaggtgaacatccagatcatcgagtacgagaagaagcagaccctgggccagaacgacaccggcttcagctgcgacggcaccgccaacaccttcagagtgatgttcaaggagcccatcgagatcctgcccaacgtgtgctacaccgcctgcgccaccctgaagggccccgacagccactacggcaccaagggcctgaagaaggtggtgcacgagacccccgccgccagcaagaccgtgttcttcttcttcagcagccccggcaacaacaacggcaccagcatcgaggacggccagatccccgagatcatcttctacacctag

SEQ ID NO: 218510 - protein, 183 aa, Artificial Sequence
  derived and/or modified sequence
MIFLLLMLSLELQLHQIAALFTVTVPKELYIIEHGSNVTLECNFDTGSHVNLGAITASLQKVENDTSPHRERATLLEEQLPLGKASFHIPQVQVRDEGQYQCIIIYGVAWDYKYLTLKVKGQMEPRTHPTWLLHIFIPFCIIAFIFIATVIALRKQLCQKLYSSKDTTKRPVTTTKREVNSAI

SEQ ID NO: 218511 - protein, 273 aa, Artificial Sequence
  derived and/or modified sequence
MIFLLLMLSLELQLHQIAALFTVTVPKELYIIEHGSNVTLECNFDTGSHVNLGAITASLQKVENDTSPHRERATLLEEQLPLGKASFHIPQVQVRDEGQYQCIIIYGVAWDYKYLTLKVKASYRKINTHILKVPETDEVELTCQATGYPLAEVSWPNVSVPANTSHSRTPEGLYQVTSVLRLKPPPGRNFSCVFWNTHVRELTLASIDLQSQMEPRTHPTWLLHIFIPFCIIAFIFIATVIALRKQLCQKLYSSKDTTKRPVTTTKREVNSAI

SEQ ID NO: 218512 - DNA, 2148 bp, Artificial Sequence
  derived and/or modified sequence
gcaaaccttaagctgaatgaacaacttttcttctcttgaatatatcttaacgccaaattttgagtgcttttttgttacccatcctcatatgtcccagctagaaagaatcctgggttggagctactgcatgttgattgttttgtttttccttttggctgttcattttggtggctactataaggaaatctaacacaaacagcaactgttttttgttgtttacttttgcatctttacttgtggagctgtggcaagtcctcatatcaaatacagaacatgatcttcctcctgctaatgttgagcctggaattgcagcttcaccagatagcagctttattcacagtgacagtccctaaggaactgtacataatagagcatggcagcaatgtgaccctggaatgcaactttgacactggaagtcatgtgaaccttggagcaataacagccagtttgcaaaaggtggaaaatgatacatccccacaccgtgaaagagccactttgctggaggagcagctgcccctagggaaggcctcgttccacatacctcaagtccaagtgagggacgaaggacagtaccaatgcataatcatctatggggtcgcctgggactacaagtacctgactctgaaagtcaaaggtcagatggaacccaggacccatccaacttggctgcttcacattttcatccccttctgcatcattgctttcattttcatagccacagtgatagccctaagaaaacaactctgtcaaaagctgtattcttcaaaagacacaacaaaaagacctgtcaccacaacaaagagggaagtgaacagtgctatctgaacctgtggtcttgggagccagggtgacctgatatgacatctaaagaagcttctggactctgaacaagaattcggtggcctgcagagcttgccatttgcacttttcaaatgcctttggatgacccagcactttaatctgaaacctgcaacaagactagccaacacctggccatgaaacttgccccttcactgatctggactcacctctggagcctatggctttaagcaagcactactgcactttacagaattaccccactggatcctggacccacagaattccttcaggatccttcttgctgccagactgaaagcaaaaggaattatttcccctcaagttttctaagtgatttccaaaagcagaggtgtgtggaaatttccagtaacagaaacagatgggttgccaatagagttattttttatctatagcttcctctgggtactagaagaggctattgagactatgagctcacagacagggcttcgcacaaactcaaatcataattgacatgttttatggattactggaatcttgatagcataatgaagttgttctaattaacagagagcatttaaatatacactaagtgcacaaattgtggagtaaagtcatcaagctctgtttttgaggtctaagtcacaaagcatttgttttaacctgtaatggcaccatgtttaatggtggttttttttttgaactacatctttcctttaaaaattattggtttctttttatttgtttttaccttagaaatcaattatatacagtcaaaaatatttgatatgctcatacgttgtatctgcagcaatttcagataagtagctaaaatggccaaagccccaaactaagcctccttttctggccctcaatatgactttaaatttgacttttcagtgcctcagtttgcacatctgtaatacagcaatgctaagtagtcaaggcctttgataattggcactatggaaatcctgcaagatcccactacatatgtgtggagcagaagggtaactcggctacagtaacagcttaattttgttaaatttgttctttatactggagccatgaagctcagagcattagctgacccttgaactattcaaatgggcacattagctagtataacagacttacataggtgggcctaaagcaagctccttaactgagcaaaatttggggcttatgagaatgaaagggtgtgaaattgactaacagacaaatcatacatctcagtttctcaattctcatgtaaatcagagaatgcctttaaagaataaaactcaattgttattcttcaacgttctttatatattctacttttgggta

SEQ ID NO: 218513 - DNA, 2363 bp, Artificial Sequence
  derived and/or modified sequence
ttttcttctcttgaatatatcttaacgccaaattttgagtgcttttttgttacccatcctcatatgtcccagctagaaagaatcctgggttggagctactgcatgttgattgttttgtttttccttttggctgttcattttggtggctactataaggaaatctaacacaaacagcaactgttttttgttgtttacttttgcatctttacttgtggagctgtggcaagtcctcatatcaaatacagaacatgatcttcctcctgctaatgttgagcctggaattgcagcttcaccagatagcagctttattcacagtgacagtccctaaggaactgtacataatagagcatggcagcaatgtgaccctggaatgcaactttgacactggaagtcatgtgaaccttggagcaataacagccagtttgcaaaaggtggaaaatgatacatccccacaccgtgaaagagccactttgctggaggagcagctgcccctagggaaggcctcgttccacatacctcaagtccaagtgagggacgaaggacagtaccaatgcataatcatctatggggtcgcctgggactacaagtacctgactctgaaagtcaaagcttcctacaggaaaataaacactcacatcctaaaggttccagaaacagatgaggtagagctcacctgccaggctacaggttatcctctggcagaagtatcctggccaaacgtcagcgttcctgccaacaccagccactccaggacccctgaaggcctctaccaggtcaccagtgttctgcgcctaaagccaccccctggcagaaacttcagctgtgtgttctggaatactcacgtgagggaacttactttggccagcattgaccttcaaagtcagatggaacccaggacccatccaacttggctgcttcacattttcatccccttctgcatcattgctttcattttcatagccacagtgatagccctaagaaaacaactctgtcaaaagctgtattcttcaaaagacacaacaaaaagacctgtcaccacaacaaagagggaagtgaacagtgctatctgaacctgtggtcttgggagccagggtgacctgatatgacatctaaagaagcttctggactctgaacaagaattcggtggcctgcagagcttgccatttgcacttttcaaatgcctttggatgacccagcactttaatctgaaacctgcaacaagactagccaacacctggccatgaaacttgccccttcactgatctggactcacctctggagcctatggctttaagcaagcactactgcactttacagaattaccccactggatcctggacccacagaattccttcaggatccttcttgctgccagactgaaagcaaaaggaattatttcccctcaagttttctaagtgatttccaaaagcagaggtgtgtggaaatttccagtaacagaaacagatgggttgccaatagagttattttttatctatagcttcctctgggtactagaagaggctattgagactatgagctcacagacagggcttcgcacaaactcaaatcataattgacatgttttatggattactggaatcttgatagcataatgaagttgttctaattaacagagagcatttaaatatacactaagtgcacaaattgtggagtaaagtcatcaagctctgtttttgaggtctaagtcacaaagcatttgttttaacctgtaatggcaccatgtttaatggtggttttttttttgaactacatctttcctttaaaaattattggtttctttttatttgtttttaccttagaaatcaattatatacagtcaaaaatatttgatatgctcatacgttgtatctgcagcaatttcagataagtagctaaaatggccaaagccccaaactaagcctccttttctggccctcaatatgactttaaatttgacttttcagtgcctcagtttgcacatctgtaatacagcaatgctaagtagtcaaggcctttgataattggcactatggaaatcctgcaagatcccactacatatgtgtggagcagaagggtaactcggctacagtaacagcttaattttgttaaatttgttctttatactggagccatgaagctcagagcattagctgacccttgaactattcaaatgggcacattagctagtataacagacttacataggtgggcctaaagcaagctccttaactgagcaaaatttggggcttatgagaatgaaagggtgtgaaattgactaacagacaaatcatacatctcagtttctcaattctcatgtaaatcagagaatgcctttaaagaataaaactcaattgttattcttc

SEQ ID NO: 218514 - DNA, 552 bp, Artificial Sequence
  derived and/or modified sequence
atgatttttttgttgctcatgctgagtctggaactgcagctccaccagattgccgcactttttaccgtgacagtacctaaggagttatacattatcgaacacgggagcaacgtgacgctcgagtgtaattttgataccggaagccacgtgaacctaggggcaatcactgcgagccttcagaaagtggagaatgacacaagccctcacagggagagggcgaccttgctggaagagcagctgcctctaggcaaggcctcatttcacatcccccaggtgcaagtgcgcgatgaggggcagtaccagtgcataattatttatggcgtggcctgggactataaatatttgacgctgaaagtgaaaggtcagatggagccgcgtacgcacccgacgtggctgctccacatatttattccgttctgcattatcgcattcatatttattgccaccgtaattgctctccgcaagcagctctgtcagaagctgtatagctcaaaggataccaccaagagacccgtcactactactaagcgtgaggtgaactccgccatttag

SEQ ID NO: 218515 - DNA, 822 bp, Artificial Sequence
  derived and/or modified sequence
atgatctttttgctgcttatgctgagtcttgagttacagttacatcagattgccgctttgttcacagtgactgtgcccaaagaactgtacatcattgaacatggctcaaatgtcacactggaatgcaattttgataccggttcacatgtgaatctgggcgctattacagctagtttgcagaaggtcgagaatgatacttcccctcacagggagagagccacactgctcgaagagcaactgcctctcggaaaggcctctttccacatcccacaggtgcaagttagggacgaggggcagtaccagtgtattatcatttacggcgttgcatgggattacaagtatctgaccctgaaggttaaggcatcataccgcaagatcaacactcacattctgaaggtgcccgagaccgacgaggtcgaattaacatgccaggccaccggatatcccctggctgaagtatcatggcctaacgtctccgtacctgccaataccagccactcaaggacaccagaggggctgtatcaggttacatccgtgcttaggctgaagcctcctcctggccgtaacttttcctgtgtgttttggaacacgcacgtgcgcgagctcactctagcctcgatagatctgcaaagtcagatggagccacgcactcatcctacatggttactgcatatctttattcccttttgcatcatcgcctttatcttcattgccactgtaattgccttgcggaagcagctctgccaaaaattgtattcttctaaggatacgactaaacgccctgtaactacaaccaaacgagaagtcaatagtgcaatatag

SEQ ID NO: 218516 - DNA, 552 bp, Artificial Sequence
  derived and/or modified sequence
atgatatttttacttctcatgctgtctctagagttgcagcttcaccagatcgcagccctattcacagtgacagtgcctaaggagctatacattattgaacatggatccaacgtaaccctggagtgcaactttgacaccggttcacacgtgaacttgggcgccattacagcgagcctacagaaagtagaaaacgacacaagtccacaccgggagcgcgctactcttctggaggaacagcttccattgggaaaggcttccttccacattccccaagtccaagtcagggacgagggccagtatcagtgcattatcatttatggcgtagcatgggactataaatatctgacactgaaagttaagggccagatggaaccccggacccaccctacctggctgctccacatattcatcccattttgcataatagcttttattttcatagcgaccgtaatcgcgctgcgaaaacagctttgtcagaaactgtactcctctaaagataccaccaagcgcccggtaaccacgacaaaaagagaagttaacagcgcaatctag

SEQ ID NO: 218517 - DNA, 822 bp, Artificial Sequence
  derived and/or modified sequence
atgatctttttactgctgatgctttctcttgaactgcagttgcaccagattgccgccctgtttactgttaccgtcccgaaggaattatatatcattgaacacggatccaacgtgacactcgagtgcaacttcgacaccggcagtcacgtgaatctcggagccattacagccagtctccagaaagtggaaaatgatacctccccacacagagaaagggcaacgctgttggaagaacagttaccactgggcaaggcttccttccacatcccacaggtacaagtccgggacgagggacagtatcaatgcatcatcatctacggagttgcatgggattacaaatatctcacccttaaagtaaaagccagttaccgcaagattaatacacacattttgaaagtgccagaaaccgatgaggtcgagttaacgtgccaggccacaggctacccgctggctgaagtttcctggcccaatgtgtccgtgccagcaaatacctctcacagccgaactccggaaggcctctaccaggtcacatccgtgctgcgtttgaagccgccacccggtcgcaacttcagttgcgtcttctggaatacccatgtccgagagctgacacttgcgtctatcgacctccagtcgcagatggagccaagaactcacccgacctggctattgcacattttcattcctttctgcattattgcttttattttcatcgccaccgtgatagcacttagaaaacagctttgccagaagctctactcatccaaggacaccaccaagcggcctgtgactacaactaaacgcgaagtgaactcagcaatctag

SEQ ID NO: 218518 - DNA, 552 bp, Artificial Sequence
  derived and/or modified sequence
atgatcttcctcctgttaatgctcagcctggaactccagctacatcaaatcgcagcccttttcaccgtcaccgtccccaaagaattgtatatcatcgagcatggcagcaatgtgaccctggaatgtaattttgacaccggcagccacgtcaatttaggcgccatcacagcatccttgcaaaaggttgagaacgacacatcaccacatcgagagcgagcaacgctgctggaggagcaactccctttaggcaaggcatcattccatattcctcaggtccaggtccgggatgagggccaatatcagtgcattataatctacggcgtagcctgggactacaagtacctgacactcaaagtgaagggtcaaatggaacccagaactcatccgacttggcttctgcatatttttatccctttttgcattatagcctttattttcatcgcaaccgttatagcactgagaaagcaattgtgccagaagctctacagcagtaaggataccactaagcgtcctgttaccactaccaaacgtgaagttaactctgccatttag

SEQ ID NO: 218519 - DNA, 822 bp, Artificial Sequence
  derived and/or modified sequence
atgatctttcttctgcttatgctttccctggagctccaacttcaccaaattgctgctctcttcactgtgaccgtgccaaaagagctgtacatcatcgaacacggcagtaacgtgactttggaatgcaatttcgataccggatcacatgtgaatctaggagctatcaccgcctctttgcagaaagtcgaaaatgatacctcaccccaccgcgaacgggcaacgctactcgaagaacagctgcctctaggcaaggccagctttcacattccacaggtccaagtgagagatgagggccagtaccaatgtatcattatctacggcgtcgcctgggattacaaatacctgacactcaaggttaaagctagctatcggaaaatcaacacccatatactaaaggtccctgagaccgacgaggttgaactgacatgccaggctaccggttacccactcgcagaggtgtcttggccaaacgtctccgtgcccgcaaatacctctcatagccgtaccccagaaggtttgtaccaggtgactagtgtccttcgattaaagcccccaccgggaagaaacttctcttgcgtgttctggaatacacacgttcgggagcttacactggctagcattgaccttcaatcccaaatggaacccagaactcacccgacatggctcttgcacatttttatccctttctgcatcatcgcctttatatttattgccaccgtcatcgccctgaggaaacaactatgccagaaactgtactcgagcaaggacacgacgaaaagaccggtgacaaccaccaagcgcgaagtgaatagtgccatttag

SEQ ID NO: 218520 - DNA, 552 bp, Artificial Sequence
  derived and/or modified sequence
atgatcttcctgctgctgatgctgagcctggagctgcagctgcaccagatcgccgccctgttcaccgtgaccgtgcccaaggagctgtacatcatcgagcacggcagcaacgtgaccctggagtgcaacttcgacaccggcagccacgtgaacctgggcgccatcaccgccagcctgcagaaggtggagaacgacaccagcccccacagagagagagccaccctgctggaggagcagctgcccctgggcaaggccagcttccacatcccccaggtgcaggtgagagacgagggccagtaccagtgcatcatcatctacggcgtggcctgggactacaagtacctgaccctgaaggtgaagggccagatggagcccagaacccaccccacctggctgctgcacatcttcatccccttctgcatcatcgccttcatcttcatcgccaccgtgatcgccctgagaaagcagctgtgccagaagctgtacagcagcaaggacaccaccaagagacccgtgaccaccaccaagagagaggtgaacagcgccatctag

SEQ ID NO: 218521 - DNA, 822 bp, Artificial Sequence
  derived and/or modified sequence
atgatcttcctgctgctgatgctgagcctggagctgcagctgcaccagatcgccgccctgttcaccgtgaccgtgcccaaggagctgtacatcatcgagcacggcagcaacgtgaccctggagtgcaacttcgacaccggcagccacgtgaacctgggcgccatcaccgccagcctgcagaaggtggagaacgacaccagcccccacagagagagagccaccctgctggaggagcagctgcccctgggcaaggccagcttccacatcccccaggtgcaggtgagagacgagggccagtaccagtgcatcatcatctacggcgtggcctgggactacaagtacctgaccctgaaggtgaaggccagctacagaaagatcaacacccacatcctgaaggtgcccgagaccgacgaggtggagctgacctgccaggccaccggctaccccctggccgaggtgagctggcccaacgtgagcgtgcccgccaacaccagccacagcagaacccccgagggcctgtaccaggtgaccagcgtgctgagactgaagcccccccccggcagaaacttcagctgcgtgttctggaacacccacgtgagagagctgaccctggccagcatcgacctgcagagccagatggagcccagaacccaccccacctggctgctgcacatcttcatccccttctgcatcatcgccttcatcttcatcgccaccgtgatcgccctgagaaagcagctgtgccagaagctgtacagcagcaaggacaccaccaagagacccgtgaccaccaccaagagagaggtgaacagcgccatctag

SEQ ID NO: 218522 - DNA, 552 bp, Artificial Sequence
  derived and/or modified sequence
atgatcttcctgctgctcatgctcagcctggagctacaattgcaccaaatcgcggcgttgttcaccgtgaccgtacccaaagaactgtacatcatcgagcatgggtccaatgtaactcttgagtgcaacttcgacaccggctcacacgtaaacttgggcgccataaccgcttccctgcagaaagtagaaaatgacacttctcctcatcgggaacgtgcaactctcctggaggagcagttaccacttggcaaagcttcctttcacatcccacaagtgcaggttcgtgacgagggtcagtatcaatgtatcatcatctatggcgtagcctgggactacaaatacttgacgcttaaggtcaaaggacagatggagcctagaacacaccccacttggctcctgcatatcttcatccccttctgtattatcgcttttatctttatcgcaacagtaattgccctgagaaagcaactgtgtcagaagctgtacagctctaaggacaccactaagagacccgtgaccaccacaaaaagagaggtgaactccgccatttag

SEQ ID NO: 218523 - DNA, 822 bp, Artificial Sequence
  derived and/or modified sequence
atgatcttcttgctgctcatgctctcactagaactgcaactgcatcaaattgccgctttattcacagtcacagtgcctaaggagctttatattatagagcatggaagtaacgtgaccctggagtgcaactttgacactggttctcacgttaatctcggggcaatcacagccagcttgcagaaggtggagaacgacacctctccgcacagggaacgcgccacattactcgaggaacagctaccgctgggtaaggcaagcttccatataccccaggttcaggtcagagacgaaggacagtaccagtgcattattatctatggggtcgcttgggactacaagtaccttacactgaaggtaaaagcgtcctaccggaagataaacacgcatatccttaaagtgccagaaaccgatgaggtggagctgacttgtcaggccaccggctacccactggccgaagtctcttggcccaatgtatcagtgccagccaatacgagccactcgcgcaccccagaaggcttgtaccaggtgacaagcgtgcttagacttaaaccgccgcctggaagaaatttctcctgtgtcttctggaacactcatgtgagggagcttactctggcaagcatcgatttgcaatcacaaatggaaccgcgcacccatccgacgtggctgctgcatatttttatccctttctgcatcatcgcttttatctttattgctacggtgattgccctgagaaaacagctgtgtcaaaagttatatagctctaaggatactacaaaaagacccgtgaccactacgaagagagaggtgaactctgcgatctag

SEQ ID NO: 218524 - DNA, 552 bp, Artificial Sequence
  derived and/or modified sequence
atgatcttcctgctgctgatgctgagcctggagctgcagctgcaccagattgctgccctcttcaccgtgacagtgcccaaggagctgtacatcatcgagcacggcagcaatgtgaccctggagtgcaactttgacaccggcagccacgtgaacctgggcgccatcacagccagcctgcagaaggtggagaatgacaccagcccccaccgggagcgggccaccctgctggaggagcagctgcccctgggcaaggccagcttccacatcccccaggtgcaggtgagagatgagggccagtaccagtgcatcatcatctacggcgtggcctgggactacaagtacctgaccctgaaggtgaagggccagatggagcccaggacccaccccacctggctgctgcacatcttcatccccttctgcatcatcgccttcatcttcatcgccaccgtgattgccctgaggaagcagctgtgccagaagctgtacagcagcaaggacaccaccaagaggcctgtgaccaccaccaagcgggaggtgaacagcgccatctag

SEQ ID NO: 218525 - DNA, 822 bp, Artificial Sequence
  derived and/or modified sequence
atgatcttcctgctgctgatgctgagcctggagctgcagctgcaccagattgctgccctcttcaccgtgacagtgcccaaggagctgtacatcatcgagcacggcagcaatgtgaccctggagtgcaactttgacaccggcagccacgtgaacctgggcgccatcacagccagcctgcagaaggtggagaatgacaccagcccccaccgggagcgggccaccctgctggaggagcagctgcccctgggcaaggccagcttccacatcccccaggtgcaggtgagagatgagggccagtaccagtgcatcatcatctacggcgtggcctgggactacaagtacctgaccctgaaggtgaaggccagctacaggaagatcaacacccacatcctgaaggtgcctgagacagatgaggtggagctgacctgccaggccaccggctaccccctggccgaggtgtcctggcccaacgtgtctgtgcctgccaacaccagccacagcaggaccccagagggcctgtaccaggtgacctctgtgctgcggctgaagcccccacctggcaggaacttcagctgtgtgttctggaacacccacgtgcgggagctgaccctggccagcattgacctgcagagccagatggagcccaggacccaccccacctggctgctgcacatcttcatccccttctgcatcatcgccttcatcttcatcgccaccgtgattgccctgaggaagcagctgtgccagaagctgtacagcagcaaggacaccaccaagaggcctgtgaccaccaccaagcgggaggtgaacagcgccatctag

SEQ ID NO: 218526 - DNA, 552 bp, Artificial Sequence
  derived and/or modified sequence
atgatcttcctgctgctgatgctgagcctggagctgcagctgcaccagattgctgccttgtttaccgttacagttcccaaggagttatacatcatcgagcatggaagcaatgttaccttagaatgcaattttgacaccggctcccatgtgaatctgggggccatcaccgcatcactgcagaaggtggaaaatgacacctccccccaccgtgaacgggccacactgttagaggagcagctgcccttaggaaaagcctcatttcacattccgcaggtgcaagttcgcgacgaaggccagtaccaatgcatcatcatttacggagtggcttgggactataaatatttgacactgaaggtgaaaggtcaaatggagccccgcacccatcctacatggctcttgcatattttcatccccttctgtatcatagcctttattttcatcgcaacagtcatcgcccttcgcaaacaattatgccagaaactgtattctagtaaagacacaacaaagaggcccgtcacgacgaccaagcgagaggtgaattccgcaatatag

SEQ ID NO: 218527 - DNA, 822 bp, Artificial Sequence
  derived and/or modified sequence
atgatcttcctgctgctgatgctgagcctggagctgcagctgcaccagattgctgcattgttcaccgtaaccgtcccgaaagagttgtacatcatagagcacggttcaaatgtgacgctcgagtgcaatttcgataccggttctcatgtgaatctgggggccatcactgccagtcttcagaaggtcgaaaacgacacgagccctcatagagaacgggcaacactgcttgaagaacagttgccactgggaaaggcaagcttccacattccccaggtacaggttcgtgatgaggggcaataccagtgcatcataatatacggggtcgcttgggactataagtatctgacccttaaggttaaagcctcttaccgtaaaatcaacacacacatcttaaaagtgcctgagacagacgaagtagaactcacttgtcaggccacaggataccctctggctgaggtgagctggccaaatgtgtcagtcccagccaacacatctcattcacggactccagagggactgtatcaggtcacttccgtacttcgcctaaaacctccccccggccgaaacttcagctgtgtcttttggaatactcacgttagagagttgaccctcgcttctatagacctgcagagccagatggagccaaggactcaccctacctggctgctgcacatttttatacctttctgtatcatcgctttcatttttatagcaacagtgattgcactaagaaaacagttatgccagaaactctacagttctaaagatacaaccaaacgaccagtgactaccacaaaaagagaggtgaatagcgccatctag

SEQ ID NO: 218528 - RNA, 552 nt, Artificial Sequence
  derived and/or modified sequence
augauauuuuuacuucucaugcugucucuagaguugcagcuucaccagaucgcagcccuauucacagugacagugccuaaggagcuauacauuauugaacauggauccaacguaacccuggagugcaacuuugacaccgguucacacgugaacuugggcgccauuacagcgagccuacagaaaguagaaaacgacacaaguccacaccgggagcgcgcuacucuucuggaggaacagcuuccauugggaaaggcuuccuuccacauuccccaaguccaagucagggacgagggccaguaucagugcauuaucauuuauggcguagcaugggacuauaaauaucugacacugaaaguuaagggccagauggaaccccggacccacccuaccuggcugcuccacauauucaucccauuuugcauaauagcuuuuauuuucauagcgaccguaaucgcgcugcgaaaacagcuuugucagaaacuguacuccucuaaagauaccaccaagcgcccgguaaccacgacaaaaagagaaguuaacagcgcaaucuag

SEQ ID NO: 218529 - RNA, 822 nt, Artificial Sequence
  derived and/or modified sequence
augaucuuuuuacugcugaugcuuucucuugaacugcaguugcaccagauugccgcccuguuuacuguuaccgucccgaaggaauuauauaucauugaacacggauccaacgugacacucgagugcaacuucgacaccggcagucacgugaaucucggagccauuacagccagucuccagaaaguggaaaaugauaccuccccacacagagaaagggcaacgcuguuggaagaacaguuaccacugggcaaggcuuccuuccacaucccacagguacaaguccgggacgagggacaguaucaaugcaucaucaucuacggaguugcaugggauuacaaauaucucacccuuaaaguaaaagccaguuaccgcaagauuaauacacacauuuugaaagugccagaaaccgaugaggucgaguuaacgugccaggccacaggcuacccgcuggcugaaguuuccuggcccaauguguccgugccagcaaauaccucucacagccgaacuccggaaggccucuaccaggucacauccgugcugcguuugaagccgccacccggucgcaacuucaguugcgucuucuggaauacccauguccgagagcugacacuugcgucuaucgaccuccagucgcagauggagccaagaacucacccgaccuggcuauugcacauuuucauuccuuucugcauuauugcuuuuauuuucaucgccaccgugauagcacuuagaaaacagcuuugccagaagcucuacucauccaaggacaccaccaagcggccugugacuacaacuaaacgcgaagugaacucagcaaucuag

SEQ ID NO: 218530 - RNA, 552 nt, Artificial Sequence
  derived and/or modified sequence
augaucuuccuccuguuaaugcucagccuggaacuccagcuacaucaaaucgcagcccuuuucaccgucaccguccccaaagaauuguauaucaucgagcauggcagcaaugugacccuggaauguaauuuugacaccggcagccacgucaauuuaggcgccaucacagcauccuugcaaaagguugagaacgacacaucaccacaucgagagcgagcaacgcugcuggaggagcaacucccuuuaggcaaggcaucauuccauauuccucagguccagguccgggaugagggccaauaucagugcauuauaaucuacggcguagccugggacuacaaguaccugacacucaaagugaagggucaaauggaacccagaacucauccgacuuggcuucugcauauuuuuaucccuuuuugcauuauagccuuuauuuucaucgcaaccguuauagcacugagaaagcaauugugccagaagcucuacagcaguaaggauaccacuaagcguccuguuaccacuaccaaacgugaaguuaacucugccauuuag

SEQ ID NO: 218531 - RNA, 822 nt, Artificial Sequence
  derived and/or modified sequence
augaucuuucuucugcuuaugcuuucccuggagcuccaacuucaccaaauugcugcucucuucacugugaccgugccaaaagagcuguacaucaucgaacacggcaguaacgugacuuuggaaugcaauuucgauaccggaucacaugugaaucuaggagcuaucaccgccucuuugcagaaagucgaaaaugauaccucaccccaccgcgaacgggcaacgcuacucgaagaacagcugccucuaggcaaggccagcuuucacauuccacagguccaagugagagaugagggccaguaccaauguaucauuaucuacggcgucgccugggauuacaaauaccugacacucaagguuaaagcuagcuaucggaaaaucaacacccauauacuaaaggucccugagaccgacgagguugaacugacaugccaggcuaccgguuacccacucgcagaggugucuuggccaaacgucuccgugcccgcaaauaccucucauagccguaccccagaagguuuguaccaggugacuaguguccuucgauuaaagcccccaccgggaagaaacuucucuugcguguucuggaauacacacguucgggagcuuacacuggcuagcauugaccuucaaucccaaauggaacccagaacucacccgacauggcucuugcacauuuuuaucccuuucugcaucaucgccuuuauauuuauugccaccgucaucgcccugaggaaacaacuaugccagaaacuguacucgagcaaggacacgacgaaaagaccggugacaaccaccaagcgcgaagugaauagugccauuuag

SEQ ID NO: 218532 - protein, 316 aa, Artificial Sequence
  derived and/or modified sequence
MLRRRGSPGMGVHVGAALGALWFCLTGALEVQVPEDPVVALVGTDATLCCSFSPEPGFSLAQLNLIWQLTDTKQLVHSFAEGQDQGSAYANRTALFPDLLAQGNASLRLQRVRVADEGSFTCFVSIRDFGSAAVSLQVAAPYSKPSMTLEPNKDLRPGDTVTITCSSYRGYPEAEVFWQDGQGVPLTGNVTTSQMANEQGLFDVHSVLRVVLGANGTYSCLVRNPVLQQDAHGSVTITGQPMTFPPEALWVTVGLSVCLIALLVALAFVCWRKIKQSCEEENAGAEDQDGEGEGSKTALQPLKHSDSKEDDGQEIA

SEQ ID NO: 218533 - DNA, 951 bp, Artificial Sequence
  derived and/or modified sequence
atgctgagacggagagggtcccctggcatgggcgttcacgtgggcgccgccctcggtgccctgtggttttgtctgaccggcgccctcgaggtccaggttcctgaagatcctgtggtggcactggtgggaacagatgcaaccttgtgctgcagtttcagccccgaaccaggatttagtctggcacaactcaatcttatttggcagctgaccgacacgaagcagttagtgcactccttcgccgaagggcaggatcaggggagtgcctatgccaacaggacagctctgtttcccgatctcttggctcagggcaacgctagcctgaggctccagcgagtgagagtagcagacgaaggaagcttcacatgtttcgtgtcgattagagattttggcagcgccgcggtctctctacaggtcgcagcaccgtactcaaagccctcgatgactctggagcccaacaaggatctgaggccaggcgatactgtaactataacctgtagctcttaccgaggctaccccgaggccgaagtgttttggcaggatgggcagggcgttcccctcacaggcaatgtgactacctcgcagatggccaatgagcagggtctgtttgatgttcactctgtgctgcgcgttgttctgggagccaacggaacatactcatgcctggtgaggaatccggtcctgcaacaggacgctcatggctctgtgactattacaggccagccaatgacatttcctcccgaggccctgtgggtcacagtgggactcagtgtttgtctgatcgctctgctggtggcgctggcctttgtctgctggagaaaaatcaaacagtcatgcgaggaggagaacgcaggggctgaggaccaggacggggaaggcgaaggtagcaagaccgcactccagcctctcaaacacagtgattcaaaggaagacgacggccaggagatcgcgtag

SEQ ID NO: 218534 - DNA, 423 bp, Artificial Sequence
  derived and/or modified sequence
atgcttcggcggcgggggtctcctggaatgggggtccatgtaggggccgcactgggtgctctctggttttgccttactggagccctggaggtacaagtaccagaggatcctgtagtggcactcgtcggaaccgatgccacactttgttgtagcttcagccccgagcccgggttttccctggcccaactgaatctgatctggcaattgacagacacgaaacagctggtccactccttcgccgaaggccaggatcagggtagcgcctacgcaaatagaaccgccttgtttccagatctgcaccgggccgcatacgacattccgccacgggggcctgtgggtgaccgaggagccgtgtgtctgtcgcactgtacagccggagggccgggcttccgggtactggaaaaggatcagactgagctctag

SEQ ID NO: 218535 - DNA, 411 bp, Artificial Sequence
  derived and/or modified sequence
atgcttaggcgcagaggctcacctggaatgggcgtgcatgtcggggcggccctgggcgccctgtggttctgtttgacaggggcccttgaggtgcaggtgcccgaagaccccgtggtggccttagtaggaaccgatgctactctgtgttgctccttttcacctgagcccggcttcagtctggcacagctgaaccttatttggcagttgacagacacaaagcagctggtgcatagcttcgctgagggtcaagatcaggggtcagcatacgctaaccgtactgcattattcccagaccttttggcccagggcaatgcctctctcagactacaacgagtgagggtcgcggacgaaggctcgttcacgtgcttcgtgtcgatcagggactttgggtccgctgccgtgagtctatag

SEQ ID NO: 218536 - DNA, 402 bp, Artificial Sequence
  derived and/or modified sequence
atgctccgccgccgcggcagtcccggaatgggcgtgcacgtcggagccgccctcggcgccctgtggttttgcttaacaggtgcgcttgaggtccaggttccggaggaccccgtcgtcgcactcgtgggaacagacgccacgctctgctgtagtttcagtcctgaaccggggttctcattagcacagctgaatctcatctggcagctgactgacactaagcagttggtgcattccttcgccgaagggcaagaccaggggtctgcctacgcgaatcggaccgctctgtttcccgacttgttggcccagggcaacgcgagtctgaggcttcagcgagtgagagtagcagatgagggttcttttacctgtttcgtgtccattagggatttcggaagtgctgcctag

SEQ ID NO: 218537 - DNA, 498 bp, Artificial Sequence
  derived and/or modified sequence
atgctgcgccgtcgaggatctccaggaatgggggtccacgtgggagccgccctaggcgctttatggttctgtctcaccggcgcattagaggtccaagtgcccgaggaccccgtggtggccctggttggcactgacgccacattgtgctgttctttttcacctgagcctggtttctcgcttgctcagttgaacctgatctggcagttaacagacacaaagcagctcgtccactcctttgccgagggacaggaccagggatccgcctatgccaataggacagcattgttcccagacctgttggctcagggcaatgcgagcttaaggcttcagagagtgagggtcgccgacgaagggtctttcacgtgctttgtctccatccgcgacttcgggtcggctgcggtgtccctgcaggtcgctgccccgtattccaagccaagtatgacacttgaacctaacaaggacctacgacctggcgacacagttacaataacctgctag

SEQ ID NO: 218538 - DNA, 156 bp, Artificial Sequence
  derived and/or modified sequence
atgcttcggcgtaggggctcccccgggatgggggtgcacgtgggggccgccctaggtgccctttggttttgcttgaccggcgcactcgaggtgcaagtaccagaggaccctgtggttgcactggtcggcactgatgctaccctgtgttgctcttag

SEQ ID NO: 218539 - DNA, 951 bp, Artificial Sequence
  derived and/or modified sequence
atgctgcggcggcggggcagccctggcatgggcgtgcacgtgggcgccgccctgggcgccctgtggttctgcctgaccggggccctggaggtgcaggtgcctgaagatcctgtggtggccctggtgggcacagatgccaccctgtgctgcagcttcagccctgagcccggcttcagcctggcccagctgaacctgatctggcagctgacagacaccaagcagctggtgcacagctttgctgagggccaggaccagggcagcgcctatgccaacagaacagccctcttcccagacctgctggcccagggcaatgccagcctgcggctgcagagggtgcgggtggctgatgagggcagcttcacctgctttgtgtccatccgggactttggatctgctgctgtgtccctgcaggtggccgccccctacagcaagcccagcatgaccctggagcccaacaaggacctgcggcctggggacacagtgaccatcacctgcagcagctaccggggctacccagaggccgaggtgttctggcaggacggccagggcgtgcccctgactggaaatgtgaccaccagccagatggccaatgagcagggcctgtttgatgtgcacagcgtgctgcgggtggtgctgggcgccaacggcacctacagctgcctggtgagaaatcctgtgctgcagcaggatgcccacggctctgtgaccatcaccggccagcccatgaccttccccccagaggccctgtgggtgacagtgggcctgtctgtgtgcctgattgccctgctggtggccctggcctttgtgtgctggaggaagatcaagcagagctgtgaggaggagaatgctggagctgaggaccaggatggagagggggagggcagcaagacagccctgcagcccctgaagcacagcgacagcaaagaagatgatggccaggagatcgcctag

SEQ ID NO: 218540 - DNA, 423 bp, Artificial Sequence
  derived and/or modified sequence
atgctgcggcggcggggcagccctggcatgggcgtgcacgtgggcgccgccctgggcgccctgtggttctgcctgaccggggccctggaggtgcaggtgcctgaagatcctgtggtggccctggtgggcacagatgccaccctgtgctgcagcttcagccctgagcccggcttcagcctggcccagctgaacctgatctggcagctgacagacaccaagcagctggtgcacagctttgctgagggccaggaccagggcagcgcctatgccaacagaacagccctcttcccagacctgcaccgggccgcctatgacatccccccccggggccctgtgggggacagaggagctgtgtgcctgagccactgcacagctgggggccctggcttccgggtgctggagaaggaccagacagagctgtag

SEQ ID NO: 218541 - DNA, 411 bp, Artificial Sequence
  derived and/or modified sequence
atgctgcggcggcggggcagccctggcatgggcgtgcacgtgggcgccgccctgggcgccctgtggttctgcctgaccggggccctggaggtgcaggtgcctgaagatcctgtggtggccctggtgggcacagatgccaccctgtgctgcagcttcagccctgagcccggcttcagcctggcccagctgaacctgatctggcagctgacagacaccaagcagctggtgcacagctttgctgagggccaggaccagggcagcgcctatgccaacagaacagccctcttcccagacctgctggcccagggcaatgccagcctgcggctgcagagggtgcgggtggctgatgagggcagcttcacctgctttgtgtccatccgggactttggatctgctgctgtgtccctgtag

SEQ ID NO: 218542 - DNA, 402 bp, Artificial Sequence
  derived and/or modified sequence
atgctgcggcggcggggcagccctggcatgggcgtgcacgtgggcgccgccctgggcgccctgtggttctgcctgaccggggccctggaggtgcaggtgcctgaagatcctgtggtggccctggtgggcacagatgccaccctgtgctgcagcttcagccctgagcccggcttcagcctggcccagctgaacctgatctggcagctgacagacaccaagcagctggtgcacagctttgctgagggccaggaccagggcagcgcctatgccaacagaacagccctcttcccagacctgctggcccagggcaatgccagcctgcggctgcagagggtgcgggtggctgatgagggcagcttcacctgctttgtgtccatccgggactttggatctgctgcctag

SEQ ID NO: 218543 - DNA, 498 bp, Artificial Sequence
  derived and/or modified sequence
atgctgcggcggcggggcagccctggcatgggcgtgcacgtgggcgccgccctgggcgccctgtggttctgcctgaccggggccctggaggtgcaggtgcctgaagatcctgtggtggccctggtgggcacagatgccaccctgtgctgcagcttcagccctgagcccggcttcagcctggcccagctgaacctgatctggcagctgacagacaccaagcagctggtgcacagctttgctgagggccaggaccagggcagcgcctatgccaacagaacagccctcttcccagacctgctggcccagggcaatgccagcctgcggctgcagagggtgcgggtggctgatgagggcagcttcacctgctttgtgtccatccgggactttggatctgctgctgtgtccctgcaggtggccgccccctacagcaagcccagcatgaccctggagcccaacaaggacctgcggcctggggacacagtgaccatcacctgctag

SEQ ID NO: 218544 - DNA, 156 bp, Artificial Sequence
  derived and/or modified sequence
atgctgcggcggcggggcagccctggcatgggcgtgcacgtgggcgccgccctgggcgccctgtggttctgcctgaccggggccctggaggtgcaggtgcctgaagatcctgtggtggccctggtgggcacagatgccaccctgtgctgcagctag

SEQ ID NO: 218545 - DNA, 951 bp, Artificial Sequence
  derived and/or modified sequence
atgctgcggcggcggggcagccccggcatgggcgtgcacgtgggcgctgccctaggtgcgctgtggttctgcctcaccggggccctggaagttcaggtacccgaagaccctgtcgtggcccttgtgggtacagacgcgaccttgtgctgcagcttctcccctgaaccaggcttcagcctggcccagttgaatctgatatggcagctcactgacaccaagcagctagtgcacagcttcgccgaaggccaggatcaaggtagcgcttacgccaaccggaccgcattgttcccagatttattagcgcagggcaatgcaagcctgaggctgcagcgagtgcgggtagccgatgagggtagctttacctgctttgtatctattcgggactttggctcagctgctgttagcctccaggtggcagcgccgtatagtaaaccatctatgactcttgaacccaataaagatttgcgccctggtgacaccgtcactatcacatgctctagctaccgaggctacccagaagcagaggtgttctggcaggacgggcagggtgtgccgctaacggggaacgttaccacatcgcagatggcaaatgagcaggggttgtttgatgtgcacagtgtgctgagggttgtgctgggcgcaaacggtacatacagctgtctcgtcagaaatccagtgctgcaacaagatgcccacggctcagtcaccattacaggtcaacccatgactttcccaccggaagccctctgggtcaccgtgggcttgtcggtgtgtctgattgcactgctagtcgcccttgcctttgtctgttggaggaagatcaagcagagctgtgaagaagaaaatgccggtgccgaggaccaggacggagaaggagagggcagcaagaccgcattgcagccactgaagcactcagactcaaaggaagatgatggccaagaaatcgcctag

SEQ ID NO: 218546 - DNA, 423 bp, Artificial Sequence
  derived and/or modified sequence
atgctgcggcggcggggcagccccggcatgggcgtgcacgtgggcgctgccttgggtgccttatggttttgtttaaccggggccttggaggtgcaggttccagaggatccggtcgttgcccttgtgggaaccgatgctactctctgttgttctttctcacctgaaccagggtttagcctggcacaattaaatttgatctggcagctgacagatacgaaacagcttgtccacagctttgccgaaggtcaggatcagggatccgcttatgccaatcgaacagctctcttcccagatctgcatagagccgcgtatgacatccccccccggggcccagtgggcgatcgtggagctgtctgcctgagccactgcaccgccggggggccgggatttcgggtcctcgaaaaggaccagaccgagctgtag

SEQ ID NO: 218547 - DNA, 411 bp, Artificial Sequence
  derived and/or modified sequence
atgctgcggcggcggggcagccccggcatgggcgtgcacgtgggcgctgcactgggagccctgtggttttgtctgaccggtgcactagaagtgcaggtgccagaggatcccgtagtcgctctggtcgggactgacgccaccttatgctgctcattttcacctgagccggggttttcacttgctcagttaaacttgatatggcagctgacagacacaaaacagctggtgcactcattcgcagaaggccaggaccaggggagcgcttacgccaatagaactgcactgttcccagacctgctggcacagggcaacgcatcactgcgcctccagcgtgtgagagtcgccgacgaaggctccttcacctgttttgtgtcgattcgtgattttgggagtgcagcggttagcctctag

SEQ ID NO: 218548 - DNA, 402 bp, Artificial Sequence
  derived and/or modified sequence
atgctgcggcggcggggcagccccggcatgggcgtgcacgtgggcgccgccctaggggctctgtggttctgccttaccggcgcgctggaggtgcaagtgccagaagatcctgttgtagccctggtgggaaccgatgctacactgtgctgcagtttctccccagagcctggcttcagcctcgcgcagctgaatctcatctggcagctcacggataccaagcagcttgtgcactcatttgctgagggccaagatcaaggcagcgcttatgctaaccggactgccctgttcccagacttattggcgcaaggcaacgctagtctccggctgcagcgcgtacgggtcgctgatgagggatccttcacttgcttcgttagcatccgtgacttcgggtctgcagcatag

SEQ ID NO: 218549 - DNA, 498 bp, Artificial Sequence
  derived and/or modified sequence
atgctgcggcggcggggcagccccggcatgggcgtgcacgtgggcgcggcgctgggggcattatggttctgcctgacaggggctcttgaggtccaggtgcctgaagacccggtggtggcactggttgggactgacgccaccctctgctgctccttctctcctgagccaggtttttctctggctcagctgaacctgatttggcaattgactgataccaagcaactggtgcactcttttgctgaaggacaggatcagggctctgcttatgctaatagaactgcattattccccgatctgctggctcagggcaatgcctcacttcggctacagagagtcagggtagctgacgaaggaagcttcacatgtttcgtgagcatccgtgacttcgggtccgccgccgtaagtctgcaggtggccgcaccttacagcaaaccatcaatgacattagaaccaaataaagatctccgtcctggcgataccgtgacaataacttgctag

SEQ ID NO: 218550 - DNA, 156 bp, Artificial Sequence
  derived and/or modified sequence
atgctgcggcggcggggcagccccggcatgggcgtgcacgtgggcgccgcccttggggcactatggttctgcctaaccggagccctggaggtgcaggtgcctgaggatcctgtggtggcgcttgtgggtactgatgcaaccctgtgttgcagctag

SEQ ID NO: 218551 - DNA, 951 bp, Artificial Sequence
  derived and/or modified sequence
atgcttcggaggagaggctctccaggcatgggcgtacatgtcggcgcagcgctgggcgctctatggttttgccttaccggcgcattggaggtgcaggtgcccgaggaccctgtcgtggccttggttggcactgacgcgacactctgttgtagtttttctcctgagcctggctttagtctcgcacagctcaatctcatttggcagctgaccgacactaagcagcttgtgcattcctttgccgagggacaggaccaggggagcgcttacgcaaatagaaccgccttgtttcctgacttgctggctcaggggaacgcatcgctgagactgcagagagtacgcgtagccgacgaagggtcctttacctgtttcgtgtcaatccgcgacttcggttctgcggctgtcagcctgcaagtcgctgctccttacagtaaaccttcaatgaccttggagccaaataaggacctgcgcccaggtgatacagttactattacgtgttcgagctacaggggatacccagaggcagaagtgttttggcaggacggccagggcgtacctctgaccggcaacgtgacaacgagccagatggcaaatgaacaggggctgttcgacgttcattctgtcctccgggtggtactgggagccaatggcacttatagctgcctggtgaggaatccagtgcttcaacaagatgctcatgggtccgtgaccattaccggccagcctatgaccttcccaccagaagccttatgggttactgttggtctgtctgtgtgtctaatcgccctcttggttgctttggcatttgtttgctggaggaagatcaaacagtcttgtgaggaagagaatgcaggcgctgaagaccaggatggagagggggagggctctaaaactgccctccagcccctgaaacactctgacagcaaagaggacgacgggcaggaaatcgcttag

SEQ ID NO: 218552 - DNA, 423 bp, Artificial Sequence
  derived and/or modified sequence
atgctgaggcgccgaggctctcccggaatgggcgtgcatgtgggggctgccctaggcgctctttggttctgtctgactggagccctggaggtccaggtgccagaagatcctgtcgtggctttggtcggcactgacgccaccttgtgctgctccttctccccagaacccggattttcactggctcaactcaacctcatttggcagctaacggacacaaagcaactcgtccactctttcgctgaaggccaggaccagggctctgcctacgccaaccgaacagccctgtttccagatcttcacagagcggcatatgacatccctcctagagggccagtgggagacaggggcgcagtatgtctgagccactgtactgcgggtggcccaggtttcagagtgctggagaaagaccagactgagttatag

SEQ ID NO: 218553 - DNA, 411 bp, Artificial Sequence
  derived and/or modified sequence
atgcttcgcagacgcggttccccaggaatgggagtgcatgttggagccgcactgggggctctatggttctgtctgacaggtgctttggaagtgcaggtgccagaagatcctgtcgtcgcacttgtcggaacagacgcaaccttatgctgtagcttcagcccagagcccggattttccctcgcacagctgaatctgatatggcaactgaccgacaccaaacaactggtgcattcatttgccgaggggcaggaccagggctcggcctacgccaatcgcactgcattgtttcctgacctgttggctcagggaaacgcatccttacggctgcaacgggttcgcgtggcagacgaaggatcattcacctgtttcgtttctatccgcgacttcggaagcgccgcagtgagtctctag

SEQ ID NO: 218554 - DNA, 402 bp, Artificial Sequence
  derived and/or modified sequence
atgctgcggcgtcggggttcccctgggatgggggtccatgtcggggctgcactgggagcactgtggttttgcctcacgggagccctggaggtgcaggttccggaagatcccgttgttgcgctggtgggcacagacgccactctgtgctgttcatttagtccagaaccgggtttctccctggcgcagttgaacctaatttggcaactgacagatactaaacagctggtacattcatttgccgagggtcaggaccagggatccgcctatgcaaacagaacagcactgtttccggatctcctcgctcaaggcaacgccagcctgaggctccagagagtgcgtgtggctgatgagggctcgttcacttgttttgtctccattagagatttcggctcggctgcgtag

SEQ ID NO: 218555 - DNA, 498 bp, Artificial Sequence
  derived and/or modified sequence
atgttgcggcgtaggggttctccgggaatgggggtccacgtgggggcagcactgggggcactctggttctgcttgactggggcattggaagttcaggtaccagaggaccccgtcgtcgcactcgttggtacagatgctaccctttgctgctccttctcaccagaacctggctttagtctcgctcagctcaatctgatctggcagctaactgacaccaagcagcttgttcactcttttgcagagggtcaggaccaggggtccgcgtatgctaaccgcacagcacttttcccagatctgctggcacaggggaatgccagcctgaggcttcagagggtgcgggtggccgacgaggggagcttcacttgttttgtaagtatcagggactttggaagcgctgccgtgagcctgcaagtggcggctccttactctaagccgtccatgacactggagcccaacaaggaccttcgacccggtgatacagtgaccatcacttgttag

SEQ ID NO: 218556 - DNA, 156 bp, Artificial Sequence
  derived and/or modified sequence
atgttgaggcgccgaggaagcccaggcatgggcgttcatgtgggggctgcactcggagctctatggttctgcttgacaggcgcactggaggtccaggtgcctgaagacccagtggttgctttagtgggtaccgatgctacgctatgttgcagctag

SEQ ID NO: 218557 - DNA, 2815 bp, Artificial Sequence
  derived and/or modified sequence
ccaggccgtgtgctctgcccagcgggctggctcaggcctcggtcagcagccgccaccgcggggccaatccggcctcagggacgcaccggagccgcctttccgggcctcaggcggattctccggcgcggcccgccccgcccctcggactccccgggccgcccccggcccccattcgggccgggcctcgctgcggcggcgactgagccaggctgggccgcgtccctgagtcccagagtcggcgcggcgcggcaggggcagccttccaccacggggagcccagctgtcagccgcctcacaggaagatgctgcgtcggcggggcagccctggcatgggtgtgcatgtgggtgcagccctgggagcactgtggttctgcctcacaggagccctggaggtccaggtccctgaagacccagtggtggcactggtgggcaccgatgccaccctgtgctgctccttctcccctgagcctggcttcagcctggcacagctcaacctcatctggcagctgacagataccaaacagctggtgcacagctttgctgagggccaggaccagggcagcgcctatgccaaccgcacggccctcttcccggacctgctggcacagggcaacgcatccctgaggctgcagcgcgtgcgtgtggcggacgagggcagcttcacctgcttcgtgagcatccgggatttcggcagcgctgccgtcagcctgcaggtggccgctccctactcgaagcccagcatgaccctggagcccaacaaggacctgcggccaggggacacggtgaccatcacgtgctccagctaccggggctaccctgaggctgaggtgttctggcaggatgggcagggtgtgcccctgactggcaacgtgaccacgtcgcagatggccaacgagcagggcttgtttgatgtgcacagcgtcctgcgggtggtgctgggtgcgaatggcacctacagctgcctggtgcgcaaccccgtgctgcagcaggatgcgcacggctctgtcaccatcacagggcagcctatgacattccccccagaggccctgtgggtgaccgtggggctgtctgtctgtctcattgcactgctggtggccctggctttcgtgtgctggagaaagatcaaacagagctgtgaggaggagaatgcaggagctgaggaccaggatggggagggagaaggctccaagacagccctgcagcctctgaaacactctgacagcaaagaagatgatggacaagaaatagcctgaccatgaggaccagggagctgctacccctccctacagctcctaccctctggctgcaatggggctgcactgtgagccctgcccccaacagatgcatcctgctctgacaggtgggctccttctccaaaggatgcgatacacagaccactgtgcagccttatttctccaatggacatgattcccaagtcatcctgctgccttttttcttatagacacaatgaacagaccacccacaaccttagttctctaagtcatcctgcctgctgccttatttcacagtacatacatttcttagggacacagtacactgaccacatcaccaccctcttcttccagtgctgcgtggaccatctggctgccttttttctccaaaagatgcaatattcagactgactgaccccctgccttatttcaccaaagacacgatgcatagtcaccccggccttgtttctccaatggccgtgatacactagtgatcatgttcagccctgcttccacctgcatagaatcttttcttctcagacagggacagtgcggcctcaacatctcctggagtctagaagctgtttcctttcccctccttcctcctcttgctctagccttaatactggccttttccctccctgccccaagtgaagacagggcactctgcgcccaccacatgcacagctgtgcatggagacctgcaggtgcacgtgctggaacacgtgtggttcccccctggcccagcctcctctgcagtgcccctctcccctgcccatcctccccacggaagcatgtgctggtcacactggttctccaggggtctgtgatggggcccctgggggtcagcttctgtccctctgccttctcacctctttgttcctttcttttcatgtatccattcagttgatgtttattgagcaactacagatgtcagcactgtgttaggtgctgggggccctgcgtgggaagataaagttcctccctcaaggactccccatccagctgggagacagacaactaactacactgcaccctgcggtttgcagggggctcctgcctggctccctgctccacacctcctctgtggctcaaggcttcctggatacctcacccccatcccacccataattcttacccagagcatggggttggggcggaaacctggagagagggacatagcccctcgccacggctagagaatctggtggtgtccaaaatgtctgtccaggtgtgggcaggtgggcaggcaccaaggccctctggacctttcatagcagcagaaaaggcagagcctggggcagggcagggccaggaatgctttggggacaccgaggggactgccccccacccccaccatggtgctattctggggctggggcagtcttttcctggcttgcctctggccagctcctggcctctggtagagtgagacttcagacgttctgatgccttccggatgtcatctctccctgccccaggaatggaagatgtgaggacttctaatttaaatgtgggactcggagggattttgtaaactgggggtatattttggggaaaataaatgtctttgtaaaaagctt

SEQ ID NO: 218558 - DNA, 1162 bp, Artificial Sequence
  derived and/or modified sequence
attcgggccgggcctcgctgcggcggcgactgagccaggctgggccgcgtccctgagtcccagagtcggcgcggcgcggcaggggcagccttccaccacggggagcccagctgtcagccgcctcacaggaagatgctgcgtcggcggggcagccctggcatgggtgtgcatgtgggtgcagccctgggagcactgtggttctgcctcacaggagccctggaggtccaggtccctgaagacccagtggtggcactggtgggcaccgatgccaccctgtgctgctccttctcccctgagcctggcttcagcctggcacagctcaacctcatctggcagctgacagataccaaacagctggtgcacagctttgctgagggccaggaccagggcagcgcctatgccaaccgcacggccctcttcccggacctgcacagggcagcctatgacattccccccagaggccctgtgggtgaccgtggggctgtctgtctgtctcattgcactgctggtggccctggctttcgtgtgctggagaaagatcaaacagagctgtgaggaggagaatgcaggagctgaggaccaggatggggagggagaaggctccaagacagccctgcagcctctgaaacactctgacagcaaagaagatgatggacaagaaatagcctgaccatgaggaccagggagctgctacccctccctacagctcctaccctctggctgcaatggggctgcactgtgagccctgcccccaacagatgcatcctgctctgacaggtgggctccttctccaaaggatgcgatacacagaccactgtgcagccttatttctccaatggacatgattcccaagtcatcctgctgccttttttcttatagacacaatgaacagaccacccacaaccttagttctctaagtcatcctgcctgctgccttatttcacagtacatacatttcttagggacacagtacactgaccacatcaccaccctcttcttccagtgctgcgtggaccatctggctgccttttttctccaaaagatgcaatattcagactgactgaccccctgccttatttcaccaaagacacgatgcatagtcaccccggccttgtttctccaatggccgtgatacactagtgatcatgttcagccctgcttc

SEQ ID NO: 218559 - DNA, 649 bp, Artificial Sequence
  derived and/or modified sequence
attcgggccgggcctcgctgcggcggcgactgagccaggctgggccgcgtccctgagtcccagagtcggcgcggcgcgtcttgcagtatcgcccagactggagtacagtggcgcgatttccactcactacaacctccgcctcctgggttcaagcaattctcctgcctcagcctcctgagtagctggcaggggcagccttccaccacggggagcccagctgtcagccgcctcacaggaagatgctgcgtcggcggggcagccctggcatgggtgtgcatgtgggtgcagccctgggagcactgtggttctgcctcacaggagccctggaggtccaggtccctgaagacccagtggtggcactggtgggcaccgatgccaccctgtgctgctccttctcccctgagcctggcttcagcctggcacagctcaacctcatctggcagctgacagataccaaacagctggtgcacagctttgctgagggccaggaccagggcagcgcctatgccaaccgcacggccctcttcccggacctgctggcacagggcaacgcatccctgaggctgcagcgcgtgcgtgtggcggacgagggcagcttcacctgcttcgtgagcatccgggatttcggcagcgctgccgtcagcctgca

SEQ ID NO: 218560 - DNA, 621 bp, Artificial Sequence
  derived and/or modified sequence
tttcctcgggttgagaggggcccgggcgccgtcggacctgcagaccccggaagctgcggaccgggccgggtgggtgaatgcgcttttgcaggccccgggtctggagcgggcatgggggcagatctgtcccgtgttgaagcttaacgaagccaccggccggcgctgggaggcaggggcagccttccaccacggggagcccagctgtcagccgcctcacaggaagatgctgcgtcggcggggcagccctggcatgggtgtgcatgtgggtgcagccctgggagcactgtggttctgcctcacaggagccctggaggtccaggtccctgaagacccagtggtggcactggtgggcaccgatgccaccctgtgctgctccttctcccctgagcctggcttcagcctggcacagctcaacctcatctggcagctgacagataccaaacagctggtgcacagctttgctgagggccaggaccagggcagcgcctatgccaaccgcacggccctcttcccggacctgctggcacagggcaacgcatccctgaggctgcagcgcgtgcgtgtggcggacgagggcagcttcacctgcttcgtgagcatccgggatttcggcagcgctgc

SEQ ID NO: 218561 - DNA, 628 bp, Artificial Sequence
  derived and/or modified sequence
gggcgaaggtgtgggcgactggtgcacttccacaggcagccgtgggcagcatgaggggtcagattccgggaaggacaggcaggggcagccttccaccacggggagcccagctgtcagccgcctcacaggaagatgctgcgtcggcggggcagccctggcatgggtgtgcatgtgggtgcagccctgggagcactgtggttctgcctcacaggagccctggaggtccaggtccctgaagacccagtggtggcactggtgggcaccgatgccaccctgtgctgctccttctcccctgagcctggcttcagcctggcacagctcaacctcatctggcagctgacagataccaaacagctggtgcacagctttgctgagggccaggaccagggcagcgcctatgccaaccgcacggccctcttcccggacctgctggcacagggcaacgcatccctgaggctgcagcgcgtgcgtgtggcggacgagggcagcttcacctgcttcgtgagcatccgggatttcggcagcgctgccgtcagcctgcaggtggccgctccctactcgaagcccagcatgaccctggagcccaacaaggacctgcggccaggggacacggtgaccatcacgtgct

SEQ ID NO: 218562 - DNA, 507 bp, Artificial Sequence
  derived and/or modified sequence
ctttgtctgctgcgggccgggcctggatcccgcggaggtccgcacgttcccgctcagggctgcaggagctgagcagggcgccttccctccgggctcctgctcccctgccctcccccaggtccgggcggcccccctcgcacaggagtcccgggaaccgcgggcgcccctcctgccctgggctgtggggcccgcggagagctgggggctcccggatcctaccccgcccccctttcctcgggttgagaggggcccgggcgccgtcggacctgcagaccccggaagctgcggaccgggccgggcaggggcagccttccaccacggggagcccagctgtcagccgcctcacaggaagatgctgcgtcggcggggcagccctggcatgggtgtgcatgtgggtgcagccctgggagcactgtggttctgcctcacaggagccctggaggtccaggtccctgaagacccagtggtggcactggtgggcaccgatgccaccctgtgctgctcctt

SEQ ID NO: 218563 - DNA, 951 bp, Artificial Sequence
  derived and/or modified sequence
atgctgagaagaagaggcagccccggcatgggcgtgcacgtgggcgccgccctgggcgccctgtggttctgcctgaccggcgccctggaggtgcaggtgcccgaggaccccgtggtggccctggtgggcaccgacgccaccctgtgctgcagcttcagccccgagcccggcttcagcctggcccagctgaacctgatctggcagctgaccgacaccaagcagctggtgcacagcttcgccgagggccaggaccagggcagcgcctacgccaacagaaccgccctgttccccgacctgctggcccagggcaacgccagcctgagactgcagagagtgagagtggccgacgagggcagcttcacctgcttcgtgagcatcagagacttcggcagcgccgccgtgagcctgcaggtggccgccccctacagcaagcccagcatgaccctggagcccaacaaggacctgagacccggcgacaccgtgaccatcacctgcagcagctacagaggctaccccgaggccgaggtgttctggcaggacggccagggcgtgcccctgaccggcaacgtgaccaccagccagatggccaacgagcagggcctgttcgacgtgcacagcgtgctgagagtggtgctgggcgccaacggcacctacagctgcctggtgagaaaccccgtgctgcagcaggacgcccacggcagcgtgaccatcaccggccagcccatgaccttcccccccgaggccctgtgggtgaccgtgggcctgagcgtgtgcctgatcgccctgctggtggccctggccttcgtgtgctggagaaagatcaagcagagctgcgaggaggagaacgccggcgccgaggaccaggacggcgagggcgagggcagcaagaccgccctgcagcccctgaagcacagcgacagcaaggaggacgacggccaggagatcgcctag

SEQ ID NO: 218564 - DNA, 423 bp, Artificial Sequence
  derived and/or modified sequence
atgctgagaagaagaggcagccccggcatgggcgtgcacgtgggcgccgccctgggcgccctgtggttctgcctgaccggcgccctggaggtgcaggtgcccgaggaccccgtggtggccctggtgggcaccgacgccaccctgtgctgcagcttcagccccgagcccggcttcagcctggcccagctgaacctgatctggcagctgaccgacaccaagcagctggtgcacagcttcgccgagggccaggaccagggcagcgcctacgccaacagaaccgccctgttccccgacctgcacagagccgcctacgacatcccccccagaggccccgtgggcgacagaggcgccgtgtgcctgagccactgcaccgccggcggccccggcttcagagtgctggagaaggaccagaccgagctgtag

SEQ ID NO: 218565 - DNA, 411 bp, Artificial Sequence
  derived and/or modified sequence
atgctgagaagaagaggcagccccggcatgggcgtgcacgtgggcgccgccctgggcgccctgtggttctgcctgaccggcgccctggaggtgcaggtgcccgaggaccccgtggtggccctggtgggcaccgacgccaccctgtgctgcagcttcagccccgagcccggcttcagcctggcccagctgaacctgatctggcagctgaccgacaccaagcagctggtgcacagcttcgccgagggccaggaccagggcagcgcctacgccaacagaaccgccctgttccccgacctgctggcccagggcaacgccagcctgagactgcagagagtgagagtggccgacgagggcagcttcacctgcttcgtgagcatcagagacttcggcagcgccgccgtgagcctgtag

SEQ ID NO: 218566 - DNA, 402 bp, Artificial Sequence
  derived and/or modified sequence
atgctgagaagaagaggcagccccggcatgggcgtgcacgtgggcgccgccctgggcgccctgtggttctgcctgaccggcgccctggaggtgcaggtgcccgaggaccccgtggtggccctggtgggcaccgacgccaccctgtgctgcagcttcagccccgagcccggcttcagcctggcccagctgaacctgatctggcagctgaccgacaccaagcagctggtgcacagcttcgccgagggccaggaccagggcagcgcctacgccaacagaaccgccctgttccccgacctgctggcccagggcaacgccagcctgagactgcagagagtgagagtggccgacgagggcagcttcacctgcttcgtgagcatcagagacttcggcagcgccgcctag

SEQ ID NO: 218567 - DNA, 498 bp, Artificial Sequence
  derived and/or modified sequence
atgctgagaagaagaggcagccccggcatgggcgtgcacgtgggcgccgccctgggcgccctgtggttctgcctgaccggcgccctggaggtgcaggtgcccgaggaccccgtggtggccctggtgggcaccgacgccaccctgtgctgcagcttcagccccgagcccggcttcagcctggcccagctgaacctgatctggcagctgaccgacaccaagcagctggtgcacagcttcgccgagggccaggaccagggcagcgcctacgccaacagaaccgccctgttccccgacctgctggcccagggcaacgccagcctgagactgcagagagtgagagtggccgacgagggcagcttcacctgcttcgtgagcatcagagacttcggcagcgccgccgtgagcctgcaggtggccgccccctacagcaagcccagcatgaccctggagcccaacaaggacctgagacccggcgacaccgtgaccatcacctgctag

SEQ ID NO: 218568 - DNA, 156 bp, Artificial Sequence
  derived and/or modified sequence
atgctgagaagaagaggcagccccggcatgggcgtgcacgtgggcgccgccctgggcgccctgtggttctgcctgaccggcgccctggaggtgcaggtgcccgaggaccccgtggtggccctggtgggcaccgacgccaccctgtgctgcagctag

SEQ ID NO: 218569 - protein, 374 aa, Artificial Sequence
  derived and/or modified sequence
MAAPPRPAPSPPAPRRLDTSDVLQQIMAITDQSLDEAQARKHALNCHRMKPALFSVLCEIKEKTVVSIRGIQDEDPPDAQLLRLDNMLLAEGVCRPEKRGRGGAVARAGTATPGGCPNDNSIEHSDYRAKLSQIRQIYHSELEKYEQACREFTTHVTNLLQEQSRMRPVSPKEIERMVGAIHGKFSAIQMQLKQSTCEAVMTLRSRLLDARRKRRNFSKQATEVLNEYFYSHLNNPYPSEEAKEELARKGGLTISQVSNWFGNKRIRYKKNMGKFQEEATIYTGKTAVDTTEVGVPGNHASCLSTPSSGSSGPFPLPSAGDAFLTLRTLASLQPPPGGGCLQSQAQGSWQGATPQPATASPAGDPGSINSSTSN

SEQ ID NO: 218570 - DNA, 1125 bp, Artificial Sequence
  derived and/or modified sequence
atggccgcccctccacgacccgccccatccccgccagcccctcgaagactcgatacatccgatgtattacagcagatcatggcaataactgaccagtccttagacgaagcccaagccaggaaacacgccctgaattgccaccgcatgaagcccgcgctgttcagcgtcctgtgcgaaatcaaggaaaagactgtggtgagtatccgtggcatccaggacgaggatccgccagacgcccagctgctgaggctggacaatatgttactagccgagggtgtgtgtcggccggaaaagagggggcggggaggtgccgtggctcgagccgggaccgcgactcctggcgggtgtccaaacgacaattccattgagcatagcgactacagagcaaagttatcgcagatcaggcaaatatatcacagtgagctcgagaagtacgagcaggcatgccgtgagttcaccacacacgtaacgaaccttctccaggaacagtcgcgtatgcgcccagtgagcccgaaggaaatagaaagaatggtgggggccatccacggcaaattctccgcgatccagatgcagctgaagcaatccacttgcgaggccgtaatgaccctcaggagcagacttctggatgctaggcggaaacggcgtaatttcagcaaacaggctacggaagtgctgaatgagtacttctactctcatctgaacaatccataccccagcgaggaggccaaggaagagctcgcaagaaaaggcgggctgactatctcgcaagtttcgaattggttcggcaacaagcgaatacgttacaagaagaatatgggaaaatttcaggaagaggccactatttacaccggtaagacagccgtcgacaccaccgaagtcggcgtgcctggaaatcatgctagttgcctgagcaccccaagttcagggtcaagcggacccttccctctgccatccgctggtgatgccttcttaaccctgaggaccctggcctcccttcagccacctcctggtggtgggtgcctccagtcacaggcacagggatcgtggcagggtgccacaccacaacccgccactgcatccccagcgggtgatcctggctctatcaattcctctactagtaattag

SEQ ID NO: 218571 - DNA, 1125 bp, Artificial Sequence
  derived and/or modified sequence
atggccgccccacccaggcctgcccccagccccccagccccccggcggctggacaccagtgatgtgctgcagcagatcatggccatcacagaccagagcctggatgaggcccaggccaggaagcacgccctgaactgccacaggatgaagccagccctcttctctgtgctgtgtgagatcaaggagaagacagtggtgtccatccggggcatccaggatgaggaccccccagatgcccagctgctgcggctggacaacatgctgctggccgagggcgtgtgcaggcctgagaagaggggccggggcggcgctgtggcccgggccggcacagccaccccaggcggctgccccaatgacaacagcattgagcacagcgactaccgggccaagctgagccagatccggcagatctaccacagcgagctggagaagtatgagcaggcctgccgggagttcaccacccacgtgaccaacctgctgcaggagcagagcaggatgaggcctgtgagccccaaggagattgaaagaatggtgggcgccatccacggcaagttcagcgccatccagatgcagctgaagcagagcacctgtgaggccgtgatgaccctgcggagccggctgctggatgcccggaggaagagaagaaacttcagcaagcaggccacagaggtgctgaatgagtacttctacagccacctgaacaacccctaccccagcgaggaggccaaggaggagctggccaggaaaggaggcctgaccatcagccaggtgagcaactggtttggaaacaagaggatccgctacaagaagaacatgggcaagttccaggaggaggccaccatctacacaggcaagacagctgtggacaccacagaggtgggcgtgcccggcaaccacgccagctgcctgagcacccccagcagcggcagcagcggccccttccccctgcccagcgctggagatgccttcctgaccctgcggaccctggccagcctgcagcccccacctgggggcggctgcctgcagagccaggcccagggctcctggcagggcgccaccccccagcctgccacagccagccctgctggggaccccggcagcatcaacagcagcaccagcaactag

SEQ ID NO: 218572 - DNA, 1414 bp, Artificial Sequence
  derived and/or modified sequence
agaagtgccgttgcctcggcaaccccaaacccagtccaagcccggagagggggaagttcggggcgagtcccgggggcggtgcgtggcgccggttggctgacggagatgaaggggcgtgtctgtaggcggtgcaatacacgggttggctggcgatagcggcggtgggcgtggcttaggcgcgagcgagagcgggcgcggcgctcaggcagcggcggttggctgcggcgccagtggtagtgctccaggctcgacggcaccctcacagcgcccgcccggccctgccgctcatggccgccccgccgcgccccgcgccatcgccccccgccccgcggcgcctcgacacgagcgacgtcctgcagcagatcatggccatcaccgaccagagcctggacgaggcacaggccagaaagcatgctctgaattgccatcggatgaagcctgctctgttcagcgtgctctgtgagatcaaggaaaagacagtggtaagcatccgtggcattcaagacgaagatccccctgacgcccagctcctgaggctggataacatgctgctggctgagggcgtgtgcaggcccgagaagagaggaagaggaggagcggtggccagggccggcacagcaacaccaggtggctgtccaaatgacaatagcattgagcactctgactacagggccaagctgtcccagatccgacagatttaccactctgagctagagaaatatgaacaggcctgtcgtgagttcaccacgcacgtcaccaacctcctccaggagcagagcaggatgaggcctgtctcccctaaggagattgagcgcatggtcggcgccattcacggcaagttcagcgccatccagatgcagttgaagcagagcacctgtgaggcagtgatgaccctgcgttcgcggctgctcgatgccaggcgcaagcggcggaatttcagcaagcaggcgacggaagtgctgaatgagtatttttactcccatctgaacaacccttaccccagcgaagaagccaaagaagagctggccaggaagggcggcctcaccatctcccaggtctctaactggtttggcaacaaaagaatccggtataaaaagaacatggggaagtttcaagaagaggctaccatttacacgggtaaaacggctgtggataccacggaagttggggtcccagggaaccacgccagctgcctgtcaacacctagctccggctcctctggacccttcccgctgcccagcgctggggacgccttcctcaccctgcggactctggcctctctccagcctcctcctgggggaggctgcctgcagtcccaggcccagggtagctggcagggggccaccccccaacctgcaactgcctcacctgctggagaccctggcagcatcaactccagtacatctaattaagt

SEQ ID NO: 218573 - DNA, 1125 bp, Artificial Sequence
  derived and/or modified sequence
atggccgcccccccccggcccgcccccagcccccccgccccccggcgactggatacctctgatgttcttcaacaaatcatggcgattactgaccagagcctcgacgaagctcaggctagaaaacatgcacttaattgccaccgaatgaaacccgccctgttcagtgtgctctgcgaaatcaaggagaagactgtggtctctatcaggggaatacaggacgaggacccgccggatgcccaattgttgcggctggataacatgttgctcgccgagggtgtctgtcggccagaaaaaaggggtaggggtggggcagttgccagggcaggcactgccacccccggcggctgtccaaatgataactctattgaacacagcgattatcgggccaagctcagccagattaggcaaatttaccactcagagttagaaaaatatgaacaggcctgcagagaatttacgactcacgtgaccaacctgttacaggaacaatcacgcatgcggccagtgagccctaaggagattgaacggatggtcggcgctatccatggcaaattttcggctattcagatgcagctgaaacagtctacttgcgaggcagtgatgaccctgagatcaaggctgcttgacgcacgtaggaagcgcaggaactttagcaagcaggcaactgaggtcctcaatgagtatttttactctcacctgaataatccatacccgagtgaggaagctaaagaagagctggctaggaagggcgggttgacgatctctcaggttagcaattggtttggaaataagaggatcagatataagaaaaacatggggaagttccaagaggaagcaacaatctatacgggtaagacagctgtcgacactacagaagtgggggttcccgggaaccacgcctcttgtttatcaacaccctcttctggcagttccggcccatttcctctgccatcagccggggacgccttcttgactcttcgaactctcgcatctctgcagcctccgcctggcggtggttgcctccagtcccaggcccagggctcttggcagggagcgacgccgcagcccgctactgcttcgcccgccggggaccccggcagcattaattccagcacaagcaactag

SEQ ID NO: 218574 - DNA, 1125 bp, Artificial Sequence
  derived and/or modified sequence
atggcagctcctccgcgacccgctccctctccaccagcaccaagaagacttgacacgtcagacgtcctacagcagattatggcgatcacagaccagtctctggacgaagcgcaggcgaggaagcacgcccttaattgccatcgcatgaagcctgctctgttttcagtgctttgtgagatcaaggaaaagacagtggtgagtatccggggaatccaggacgaggatccccctgatgcccaattgctgagactcgacaacatgctgctggcagaaggcgtgtgccggccagaaaaacgcggtcgaggtggggctgtcgcaagagcgggaacagcgacacccggtgggtgccccaacgacaactccatcgaacacagcgattacagggccaagctgtcacaaataaggcagatttaccactccgaactggaaaaatacgaacaggcttgcagagagttcaccacacacgtgacgaacctcctgcaggaacagtctaggatgcgccctgtgagtcccaaggagatcgagcgaatggtgggtgcgatccatggaaaattcagcgccattcaaatgcaactgaaacagagtacctgcgaagctgtcatgacgctcagaagccgccttctggacgccagaagaaagaggcggaatttttccaagcaggccaccgaagttttaaacgagtacttctactctcacctgaacaacccttacccatccgaagaggccaaagaggaactggccagaaaaggtggattgaccatatcgcaggtgtctaactggttcggaaacaagaggattcggtataagaagaacatggggaaattccaagaagaggcgacaatctatactggtaaaactgccgtagacacaacggaggtcggggtgccagggaaccatgctagctgtttgagtacaccatctagcgggagcagcggcccattcccgctgccctccgcaggtgacgcctttctgacattacgcaccctcgcatctctacagcccccacctggtggcggttgtctccagtcacaggcccaggggtcctggcagggtgccactccacaacctgcaacagcttccccagccggagaccccggatcaattaactcttcaaccagcaactag

SEQ ID NO: 218575 - DNA, 1125 bp, Artificial Sequence
  derived and/or modified sequence
atggccgccccccccagacccgcccccagcccccccgcccccagaagactggacaccagcgacgtgctgcagcagatcatggccatcaccgaccagagcctggacgaggcccaggccagaaagcacgccctgaactgccacagaatgaagcccgccctgttcagcgtgctgtgcgagatcaaggagaagaccgtggtgagcatcagaggcatccaggacgaggacccccccgacgcccagctgctgagactggacaacatgctgctggccgagggcgtgtgcagacccgagaagagaggcagaggcggcgccgtggccagagccggcaccgccacccccggcggctgccccaacgacaacagcatcgagcacagcgactacagagccaagctgagccagatcagacagatctaccacagcgagctggagaagtacgagcaggcctgcagagagttcaccacccacgtgaccaacctgctgcaggagcagagcagaatgagacccgtgagccccaaggagatcgagagaatggtgggcgccatccacggcaagttcagcgccatccagatgcagctgaagcagagcacctgcgaggccgtgatgaccctgagaagcagactgctggacgccagaagaaagagaagaaacttcagcaagcaggccaccgaggtgctgaacgagtacttctacagccacctgaacaacccctaccccagcgaggaggccaaggaggagctggccagaaagggcggcctgaccatcagccaggtgagcaactggttcggcaacaagagaatcagatacaagaagaacatgggcaagttccaggaggaggccaccatctacaccggcaagaccgccgtggacaccaccgaggtgggcgtgcccggcaaccacgccagctgcctgagcacccccagcagcggcagcagcggccccttccccctgcccagcgccggcgacgccttcctgaccctgagaaccctggccagcctgcagcccccccccggcggcggctgcctgcagagccaggcccagggcagctggcagggcgccaccccccagcccgccaccgccagccccgccggcgaccccggcagcatcaacagcagcaccagcaactag

SEQ ID NO: 218576 - protein, 1059 aa, Artificial Sequence
  derived and/or modified sequence
MCVRSCFQSPRLQWVWRTAFLKHTQRRHQGSHRWTHLGGSTYRAVIFDMGGVLIPSPGRVAAEWEVQNRIPSGTILKALMEGGENGPWMRFMRAEITAEGFLREFGRLCSEMLKTSVPVDSFFSLLTSERVAKQFPVMTEAITQIRAKGLQTAVLSNNFYLPNQKSFLPLDRKQFDVIVESCMEGICKPDPRIYKLCLEQLGLQPSESIFLDDLGTNLKEAARLGIHTIKVNDPETAVKELEALLGFTLRVGVPNTRPVKKTMEIPKDSLQKYLKDLLGIQTTGPLELLQFDHGQSNPTYYIRLANRDLVLRKKPPGTLLPSAHAIEREFRIMKALANAGVPVPNVLDLCEDSSVIGTPFYVMEYCPGLIYKDPSLPGLEPSHRRAIYTAMNTVLCKIHSVDLQAVGLEDYGKQGDYIPRQVRTWVKQYRASETSTIPAMERLIEWLPLHLPRQQRTTVVHGDFRLDNLVFHPEEPEVLAVLDWELSTLGDPLADVAYSCLAHYLPSSFPVLRGINDCDLTQLGIPAAEEYFRMYCLQMGLPPTENWNFYMAFSFFRVAAILQGVYKRSLTGQASSTYAEQTGKLTEFVSNLAWDFAVKEGFRVFKEMPFTNPLTRSYHTWARPQSQWCPTGSRSYSSVPEASPAHTSRGGLVISPESLSPPVRELYHRLKHFMEQRVYPAEPELQSHQASAARWSPSPLIEDLKEKAKAEGLWNLFLPLEADPEKKYGAGLTNVEYAHLCELMGTSLYAPEVCNCSAPDTGNMELLVRYGTEAQKARWLIPLLEGKARSCFAMTEPQVASSDATNIEASIREEDSFYVINGHKWWITGILDPRCQLCVFMGKTDPHAPRHRQQSVLLVPMDTPGIKIIRPLTVYGLEDAPGGHGEVRFEHVRVPKENMVLGPGRGFEIAQGRLGPGRIHHCMRLIGFSERALALMKARVKSRLAFGKPLVEQGTVLADIAQSRVEIEQARLLVLRAAHLMDLAGNKAAALDIAMIKMVAPSMASRVIDRAIQAFGAAGLSSDYPLAQFFTWARALRFADGPDEVHRATVAKLELKHRI

SEQ ID NO: 218577 - protein, 890 aa, Artificial Sequence
  derived and/or modified sequence
MCVRSCFQSPRLQWVWRTAFLKHTQRRHQGSHRWTHLGGSTYRAVIFDMGGVLIPSPGRVAAEWEVQNRIPSGTILKALMEGGENGPWMRFMRAEITAEGFLREFGRLCSEMLKTSVPVDSFFSLLTSERVAKQFPVMTEAITQIRAKGLQTAVLSNNFYLPNQKSFLPLDRKQFDVIVESCMEGICKPDPRIYKLCLEQLGLQPSESIFLDDLGTNLKEAARLGIHTIKVNDPETAVKELEALLGFTLRVGVPNTRPVKKTMEIPKDSLQKYLKDLLGIQTTGPLELLQFDHGQSNPTYYIRLANRDLVLRKKPPGTLLPSAHAIEREFRIMKALANAGVPVPNVLDLCEDSSVIGTPFYVMEYCPGLIYKDPSLPGLEPSHRRAIYTAMNTVLCKIHSVDLQAVGLEDYGKQGDYIPRQVRTWVKQYRASETSTIPAMERLIEWLPLHLPRQQRTTVVHGDFRLDNLVFHPEEPEVLAVLDWELSTLGDPLADVAYSCLAHYLPSSFPVLRGINDCDLTQLGIPAAEEYFRMYCLQMGLPPTENWNFYMAFSFFRVAAILQGVYKRSLTGQASSTYAEQTGKLTEFVSNLAWDFAVKEGFRVFKEMPFTNPLTRSYHTWARPQSQWCPTGSRSYSSVPEASPAHTSRGGLVISPESLSPPVRELYHRLKHFMEQRVYPAEPELQSHQASAARWSPSPLIEDLKEKAKAEGLWNLFLPLEADPEKKYGAGLTNVEYAHLCELMGTSLYAPEVCNCSAPDTGNMELLVRYGTEAQKARWLIPLLEGKARSCFAMTEPQVASSDATNIEASIREEDSFYVINGHKWWITGILDPRCQLCVFMGKTDPHAPRHRQQSVLLVPMDTPGIKIIRPLTVYGLEDAPGCFLPSFSL

SEQ ID NO: 218578 - protein, 96 aa, Artificial Sequence
  derived and/or modified sequence
MCVRSCFQSPRLQWVWRTAFLKHTQRRHQGSHRWTHLGGSTYRAVIFDMGGVLIPSPGRVAAEWEVQNRIPSGTILKALMEGGENGPWMRFMRAEI

SEQ ID NO: 218579 - DNA, 3180 bp, Artificial Sequence
  derived and/or modified sequence
atgtgcgtgagaagctgcttccagagccccagactgcagtgggtgtggagaaccgccttcctgaagcacacccagagaagacaccagggcagccacagatggacccacctgggcggcagcacctacagagccgtgatcttcgacatgggcggcgtgctgatccccagccccggcagagtggccgccgagtgggaggtgcagaacagaatccccagcggcaccatcctgaaggccctgatggagggcggcgagaacggcccctggatgagattcatgagagccgagatcaccgccgagggcttcctgagagagttcggcagactgtgcagcgagatgctgaagaccagcgtgcccgtggacagcttcttcagcctgctgaccagcgagagagtggccaagcagttccccgtgatgaccgaggccatcacccagatcagagccaagggcctgcagaccgccgtgctgagcaacaacttctacctgcccaaccagaagagcttcctgcccctggacagaaagcagttcgacgtgatcgtggagagctgcatggagggcatctgcaagcccgaccccagaatctacaagctgtgcctggagcagctgggcctgcagcccagcgagagcatcttcctggacgacctgggcaccaacctgaaggaggccgccagactgggcatccacaccatcaaggtgaacgaccccgagaccgccgtgaaggagctggaggccctgctgggcttcaccctgagagtgggcgtgcccaacaccagacccgtgaagaagaccatggagatccccaaggacagcctgcagaagtacctgaaggacctgctgggcatccagaccaccggccccctggagctgctgcagttcgaccacggccagagcaaccccacctactacatcagactggccaacagagacctggtgctgagaaagaagccccccggcaccctgctgcccagcgcccacgccatcgagagagagttcagaatcatgaaggccctggccaacgccggcgtgcccgtgcccaacgtgctggacctgtgcgaggacagcagcgtgatcggcacccccttctacgtgatggagtactgccccggcctgatctacaaggaccccagcctgcccggcctggagcccagccacagaagagccatctacaccgccatgaacaccgtgctgtgcaagatccacagcgtggacctgcaggccgtgggcctggaggactacggcaagcagggcgactacatccccagacaggtgagaacctgggtgaagcagtacagagccagcgagaccagcaccatccccgccatggagagactgatcgagtggctgcccctgcacctgcccagacagcagagaaccaccgtggtgcacggcgacttcagactggacaacctggtgttccaccccgaggagcccgaggtgctggccgtgctggactgggagctgagcaccctgggcgaccccctggccgacgtggcctacagctgcctggcccactacctgcccagcagcttccccgtgctgagaggcatcaacgactgcgacctgacccagctgggcatccccgccgccgaggagtacttcagaatgtactgcctgcagatgggcctgccccccaccgagaactggaacttctacatggccttcagcttcttcagagtggccgccatcctgcagggcgtgtacaagagaagcctgaccggccaggccagcagcacctacgccgagcagaccggcaagctgaccgagttcgtgagcaacctggcctgggacttcgccgtgaaggagggcttcagagtgttcaaggagatgcccttcaccaaccccctgaccagaagctaccacacctgggccagaccccagagccagtggtgccccaccggcagcagaagctacagcagcgtgcccgaggccagccccgcccacaccagcagaggcggcctggtgatcagccccgagagcctgagcccccccgtgagagagctgtaccacagactgaagcacttcatggagcagagagtgtaccccgccgagcccgagctgcagagccaccaggccagcgccgccagatggagccccagccccctgatcgaggacctgaaggagaaggccaaggccgagggcctgtggaacctgttcctgcccctggaggccgaccccgagaagaagtacggcgccggcctgaccaacgtggagtacgcccacctgtgcgagctgatgggcaccagcctgtacgcccccgaggtgtgcaactgcagcgcccccgacaccggcaacatggagctgctggtgagatacggcaccgaggcccagaaggccagatggctgatccccctgctggagggcaaggccagaagctgcttcgccatgaccgagccccaggtggccagcagcgacgccaccaacatcgaggccagcatcagagaggaggacagcttctacgtgatcaacggccacaagtggtggatcaccggcatcctggaccccagatgccagctgtgcgtgttcatgggcaagaccgacccccacgcccccagacacagacagcagagcgtgctgctggtgcccatggacacccccggcatcaagatcatcagacccctgaccgtgtacggcctggaggacgcccccggcggccacggcgaggtgagattcgagcacgtgagagtgcccaaggagaacatggtgctgggccccggcagaggcttcgagatcgcccagggcagactgggccccggcagaatccaccactgcatgagactgatcggcttcagcgagagagccctggccctgatgaaggccagagtgaagagcagactggccttcggcaagcccctggtggagcagggcaccgtgctggccgacatcgcccagagcagagtggagatcgagcaggccagactgctggtgctgagagccgcccacctgatggacctggccggcaacaaggccgccgccctggacatcgccatgatcaagatggtggcccccagcatggccagcagagtgatcgacagagccatccaggccttcggcgccgccggcctgagcagcgactaccccctggcccagttcttcacctgggccagagccctgagattcgccgacggccccgacgaggtgcacagagccaccgtggccaagctggagctgaagcacagaatctag

SEQ ID NO: 218580 - DNA, 2673 bp, Artificial Sequence
  derived and/or modified sequence
atgtgcgtgagaagctgcttccagagccccagactgcagtgggtgtggagaaccgccttcctgaagcacacccagagaagacaccagggcagccacagatggacccacctgggcggcagcacctacagagccgtgatcttcgacatgggcggcgtgctgatccccagccccggcagagtggccgccgagtgggaggtgcagaacagaatccccagcggcaccatcctgaaggccctgatggagggcggcgagaacggcccctggatgagattcatgagagccgagatcaccgccgagggcttcctgagagagttcggcagactgtgcagcgagatgctgaagaccagcgtgcccgtggacagcttcttcagcctgctgaccagcgagagagtggccaagcagttccccgtgatgaccgaggccatcacccagatcagagccaagggcctgcagaccgccgtgctgagcaacaacttctacctgcccaaccagaagagcttcctgcccctggacagaaagcagttcgacgtgatcgtggagagctgcatggagggcatctgcaagcccgaccccagaatctacaagctgtgcctggagcagctgggcctgcagcccagcgagagcatcttcctggacgacctgggcaccaacctgaaggaggccgccagactgggcatccacaccatcaaggtgaacgaccccgagaccgccgtgaaggagctggaggccctgctgggcttcaccctgagagtgggcgtgcccaacaccagacccgtgaagaagaccatggagatccccaaggacagcctgcagaagtacctgaaggacctgctgggcatccagaccaccggccccctggagctgctgcagttcgaccacggccagagcaaccccacctactacatcagactggccaacagagacctggtgctgagaaagaagccccccggcaccctgctgcccagcgcccacgccatcgagagagagttcagaatcatgaaggccctggccaacgccggcgtgcccgtgcccaacgtgctggacctgtgcgaggacagcagcgtgatcggcacccccttctacgtgatggagtactgccccggcctgatctacaaggaccccagcctgcccggcctggagcccagccacagaagagccatctacaccgccatgaacaccgtgctgtgcaagatccacagcgtggacctgcaggccgtgggcctggaggactacggcaagcagggcgactacatccccagacaggtgagaacctgggtgaagcagtacagagccagcgagaccagcaccatccccgccatggagagactgatcgagtggctgcccctgcacctgcccagacagcagagaaccaccgtggtgcacggcgacttcagactggacaacctggtgttccaccccgaggagcccgaggtgctggccgtgctggactgggagctgagcaccctgggcgaccccctggccgacgtggcctacagctgcctggcccactacctgcccagcagcttccccgtgctgagaggcatcaacgactgcgacctgacccagctgggcatccccgccgccgaggagtacttcagaatgtactgcctgcagatgggcctgccccccaccgagaactggaacttctacatggccttcagcttcttcagagtggccgccatcctgcagggcgtgtacaagagaagcctgaccggccaggccagcagcacctacgccgagcagaccggcaagctgaccgagttcgtgagcaacctggcctgggacttcgccgtgaaggagggcttcagagtgttcaaggagatgcccttcaccaaccccctgaccagaagctaccacacctgggccagaccccagagccagtggtgccccaccggcagcagaagctacagcagcgtgcccgaggccagccccgcccacaccagcagaggcggcctggtgatcagccccgagagcctgagcccccccgtgagagagctgtaccacagactgaagcacttcatggagcagagagtgtaccccgccgagcccgagctgcagagccaccaggccagcgccgccagatggagccccagccccctgatcgaggacctgaaggagaaggccaaggccgagggcctgtggaacctgttcctgcccctggaggccgaccccgagaagaagtacggcgccggcctgaccaacgtggagtacgcccacctgtgcgagctgatgggcaccagcctgtacgcccccgaggtgtgcaactgcagcgcccccgacaccggcaacatggagctgctggtgagatacggcaccgaggcccagaaggccagatggctgatccccctgctggagggcaaggccagaagctgcttcgccatgaccgagccccaggtggccagcagcgacgccaccaacatcgaggccagcatcagagaggaggacagcttctacgtgatcaacggccacaagtggtggatcaccggcatcctggaccccagatgccagctgtgcgtgttcatgggcaagaccgacccccacgcccccagacacagacagcagagcgtgctgctggtgcccatggacacccccggcatcaagatcatcagacccctgaccgtgtacggcctggaggacgcccccggctgcttcctgcccagcttcagcctgtag

SEQ ID NO: 218581 - DNA, 291 bp, Artificial Sequence
  derived and/or modified sequence
atgtgcgtgagaagctgcttccagagccccagactgcagtgggtgtggagaaccgccttcctgaagcacacccagagaagacaccagggcagccacagatggacccacctgggcggcagcacctacagagccgtgatcttcgacatgggcggcgtgctgatccccagccccggcagagtggccgccgagtgggaggtgcagaacagaatccccagcggcaccatcctgaaggccctgatggagggcggcgagaacggcccctggatgagattcatgagagccgagatctag

SEQ ID NO: 218582 - DNA, 3959 bp, Artificial Sequence
  derived and/or modified sequence
gtcgtggagattgcttgcgctggggtgccacacttaggctgagctgcaggttttcgcacagtcgcgagttaacctctgcttgctccagaggcctcgtcctaatccacctcggctgacggcgcgggatccctggctccgcgagcctcagcctcaccatgtgtgtcaggagctgtttccagtccccccgtctccagtgggtgtggagaacagccttcctgaaacacacccagcgcaggcaccaggggtcccaccgatggacacaccttggaggcagcacctacagagcggtgattttcgacatgggcggagttctcattccttctccagggagagtcgctgcagaatgggaggtacagaatcgtatcccttctggaactatattaaaggccttgatggaaggtggtgaaaatgggccctggatgagatttatgagagcagaaataacagcagagggttttttacgagaatttgggagactttgctctgaaatgttaaagacctccgtgcctgtggactcatttttctctctgttgaccagtgagcgagtggcaaagcagttcccagtgatgactgaggccataactcaaattcgggcaaaaggtcttcagactgcagtcttgagcaataatttttatcttcccaaccagaaaagctttttgcccctggaccggaaacagtttgatgtgattgtggagtcctgcatggaagggatctgtaagccagaccctaggatctacaagctgtgcttggagcagctcggcctgcagccctctgagtccatctttcttgatgaccttggaacaaatctaaaagaagctgccagacttggtattcacaccattaaggttaatgacccagagactgcagtaaaggaattagaagctctcttgggttttacattgagagtaggtgttccaaacactcggcctgtgaaaaagacgatggaaattccgaaagattccttgcagaagtacctcaaagacttactgggtatccagaccacaggcccattggaactacttcagtttgatcacgggcagtcaaatccaacttactacatcaggctggctaatcgtgatctagttctgaggaagaagcccccagggacactccttccatctgcccatgccatagagagggagttcaggattatgaaagcccttgcaaatgctggagtacctgtccctaacgttcttgatctctgtgaagattcaagtgtcattggcacccccttctatgtgatggagtactgcccaggtctcatctacaaagacccttccctgccaggcttggagcccagccacagacgagccatatacactgccatgaacacagtcctgtgcaaaattcacagtgtggatctgcaggctgtgggacttgaagactatgggaagcaaggggactatattccacgccaggtacgaacctgggttaagcagtatcgagcttccgaaactagcaccatcccagccatggagaggctgatcgaatggctgcccctccatcttccccgtcagcagaggaccacagtggtgcacggggacttcaggctcgacaacctggtgtttcatccagaagagccagaggtgcttgctgtccttgactgggaactttctaccttgggcgacccccttgctgatgtggcctacagctgcctggctcattacctgccatccagttttcccgtgctgagaggtattaatgactgtgacttgacacagctgggaatccctgctgcagaggagtatttcaggatgtactgtctccaaatggggctccctcccactgagaactggaacttctatatggctttttcctttttccgtgtggctgcaatcctacagggagtctacaagcgatcactcacagggcaagcaagctccacatatgcggaacaaactggaaagctgaccgaatttgtgtctaacctggcgtgggatttcgcagtcaaagaagggttccgggttttcaaagagatgcccttcacaaatccgttaacaaggtcctaccacacgtgggccaggccccagtcccagtggtgccccacaggcagcaggagttatagctccgttccagaagcttccccagctcatacctcaaggggaggtctggttatctctccagagagcctctctccacctgtcagagagctgtatcaccggctgaagcacttcatggagcaacgtgtgtaccctgcagagccagagctgcagagtcaccaggcctcagcagccaggtggagcccctccccactgatcgaagacctcaaggagaaagccaaagctgaaggactttggaaccttttcctacccttagaggctgatcccgagaaaaaatacggagcaggactgaccaatgtggaatatgcacatctgtgtgagctcatgggcacgtccctgtatgcccccgaggtatgtaactgctctgcgcctgacacgggcaacatggagctgctggtgaggtatggcaccgaagcgcagaaggctcgctggctgattcctctgctggaggggaaagcccgctcctgttttgctatgaccgagccccaggttgcctcttcagatgccaccaacattgaggcttccatcagagaggaggacagcttctatgtcataaacggtcacaaatggtggatcacaggcatcctggatcctcgttgccaactctgtgtgtttatgggaaaaacagacccacatgcaccaagacaccggcagcagtctgtgctcttggttcccatggataccccagggataaaaatcatccggcctctgacggtgtatggactggaagatgcaccaggtggccatggtgaagtccgatttgagcacgtgcgtgtgcccaaagagaacatggtcctgggccctggccgaggctttgagatcgcccagggcagactgggccccggcaggatccatcactgcatgaggctgatcgggttctcagagagggccctggcactcatgaaggcccgcgtgaagtcccgcttggcttttgggaagcccctggtggagcagggcacagtgctggcggacatcgcgcagtcgcgcgtggagattgagcaggcacggctgctggtgctgagagctgcccacctcatggacctggcaggaaacaaggctgcagccttggatatagccatgattaaaatggtcgccccgtccatggcctcccgagtgattgatcgtgcgattcaggcctttggagcagcaggcctgagcagcgactacccactggctcagttcttcacctgggcccgagccctgcgctttgccgacggccctgacgaggtgcaccgggccacggtggccaagctagagctgaagcaccgcatttagagccttggggctgcagtggctcaatgtcctggctggtccagctgtgcccagatctgtcactgatgtgcctcgaaagatccggtgtttgtggctcctgcaccctgctcagcagctctgtcccgggacagtcagggtggactcaatctttctggttctccacagaagacgtctctgcaagaagcctggagtctgtttcaggccaggaggaggggatttgctgagggccaagggggttctgggacagagtctggaaagctggtcttcaggctctcagtcccaggctgggcaggcacggtcacttcacttcagcctttcagtccctctctctctgcctgtgggaatctggacacattttgggaggcctcccaaggctgtgggacgtgcttgctctggcagctgcagggttcctgtctggcctccctggtgagcagaggggcggccacggcgggcggtggcctagagacccaggacctgggcgcctgggaaaatggaatgcaacccacattgtaaagccactggcatctgattatctccatttgaacacacagcacagaacaatcatttaaatgttattttggaaaggggttttggggacacagaagaataagtaaacacatctcggag

SEQ ID NO: 218583 - DNA, 2951 bp, Artificial Sequence
  derived and/or modified sequence
gcaattttgaggaggtcggagcggaaggacgtcgtggagattgcttgcgctggggtgccacacttaggctgagctgcaggttttcgcacagtcgcgagttaacctctgcttgctccagaggcctcgtcctaatccacctcggctgacggcgcgggatccctggctccgcgagcctcagcctcaccatgtgtgtcaggagctgtttccagtccccccgtctccagtgggtgtggagaacagccttcctgaaacacacccagcgcaggcaccaggggtcccaccgatggacacaccttggaggcagcacctacagagcggtgattttcgacatgggcggagttctcattccttctccagggagagtcgctgcagaatgggaggtacagaatcgtatcccttctggaactatattaaaggccttgatggaaggtggtgaaaatgggccctggatgagatttatgagagcagaaataacagcagagggttttttacgagaatttgggagactttgctctgaaatgttaaagacctccgtgcctgtggactcatttttctctctgttgaccagtgagcgagtggcaaagcagttcccagtgatgactgaggccataactcaaattcgggcaaaaggtcttcagactgcagtcttgagcaataatttttatcttcccaaccagaaaagctttttgcccctggaccggaaacagtttgatgtgattgtggagtcctgcatggaagggatctgtaagccagaccctaggatctacaagctgtgcttggagcagctcggcctgcagccctctgagtccatctttcttgatgaccttggaacaaatctaaaagaagctgccagacttggtattcacaccattaaggttaatgacccagagactgcagtaaaggaattagaagctctcttgggttttacattgagagtaggtgttccaaacactcggcctgtgaaaaagacgatggaaattccgaaagattccttgcagaagtacctcaaagacttactgggtatccagaccacaggcccattggaactacttcagtttgatcacgggcagtcaaatccaacttactacatcaggctggctaatcgtgatctagttctgaggaagaagcccccagggacactccttccatctgcccatgccatagagagggagttcaggattatgaaagcccttgcaaatgctggagtacctgtccctaacgttcttgatctctgtgaagattcaagtgtcattggcacccccttctatgtgatggagtactgcccaggtctcatctacaaagacccttccctgccaggcttggagcccagccacagacgagccatatacactgccatgaacacagtcctgtgcaaaattcacagtgtggatctgcaggctgtgggacttgaagactatgggaagcaaggggactatattccacgccaggtacgaacctgggttaagcagtatcgagcttccgaaactagcaccatcccagccatggagaggctgatcgaatggctgcccctccatcttccccgtcagcagaggaccacagtggtgcacggggacttcaggctcgacaacctggtgtttcatccagaagagccagaggtgcttgctgtccttgactgggaactttctaccttgggcgacccccttgctgatgtggcctacagctgcctggctcattacctgccatccagttttcccgtgctgagaggtattaatgactgtgacttgacacagctgggaatccctgctgcagaggagtatttcaggatgtactgtctccaaatggggctccctcccactgagaactggaacttctatatggctttttcctttttccgtgtggctgcaatcctacagggagtctacaagcgatcactcacagggcaagcaagctccacatatgcggaacaaactggaaagctgaccgaatttgtgtctaacctggcgtgggatttcgcagtcaaagaagggttccgggttttcaaagagatgcccttcacaaatccgttaacaaggtcctaccacacgtgggccaggccccagtcccagtggtgccccacaggcagcaggagttatagctccgttccagaagcttccccagctcatacctcaaggggaggtctggttatctctccagagagcctctctccacctgtcagagagctgtatcaccggctgaagcacttcatggagcaacgtgtgtaccctgcagagccagagctgcagagtcaccaggcctcagcagccaggtggagcccctccccactgatcgaagacctcaaggagaaagccaaagctgaaggactttggaaccttttcctacccttagaggctgatcccgagaaaaaatacggagcaggactgaccaatgtggaatatgcacatctgtgtgagctcatgggcacgtccctgtatgcccccgaggtatgtaactgctctgcgcctgacacgggcaacatggagctgctggtgaggtatggcaccgaagcgcagaaggctcgctggctgattcctctgctggaggggaaagcccgctcctgttttgctatgaccgagccccaggttgcctcttcagatgccaccaacattgaggcttccatcagagaggaggacagcttctatgtcataaacggtcacaaatggtggatcacaggcatcctggatcctcgttgccaactctgtgtgtttatgggaaaaacagacccacatgcaccaagacaccggcagcagtctgtgctcttggttcccatggataccccagggataaaaatcatccggcctctgacggtgtatggactggaagatgcaccaggctgtttcctgccgtccttttccctttaaccatgtcccagtaagaaggctaaataaagggcagggacattgccagcagataacccagactgaggtgaggaataaacacatccaaggaaaatg

SEQ ID NO: 218584 - DNA, 501 bp, Artificial Sequence
  derived and/or modified sequence
ggacgcaattttgaggaggtcggagcggaaggacgtcgtggagattgcttgcgctggggtgccacacttaggctgagctgcaggttttcgcacagtcgcgagttaacctctgcttgctccagaggcctcgtcctaatccacctcggctgacggcgcgggatccctggctccgcgagataggtacaacgaggctcagagagcctcagcctcaccatgtgtgtcaggagctgtttccagtccccccgtctccagtgggtgtggagaacagccttcctgaaacacacccagcgcaggcaccaggggtcccaccgatggacacaccttggaggcagcacctacagagcggtgattttcgacatgggcggagttctcattccttctccagggagagtcgctgcagaatgggaggtacagaatcgtatcccttctggaactatattaaaggccttgatggaaggtggtgaaaatgggccctggatgagatttatgagagcagaaata

SEQ ID NO: 218585 - DNA, 3180 bp, Artificial Sequence
  derived and/or modified sequence
atgtgtgtgcgttcttgtttccaaagccccaggcttcagtgggtatggaggactgcctttctgaaacatacacaacgtagacatcagggaagccaccggtggactcacctcggcgggagtacatacagagcagtcatctttgacatgggcggtgtgcttatcccttcccctggaagagtggccgcagagtgggaagttcagaacaggattccttctgggacaatcctgaaggccctgatggagggtggggagaacggtccctggatgcgctttatgagagcggaaattaccgcagaaggctttctcagggaattcgggagactgtgcagtgaaatgctgaagactagcgtgcctgtggactcttttttctccctactgacttcagagcgggtagccaagcagtttcccgtcatgacggaggccattacccagatcagggctaaaggtctacaaacagctgttctttccaataacttctatcttccgaatcagaaatcctttctgccccttgacaggaaacagtttgatgtcattgtggagagctgtatggaaggcatctgtaagcccgatccccggatctataagctgtgcctggaacagttggggctgcagccctctgaatcaatcttcttagatgatttggggacaaatttgaaagaggcagcccggcttggaatccataccatcaaagtcaatgaccctgaaacagcagtcaaggagttggaggccctgctcggtttcaccttgcgagtcggcgtcccaaacacgaggccggtgaagaagacaatggagattcccaaagattctcttcaaaagtacctcaaggatttgcttggaatccagacaacaggcccccttgagcttctgcagttcgaccacggtcaaagtaatcccacgtattatatcaggctcgctaatagagacctggtgttgagaaaaaaaccgccaggcacccttttgccatctgcccacgctatcgagagagagtttcgtattatgaaggccctggccaacgcaggcgtgccggtgcctaatgtgcttgacttgtgtgaagatagttcagtgatcggtacccctttctacgtgatggagtactgcccgggattaatatacaaggatccctctctaccgggcttggagccatctcaccgtagagccatttacactgccatgaataccgttctctgcaagatacatagtgtggacctgcaggcagtaggtctcgaggattacggcaagcagggagattatattccaagacaggtgaggacgtgggttaagcaataccgcgcgagtgagacatcgacaatccccgctatggaaaggctcattgagtggcttccccttcatctgccgcgccaacagagaactaccgtggtccacggggactttcgccttgacaacctggtgtttcatcctgaggaacccgaagttttggcagtgctggattgggagctgagcactcttggggatcctctggccgatgtggcctatagttgcttagctcactatttgccttcctccttccccgtactgagagggattaacgattgcgatctcacccagctaggtattcccgccgctgaagagtacttccggatgtattgccttcagatggggctacctcctacagagaattggaatttctacatggctttcagtttcttccgggtcgcagccattttgcaaggagtatacaaacgctcccttactggccaagcctcttccacatacgcggagcagacgggcaagctgacggagttcgtgtctaatctcgcctgggacttcgccgtcaaggagggtttcagggtgttcaaggaaatgcccttcacaaatccactgactcgaagctatcacacatgggcccgcccacagtctcaatggtgccctacggggtccagatcttattccagcgtgccagaggcttctccagctcatacttctcgcggaggccttgtaataagtccagagtcacttagcccacccgttcgagagctctaccacaggctgaaacattttatggagcagagagtataccctgccgagcctgagttacaatcgcaccaagcctctgccgcccgctggagccctagtccactgatcgaggatttaaaagagaaggccaaggcagagggcctatggaacctgtttttgcctctcgaagcagatcctgagaagaagtacggtgccggcctaaccaatgttgaatatgcacacctgtgcgagctaatggggacctcactgtacgctccagaagtctgcaattgctctgcccccgacacaggaaatatggaattactggtacgctacggcactgaggcacagaaggctcgctggctcatacccctgctcgagggtaaggccaggtcttgttttgctatgacagagccacaggtcgcatctagcgacgctacgaacattgaggctagcattcgtgaggaagactccttctatgtcatcaacggccacaagtggtggattaccggaattcttgaccctcgttgccaactgtgcgtgtttatgggcaagactgatccacatgcaccaagacacagacaacaatctgtgctacttgtccctatggacaccccaggtataaagattataagacccctgaccgtatatggactggaggatgcacctggcggccatggcgaggtgcggttcgagcatgtgcgcgtgcctaaggagaacatggttctgggcccaggccggggatttgaaattgcccaaggccgcctgggccccggaaggattcaccactgcatgcgcctcataggtttctccgaacgtgccctcgctctgatgaaggcccgggtgaagagtcgcctggcatttgggaaacctctcgtcgaacagggcactgtcttagcagacatcgctcagtcccgcgtggaaattgaacaggcccgcctgttagtgctccgcgcggcccatctgatggatctcgccgggaacaaggccgcggccctcgatatagcaatgatcaagatggtggctccttctatggcttcacgggtgattgacagggctatacaggctttcggggccgcaggcctgtcttcagattatccacttgcacaattctttacatgggcccgggcgctgcgttttgcagatggaccggatgaggtgcatagagctacagttgctaaactggagctcaaacataggatatag

SEQ ID NO: 218586 - DNA, 2673 bp, Artificial Sequence
  derived and/or modified sequence
atgtgcgtgcgctcatgtttccagagtccaagactgcagtgggtgtggaggaccgccttcctgaaacacacccagcgtcggcatcagggatcgcataggtggacacacctcggtggatcgacgtatcgtgccgtgatcttcgacatgggaggcgtgctcatccctagtcctggaagggtcgcagccgaatgggaagtgcagaacagaatcccatccggtactatcttgaaggcccttatggagggcggtgagaacggcccctggatgaggttcatgagggctgagataaccgccgaaggattccttagagagtttggtaggctctgttctgagatgctgaagacctctgtacctgtagactcctttttctccctacttacgtcggagcgagtcgcaaagcagtttccagtaatgaccgaagctatcacccagatccgggccaaaggattgcaaacagccgtactatctaacaacttttacttgccaaatcaaaagagtttcttaccactggataggaagcaatttgacgttatagtggaatcctgtatggaaggaatctgtaagcccgatcccaggatctacaagttgtgcctggagcagctgggactgcagccatccgagtccatctttctggatgatctgggcacgaacctgaaggaagcggcacgcttgggaattcacaccataaaggtcaatgatccagagactgctgtgaaggagttggaggctctgttgggattcacattgagggtgggtgttcctaatactcgacccgtgaagaagacgatggaaatcccaaaagattctctccagaaatatttgaaagatctgctcggcatccaaacaaccggccccttggagctgctccagtttgaccatggccaaagcaaccccacctattacatccgcctcgccaatcgggacctcgtgcttcgcaaaaagcctccagggacactcttgccgagcgctcatgccattgaacgtgagtttagaatcatgaaagcactcgcgaatgccggcgtcccagtgcccaatgttctggatctgtgcgaggactcgtcagtgattggtacgcctttctacgtgatggagtattgtccgggcctgatctacaaagacccaagccttcctgggctggagccttcacacaggcgagctatatacaccgcaatgaatacagtattatgcaaaatccatagtgttgacctgcaggcagtgggcctggaagattacggcaagcaaggcgactacatccctcgccaagtcagaacttgggtcaagcaatatcgcgcatcagaaacgtcaacgatccccgctatggaaaggctaatcgaatggcttcctctgcatttaccgaggcaacagcgtaccactgttgtgcacggtgacttcaggctcgataatctcgtctttcatcctgaggaacccgaagtacttgcagtgcttgactgggagctgagcactctcggggatccattagccgatgtcgcctattcttgtttggcacactaccttccttcaagctttcctgtgcttcgcggaattaacgactgtgacctgactcagctgggaatcccagctgcagaagagtacttccgaatgtactgccttcagatgggactaccgcccaccgaaaattggaacttctacatggccttttctttcttccgtgttgccgctatcctacagggggtatacaagcggtctctgacaggacaggcatcttctacttatgcagaacaaactgggaagctaaccgagttcgtcagcaaccttgcatgggacttcgctgtcaaagagggattccgggtttttaaggaaatgccttttactaatcccctaactcgtagttaccacacatgggcaagaccacagtctcagtggtgcccaactggctcaagatcttatagctccgtcccagaggcctctcccgcccacacatcaaggggaggcttagttatttcccccgaatccctgagtcctcctgtgcgggaattgtaccatcgcttgaaacatttcatggagcagcgtgtctatcctgcagagcccgagctacagtctcaccaggctagcgccgcacgctggtcaccgagtccgttaattgaggacttgaaagagaaagctaaagccgaaggcctgtggaatctcttcctccctctggaagccgacccagagaagaagtatggcgctgggctcactaatgttgagtacgcgcacctgtgcgaactgatgggaaccagcctttacgctcccgaggtgtgcaactgctctgcgccggataccggtaatatggagctcctggtccgctacggcaccgaggcacagaaggctcgatggctaatcccactgctggaaggtaaggctcgctcttgttttgcaatgacagagccgcaagtggcatcctccgacgccaccaacatcgaagcctccattagagaggaggattcattctacgtgatcaatgggcacaaatggtggatcacaggaatattagacccacggtgtcagttatgcgtgtttatggggaaaaccgacccccacgccccacgacatagacaacagtccgtgctgctcgtgcccatggatacaccaggtatcaagattattcgtccactaactgtttatggacttgaagatgcccccggatgttttctgcccagctttagcttgtag

SEQ ID NO: 218587 - DNA, 291 bp, Artificial Sequence
  derived and/or modified sequence
atgtgcgtgagatcttgttttcaaagcccgaggctccagtgggtatggcggacagcttttctcaagcacacacaacggcgacatcaaggcagccacaggtggacacacttgggaggaagtacgtatcgggccgtgatcttcgacatggggggggtgttgattccaagccctggacgggtggcagccgagtgggaagtgcagaaccgaatcccaagcggtacaatcctaaaagctctcatggagggaggtgaaaatggcccgtggatgagatttatgagggccgaaatttag

SEQ ID NO: 218588 - DNA, 3180 bp, Artificial Sequence
  derived and/or modified sequence
atgtgtgtgcgcagctgcttccagagcccccggctgcagtgggtgtggaggacagccttcctgaagcacacccagaggaggcaccagggcagccaccgctggacccacctgggcggcagcacctaccgggccgtcatctttgacatgggcggcgtgctgatccccagccctggccgggtggccgctgagtgggaggtgcagaaccgcatccccagcggcaccatcctgaaggccctgatggagggcggggagaatggcccctggatgaggttcatgagagctgagatcacagctgagggcttcctgcgggagtttggccgcctgtgcagcgagatgctgaagacctctgtgcctgtggacagcttcttcagcctgctgaccagcgagcgggtggccaagcagtttcctgtgatgacagaggccatcacccagatccgggccaagggcctgcagacagctgtgctgagcaacaacttctacctgcccaaccagaagagcttcctgcccctggacaggaagcagtttgatgtgattgtggagagctgcatggagggcatctgcaagccagacccccgcatctacaagctgtgcctggagcagctgggcctgcagcccagcgagagcatcttcctggatgacctgggcaccaacctgaaggaggccgcccggctgggcatccacaccatcaaggtgaatgaccctgagacagctgtgaaggagctggaggccctgctgggcttcaccctgcgggtgggcgtgcccaacaccaggcctgtgaagaagaccatggagatccccaaggacagcctgcagaagtacctgaaggacctgctgggcatccagaccaccggccccctggagctgctgcagtttgaccacggccagagcaaccccacctactacatccggctggccaacagagacctggtgctgaggaagaagcccccaggcaccctgctgcccagcgcccacgccatcgagcgggagttccgcatcatgaaggccctggccaatgccggcgtgcctgtgcccaacgtgctggacctgtgtgaggacagcagcgtcatcggcacccccttctacgtgatggagtactgccccggcctcatctacaaggaccccagcctgcccggcctggagcccagccaccggcgggccatctacacagccatgaacacagtgctgtgcaagatccacagcgtggacctgcaggccgtgggcctggaggactatggcaagcagggcgactacatcccccggcaggtgaggacctgggtgaagcagtaccgggccagcgagaccagcaccatcccagccatggagcggctcatcgagtggctgcccctgcacctgccccggcagcagaggaccaccgtggtgcatggagacttccggctggacaacctggtgttccaccctgaggagcctgaggtgctggccgtgctggactgggagctgagcaccctgggggaccccctggctgatgtggcctacagctgcctggcccactacctgcccagcagcttccctgtgctgcggggcatcaatgactgtgacctgacccagctgggcatcccagctgctgaggagtacttcaggatgtactgcctgcagatgggcctgcccccaacagagaactggaacttctacatggccttctccttcttccgggtggccgccatcctgcagggcgtgtacaagaggagcctgaccggccaggccagcagcacctatgcagagcagacaggcaagctgacagaatttgtgagcaacctggcctgggactttgctgtgaaggagggcttccgggtcttcaaggagatgcccttcaccaaccccctgaccaggagctaccacacctgggcccggccccagagccagtggtgccccaccggcagccgcagctacagctctgtgcctgaggccagccctgcccacaccagccggggcggcctggtgatcagccctgagagcctgagcccccctgtgcgggagctgtaccaccggctgaagcacttcatggagcagagggtgtacccagctgagcctgagctgcagagccaccaggccagcgctgcccgctggagccccagccccctgattgaggacctgaaggagaaggccaaggccgagggcctgtggaacctcttcctgcccctggaggccgaccctgagaagaagtacggggccggcctgaccaacgtggagtatgcccacctgtgtgagctgatgggcaccagcctgtatgcccctgaggtgtgcaactgcagcgccccagacaccggcaacatggagctgctggtgcgctatggaacagaggcccagaaggcccgctggctgatccccctgctggagggcaaggcccggagctgctttgccatgacagagccccaggtggccagcagtgatgccaccaacatcgaggccagcatccgggaggaggacagcttctacgtgatcaatggccacaagtggtggatcaccggcatcctggacccccgctgccagctgtgtgtgttcatgggcaagacagacccccacgcccccaggcaccggcagcagagcgtgctgctggtgcccatggacaccccaggcatcaagatcatccggcccctgactgtgtatggcctggaggatgcccctgggggccacggggaggtgcgctttgaacatgtgcgggtgcccaaggagaacatggtgctgggccctggccggggctttgaaattgcccagggccgcctgggccctggccgcatccaccactgcatgaggctcatcggcttcagcgagcgggccctggccctgatgaaggcccgggtgaagagccggctggccttcggcaagcccctggtggagcagggcaccgtgctggccgacatcgcccagagccgggtggagattgagcaggcccggctgctggtgctgcgggccgcccacctgatggacctggccggcaacaaggctgctgccctggacatcgccatgatcaagatggtggcccccagcatggccagcagggtcatcgaccgggccatccaggcctttggagctgctggcctgagcagtgactaccccctggcccagttcttcacctgggcccgggccctgcgctttgctgatggcccagatgaggtgcaccgggccaccgtggccaagctggagctgaagcaccgcatctag

SEQ ID NO: 218589 - DNA, 2673 bp, Artificial Sequence
  derived and/or modified sequence
atgtgtgtgcgcagctgcttccagagcccccggctgcagtgggtgtggaggacagccttcctgaagcacacccagaggaggcaccagggcagccaccgctggacccacctgggcggcagcacctaccgggccgtcatctttgacatgggcggcgtgctgatccccagccctggccgggtggccgctgagtgggaggtgcagaaccgcatccccagcggcaccatcctgaaggccctgatggagggcggggagaatggcccctggatgaggttcatgagagctgagatcacagctgagggcttcctgcgggagtttggccgcctgtgcagcgagatgctgaagacctctgtgcctgtggacagcttcttcagcctgctgaccagcgagcgggtggccaagcagtttcctgtgatgacagaggccatcacccagatccgggccaagggcctgcagacagctgtgctgagcaacaacttctacctgcccaaccagaagagcttcctgcccctggacaggaagcagtttgatgtgattgtggagagctgcatggagggcatctgcaagccagacccccgcatctacaagctgtgcctggagcagctgggcctgcagcccagcgagagcatcttcctggatgacctgggcaccaacctgaaggaggccgcccggctgggcatccacaccatcaaggtgaatgaccctgagacagctgtgaaggagctggaggccctgctgggcttcaccctgcgggtgggcgtgcccaacaccaggcctgtgaagaagaccatggagatccccaaggacagcctgcagaagtacctgaaggacctgctgggcatccagaccaccggccccctggagctgctgcagtttgaccacggccagagcaaccccacctactacatccggctggccaacagagacctggtgctgaggaagaagcccccaggcaccctgctgcccagcgcccacgccatcgagcgggagttccgcatcatgaaggccctggccaatgccggcgtgcctgtgcccaacgtgctggacctgtgtgaggacagcagcgtcatcggcacccccttctacgtgatggagtactgccccggcctcatctacaaggaccccagcctgcccggcctggagcccagccaccggcgggccatctacacagccatgaacacagtgctgtgcaagatccacagcgtggacctgcaggccgtgggcctggaggactatggcaagcagggcgactacatcccccggcaggtgaggacctgggtgaagcagtaccgggccagcgagaccagcaccatcccagccatggagcggctcatcgagtggctgcccctgcacctgccccggcagcagaggaccaccgtggtgcatggagacttccggctggacaacctggtgttccaccctgaggagcctgaggtgctggccgtgctggactgggagctgagcaccctgggggaccccctggctgatgtggcctacagctgcctggcccactacctgcccagcagcttccctgtgctgcggggcatcaatgactgtgacctgacccagctgggcatcccagctgctgaggagtacttcaggatgtactgcctgcagatgggcctgcccccaacagagaactggaacttctacatggccttctccttcttccgggtggccgccatcctgcagggcgtgtacaagaggagcctgaccggccaggccagcagcacctatgcagagcagacaggcaagctgacagaatttgtgagcaacctggcctgggactttgctgtgaaggagggcttccgggtcttcaaggagatgcccttcaccaaccccctgaccaggagctaccacacctgggcccggccccagagccagtggtgccccaccggcagccgcagctacagctctgtgcctgaggccagccctgcccacaccagccggggcggcctggtgatcagccctgagagcctgagcccccctgtgcgggagctgtaccaccggctgaagcacttcatggagcagagggtgtacccagctgagcctgagctgcagagccaccaggccagcgctgcccgctggagccccagccccctgattgaggacctgaaggagaaggccaaggccgagggcctgtggaacctcttcctgcccctggaggccgaccctgagaagaagtacggggccggcctgaccaacgtggagtatgcccacctgtgtgagctgatgggcaccagcctgtatgcccctgaggtgtgcaactgcagcgccccagacaccggcaacatggagctgctggtgcgctatggaacagaggcccagaaggcccgctggctgatccccctgctggagggcaaggcccggagctgctttgccatgacagagccccaggtggccagcagtgatgccaccaacatcgaggccagcatccgggaggaggacagcttctacgtgatcaatggccacaagtggtggatcaccggcatcctggacccccgctgccagctgtgtgtgttcatgggcaagacagacccccacgcccccaggcaccggcagcagagcgtgctgctggtgcccatggacaccccaggcatcaagatcatccggcccctgactgtgtatggcctggaggatgcccctggctgcttcctgcccagcttcagcctgtag

SEQ ID NO: 218590 - DNA, 291 bp, Artificial Sequence
  derived and/or modified sequence
atgtgtgtgcgcagctgcttccagagcccccggctgcagtgggtgtggaggacagccttcctgaagcacacccagaggaggcaccagggcagccaccgctggacccacctgggcggcagcacctaccgggccgtcatctttgacatgggcggcgtgctgatccccagccctggccgggtggccgctgagtgggaggtgcagaaccgcatccccagcggcaccatcctgaaggccctgatggagggcggggagaatggcccctggatgaggttcatgagagctgagatctag

SEQ ID NO: 218591 - DNA, 3180 bp, Artificial Sequence
  derived and/or modified sequence
atgtgcgtgcggagctgcttccagagcccccggctgcagtgggtgtggcgcactgccttcttgaagcacacacagcgacgccatcaaggttctcaccgatggactcatcttggcggatctacttaccgtgctgtgatcttcgacatgggaggagtgcttattccttcaccgggtagggtagcagctgagtgggaagtgcaaaaccggatcccatctggtactatccttaaagccctcatggaggggggcgagaacggcccttggatgagatttatgcgagcagagatcaccgccgaggggttcctgagagagtttggcaggctctgtagtgagatgctgaaaacatcagtgccggttgatagttttttctcattgttgacctccgagagggtcgcaaagcaatttccagtgatgactgaggcgataacacaaatcagagcgaagggcctgcaaactgcagtcttatcaaacaatttctatctgccgaaccagaagtccttccttccactggatcgcaagcagttcgacgtgattgtcgagagctgtatggagggcatttgtaaaccggatccacgtatctacaaactctgccttgaacaacttggacttcagccaagcgaaagcatttttctcgacgacctcggcaccaacttgaaagaagcagccagattgggaattcatacaatcaaggttaatgatcctgagactgccgtgaaagaactagaagcactgctgggcttcaccctcagagttggcgtgcctaatacaaggcccgtcaagaaaaccatggaaatcccaaaggacagtctgcagaagtaccttaaggatctgttgggaatccagaccaccggacctctagagctcctccaattcgaccacggccagtcgaatccaacttactatatacgcctggctaatagagatctcgtgttgagaaagaaacctccagggactctgctgccaagcgcacatgcaatcgagcgcgaatttaggatcatgaaagctctagccaatgccggtgttccagtcccaaatgtgctcgatttgtgtgaggattccagcgtgatcggaactccgttttacgttatggaatattgccccggacttatatacaaagacccgtcactgcctgggcttgagccgtctcacagacgagccatatatacagccatgaatacagtcttgtgcaagatccactcagtcgatcttcaggccgtgggcctggaggactacgggaaacagggggactatattccccggcaggtgaggacgtgggtaaaacagtaccgcgcctcagagacttctaccatccccgcaatggagcggctgatcgagtggttgcctctgcatctcccccgccagcagcgcacaacagtagttcatggcgattttcgactcgataacttggtgttccatcccgaagaacccgaagtgttagccgtgcttgactgggagttgtccacgttgggggatcccttggctgatgtggcatatagctgcctcgcccattaccttcctagttcttttccggtgttgcggggtatcaacgactgtgacttaacgcaattgggaataccagccgccgaggagtattttagaatgtactgtctgcagatgggcttaccccctaccgagaactggaacttctatatggctttctcctttttcagagtggctgccatcctccagggagtgtacaagcggtccctgaccggtcaggccagcagtacgtatgcagagcagacaggaaagctgacggaatttgtttccaatctggcgtgggatttcgcagtgaaggagggatttagagttttcaaggaaatgcccttcacaaatccactaactcgatcataccacacctgggcaagaccacagagccagtggtgccctactgggtctaggtcatactcgagtgtgcctgaagcatctcctgcccacactagtaggggggggctcgtgatttccccagagtcactgagcccaccggtcagagagctgtaccatcggctgaaacatttcatggagcagcgtgtgtatccagctgaaccagagctgcagtcccatcaggccagcgccgcaaggtggtcaccctcacctttaatagaagaccttaaggaaaaggcgaaggccgaggggctctggaatctctttctgccactcgaagcggatcccgaaaaaaagtacggtgccggactgacaaacgtggagtatgcccatctgtgcgaattgatgggtacttccctgtatgcccccgaggtgtgtaattgttcagctccagacaccggaaacatggagctgctcgttcgatacggaacagaagcgcagaaggccaggtggttaatcccactgttggagggtaaggccagaagctgcttcgctatgacagaaccacaggtagcttctagtgatgctactaacattgaagcatccatcagggaggaggactcgttttatgtcataaacggacacaaatggtggatcaccggcattctagatcctcggtgccagttgtgcgttttcatgggcaagaccgacccacacgctccaagacacagacaacagtcggttctgctagtcccaatggacacccccggaatcaagatcatcaggccactcaccgtgtacggcctggaagacgcgcccggcggccacggggaggtgcggttcgagcatgtgcgagtgccgaaagagaacatggtcctgggtcccggacgtggttttgagattgcccagggacggcttggcccaggcagaattcatcattgtatgcgacttattggcttcagtgaaagggccctggcactgatgaaggcacgagtcaaatcacggctcgcctttgggaagcccctggtggaacaggggaccgttttagccgatatcgctcagtcacgcgtcgagattgagcaagcacgattgctcgtgcttcgagcagcgcatctgatggatcttgccggtaataaagcagccgcccttgacatcgcaatgattaagatggtggctccaagtatggcttcacgtgtgatagaccgcgctatccaagcttttggggcagccgggctgagctctgattatcctctagcccagtttttcacttgggctagagcgttaaggtttgcagatgggccagatgaggttcacagggcaacagtcgccaaactggagctgaaacacaggatctag

SEQ ID NO: 218592 - DNA, 2673 bp, Artificial Sequence
  derived and/or modified sequence
atgtgcgtgcggagctgcttccagagcccccggctgcagtgggtgtggcggacggcgttcctgaaacatacgcaacgcagacaccagggcagtcaccggtggacccacctgggtggctcaacgtatagggccgtcatttttgatatgggcggagtgctgatcccttcgccaggcagagtggcggccgagtgggaggtccaaaatcggataccttccggcaccatcctgaaagctctcatggagggtggggagaacggtccatggatgcgctttatgcgggccgagatcaccgccgagggctttctaagggaatttgggaggttgtgttctgagatgctgaagacctccgtccctgtggactctttttttagtctccttacctctgagcgggtagctaaacagttcccagtcatgaccgaggcaattacacagattagagccaaaggcctacaaactgcagtcctgtccaacaacttctacctgcccaaccagaaaagcttcctgccattggatcggaagcagttcgacgtgatcgtagagtcatgtatggagggtatatgcaaacccgatccacgcatttataagctgtgtctcgaacaacttggcctgcaaccaagcgagagtatatttttagacgaccttggtaccaatctcaaggaagccgcaaggctaggcatccacactataaaagtaaatgatcctgagaccgccgtgaaagaactggaggctctgctgggtttcaccctgagagtgggggttcccaatacccgtccggtgaaaaaaacaatggagatccctaaggactcactgcagaaatacctcaaggatctcctcggcattcagacgaccgggcctctggaattacttcaatttgaccatggccagagtaacccaacctattacatcagattggccaaccgggatttggttttgcgtaaaaaaccacctgggacattgcttccctcggctcatgccatagagcgggaatttcgtatcatgaaggctctggcaaacgctggagtgccggtgccgaacgttttggacctctgcgaggattcgtccgtgatcggaaccccattttacgtcatggagtactgtcccggtcttatctataaggacccaagtctacctggcctcgagccctcgcatcgtcgggccatctacactgcgatgaacaccgtgttgtgtaaaatccacagcgtcgaccttcaagctgtaggtctcgaagattacggtaagcagggtgattacattccccggcaggtccggacgtgggtcaagcagtatcgcgcctccgagacgtcgacaattccagcaatggaacgcctaattgaatggctaccgcttcatttaccaagacagcagcgcactactgtcgtgcacggcgatttccgcctggacaatttagtctttcacccagaggaaccagaagttctcgcggtcctcgactgggaactttctaccctcggggatcctctagccgacgttgcatacagttgcttggcccactacctcccctcaagcttccctgtgctgagaggcatcaatgactgcgacctaacccagctgggcataccagccgccgaggaatacttccgcatgtattgtctgcaaatgggcctcccccctaccgagaactggaatttctacatggccttctccttctttcgggtggcagctatcctgcagggggtgtacaagagaagcctcaccggccaagcctcttctacatatgcagagcagactggcaaattaaccgagttcgtgtcaaacttggcgtgggactttgcagtgaaagagggctttagggtctttaaggagatgccatttacgaaccctctaactagatcatatcatacctgggcgaggccacagagccagtggtgccctaccggaagtcggagttatagttctgtgccggaagcaagcccggcacacaccagtcgaggggggctcgtgatatccccagagtccctgtccccacctgtgagggagctgtatcaccgcttaaagcactttatggaacagagggtctaccctgcagagcctgaactacaatctcaccaagcctccgcagcccgctggtcgccctcccctcttatagaagacttaaaggaaaaagcaaaagccgaaggcctgtggaacctgtttctgcccctcgaggccgatcctgagaagaagtacggggccggcctgacaaatgttgagtacgcacatctctgtgagctaatgggaacaagcttgtatgctcccgaagtttgcaattgctccgcccccgacaccgggaatatggaacttctcgtgcgctacgggactgaggctcagaaggccaggtggctcatcccgctgctcgaaggaaaggcccgatcttgttttgcgatgaccgagccgcaggtcgccagcagcgatgcaacaaatatcgaagcctccataagagaagaggattccttttacgtgatcaacggccataagtggtggatcacgggcatcctggatccgcggtgtcagctttgtgtttttatgggcaaaactgaccctcatgccccaaggcaccggcagcagtctgtgctgttagttccaatggatacaccaggcatcaaaattattagaccgttgaccgtgtacggactggaggacgcccccgggtgttttctgcctagttttagcctgtag

SEQ ID NO: 218593 - DNA, 291 bp, Artificial Sequence
  derived and/or modified sequence
atgtgcgtgcggagctgcttccagagcccccggctgcagtgggtgtggaggacagcctttttaaaacatactcagcgacgccaccagggctcgcaccggtggacccaccttggaggctctacttacagggccgtgatttttgacatgggaggcgttctcataccctcaccaggcagggtggcggcggagtgggaggtgcagaacaggattccttctggtaccattctgaaagccctgatggaggggggtgagaatggaccatggatgcgcttcatgagggccgaaatctag

SEQ ID NO: 218594 - DNA, 3180 bp, Artificial Sequence
  derived and/or modified sequence
atgtgtgtacggtcttgttttcagtctccgcgtctgcagtgggtctggcgaaccgcgtttctgaagcacacccagcggcgacaccagggctcccatcggtggacacatctggggggatcaacatatagggccgtcattttcgacatgggaggggtcctgattcccagtccaggccgagttgcggctgagtgggaggtccagaatcgcatcccaagtgggactatcctgaaggccctcatggagggcggtgaaaacggtccctggatgaggtttatgcgcgctgagattacagcagagggcttcttgcgcgagttcggacggttgtgctctgagatgcttaaaacgtccgtgcccgtcgattcattcttctccctgctgacctcggaacgcgtggccaaacagtttcctgtgatgacggaggcgatcactcagatcagggctaagggactgcagacagcggtcctgtcaaacaacttttaccttcctaaccagaagtctttcctgcccctggatcgcaagcagttcgacgtgatcgttgagagctgtatggagggcatttgtaagcctgatccccgaatttacaaactgtgcctggagcaattggggcttcagccgtcagagtcaatctttctggacgacctgggaacaaatttaaaggaggccgcaaggttgggaatacacaccataaaggtgaatgaccctgagaccgccgtaaaagaactggaggcactgctgggctttaccctgagggttggagttcctaacactaggccggttaagaagaccatggagattcctaaggattcattacagaagtacttaaaggacctgctaggtattcagaccacaggacccttggagctactgcagttcgaccacggccagtccaatccaacctactacatccgactggccaacagggatctggttttgcgcaagaagccccctgggaccctactcccgtccgcccatgcgatcgagagagagtttcgcatcatgaaggccctggcaaatgccggagtgccggtgcccaatgtcctagacctgtgcgaggattctagcgtgatcgggactccgttctacgtcatggagtactgtccgggattgatttataaagacccaagtttgccaggtctggaaccctctcaccgccgtgccatatacactgccatgaacacagttctatgcaaaatccattcagtcgacctacaggccgttggtctcgaggactatgggaaacagggcgactatattccacggcaagtaagaacatgggtcaagcaataccgagcttcggagacttctacgatcccggcaatggaacgattgatcgagtggctccctctgcacttacctcgccaacagcggaccaccgtcgtgcatggagattttaggttggacaacctggtgtttcatccagaagagcccgaagttctggccgtactcgattgggaactgtcaacactcggtgaccctctcgccgatgtggcctactcttgcttagcacactatttgccaagttcatttcccgttctccgcggaattaatgactgcgatctcacccagttggggattcctgcagcagaggaatacttccgtatgtattgcctgcagatggggttgccgcctaccgagaattggaatttttatatggccttctctttttttcgcgtcgcagctattctgcagggggtgtataagcggtccctcacaggacaggcgagctctacctacgctgaacagacaggtaaactgaccgagttcgtgtccaatttagcgtgggacttcgcagtcaaggaggggtttagagtattcaaagaaatgccttttacaaatccacttacgcgctcttatcatacttgggccaggccccaaagccagtggtgccccactggatccagatcctactcttctgtgcccgaagcatctccagcccacacatccaggggcggtcttgtgatctcccccgaatcgttgtcaccgcctgtgcgggaattgtaccacaggctcaagcattttatggagcaaagggtgtatcccgcagaaccggaactacagagccatcaagcctccgccgcacgctggtccccatcacccctgattgaagatctaaaggaaaaagctaaagccgaaggcttgtggaatctgttcctgcccctggaagccgaccccgaaaagaaatatggcgctggactgaccaacgtcgagtatgcacacttgtgcgaactgatggggacgagcctgtatgcaccagaagtgtgtaactgtagtgcacctgatactggaaacatggagctgttggttcgctacggaacagaggcccagaaggcccgatggttgattcccctgctagagggaaaggcgcgttcctgtttcgctatgactgaaccacaagtggcatcatccgatgctaccaacattgaggcctccatcagggaggaagacagcttctatgtgataaatgggcacaaatggtggataactggaatactagatcccagatgccagttgtgcgtgtttatggggaagacggatccacacgcccctcggcacaggcaacagagcgtgctgctggtccccatggatacccctggcattaagatcatacgcccacttacagtgtacggcctcgaagacgctcccggagggcatggcgaggtgcggtttgagcacgtccgcgtgcccaaggaaaacatggttttggggcctggtaggggcttcgagatcgcccaagggagacttggccctggccgaatacatcactgcatgcgactcatcgggttttccgaacgtgcactcgcccttatgaaggctagggtcaaaagcaggttggccttcggtaagcctctggtggagcagggaaccgtactcgctgatattgcccagtcgcgcgtggaaatcgaacaggccagacttctggtgctacgagcagctcatctgatggaccttgcgggtaataaggcagccgctttggatattgccatgattaaaatggtcgcaccttctatggcctctagggtgatcgatcgggcaatccaagcctttggggctgcgggtctttcttcagattatccactggcacagttttttacatgggctcgggctctgaggtttgcagatggtcctgatgaggtgcaccgggctaccgtagcgaagttggaactgaaacataggatctag

SEQ ID NO: 218595 - DNA, 2673 bp, Artificial Sequence
  derived and/or modified sequence
atgtgtgtaagatcctgttttcagtctcctcgcctgcagtgggtgtggcgtaccgccttccttaagcatacccagagaaggcatcaaggctcacatcgctggacccacctggggggtagcacatatcgggctgtgatctttgacatgggcggtgtactgataccctccccagggcgagttgcagcagaatgggaggtgcagaatcgtatacccagcggaaccatcttaaaagccctgatggaagggggagagaatggaccatggatgagattcatgcgcgctgagatcacagcagagggatttctgagggagtttggccgactctgctcagagatgctcaagacctccgtgcctgttgattcatttttctccttgctcacttcagaacgggtggcgaaacagtttcccgttatgacagaggccattactcaaatcagggcaaaaggcctgcagaccgccgttctctccaacaacttctacttacctaaccagaagtccttcctgccgctcgatagaaaacagttcgatgtaatcgtggaaagttgcatggagggaatttgcaaacccgatccaaggatatataagctgtgcctggaacaattgggtctccagccatcggaatctattttcctggacgaccttggaacaaatctcaaggaagcagccaggcttggaatccacacaatcaaagtcaacgatccggagactgcagtaaaggagttggaggcactgctgggattcacactacgggtgggggtgccaaatacgcggccagtcaaaaagaccatggaaatacctaaagacagtcttcagaaatatctcaaagacctgctggggattcagacaacaggtcctctagagcttctacagttcgaccacggacagtcaaatccaacttactacatcaggttggctaacagagaccttgtacttagaaagaaacctcctgggaccctgctgcccagcgctcacgccatcgagagagagttccgcatcatgaaagccctggcaaacgccggtgtgcctgtacccaacgttctcgacctatgtgaggactcatccgtgattgggacacccttttacgtaatggagtactgcccagggctgatctataaggatcctagcctgcccggacttgaaccatcccaccgtagagccatctacacagcaatgaataccgtgctctgtaagatacatagcgtggaccttcaggctgttgggctggaggactatggtaagcagggtgactacatccctaggcaggtgagaacttgggtgaagcagtaccgggctagcgagactagtaccatcccagcaatggaacgccttatcgagtggttgcccctgcacctcccaagacagcaaaggaccaccgtggttcatggtgacttcaggcttgacaatttggttttccatccagaagagcccgaagtcctcgccgtgctcgattgggagttgagtaccttgggtgatcccctagctgatgtagcctattcatgcctggcccactaccttccgagcagtttccctgtgcttcgtggaataaatgattgcgacctgacccagcttggaatcccggctgcagaggagtatttcaggatgtactgtctgcagatgggtttgccccctactgagaactggaatttctacatggctttctccttctttcgggtggctgccatactgcagggcgtttataaaagatctcttacaggccaggcctcctcaacctacgcagaacagacaggaaaacttacagaatttgtttctaatctcgcttgggattttgcagtgaaggaaggatttcgcgtgtttaaggaaatgccttttaccaatccacttacaaggtcttatcatacttgggcaagacctcaatcgcaatggtgccccaccggaagccgaagttatagctcagtacctgaagcgagccctgcgcatacctccaggggaggcctggtgatttcaccagaatctctatcccctccagtgagggagctctaccatagacttaaacactttatggagcagcgggtctacccagccgaaccagagctccagagtcatcaggcctccgcagcacggtggtcacctagcccactcatcgaggacctgaaggagaaggcaaaggcggaaggcctatggaatctgtttcttccactggaggccgaccctgagaagaaatacggggctggcctgacaaatgtggagtatgctcacctgtgtgaactgatgggcaccagcctatacgcgccagaggtctgcaactgttcagcacccgacacaggtaatatggagcttctagtgaggtacggaacagaggctcagaaagctcgatggcttatcccattgcttgaaggaaaggccaggagctgttttgccatgacagagccccaggtggcctcatcagacgccacaaatattgaagcaagtatccgtgaggaggattctttttatgtgatcaatgggcacaaatggtggatcacaggaatactggatcccaggtgccagctttgcgtgttcatgggtaagactgatcctcacgcaccaaggcaccgacagcagagcgttctcctggtgccgatggatacacccggaatcaagatcattcgtcccctaacagtatatggcctggaagacgcccctggatgcttcctgccatcgttttctctgtag

SEQ ID NO: 218596 - DNA, 291 bp, Artificial Sequence
  derived and/or modified sequence
atgtgcgtgaggtcgtgtttccagtcaccgaggctgcagtgggtctggagaactgccttcctcaagcacacccagaggagacaccagggaagtcaccggtggacacatctcgggggttcaacataccgggcagttattttcgatatgggtggtgtgctcatcccgagtcccggacgggtcgcagcggaatgggaagtgcagaatcgcattcctagcggaacaatactgaaagccctgatggagggcggtgagaacggcccatggatgcgtttcatgcgagcagaaatatag

SEQ ID NO: 218597 - protein, 1183 aa, Artificial Sequence
  derived and/or modified sequence
MGNAPSQDPERSSPPMLSADDAEYPREYRTLGGGGGGGSGGRRFSNVGLVHTSERRHTVIAAQSLEALSGLQKADADRKRDAFMDHLKSKYPQHALALRGQQDRMREQPNYWSFKTRSSRHTQGAQPGLADQAAKLSYASAESLETMSEAELPLGFSRMNRFRQSLPLSRSASQTKLRSPGVLFLQFGEETRRVHITHEVSSLDTLHALIAHMFPQKLTMGMLKSPNTAILIKDEARNVFYELEDVRDIQDRSIIKIYRKEPLYAAFPGSHLTNGDLRREMVYASRESSPTRRLNNLSPAPHLASGSPPPGLPSGLPSGLQSGSPSRSRLSYAGGRPPSYAGSPVHHAAERLGGAPAAQGVSPSPSAILERRDVKPDEDLASKAGGMVLVKGEGLYADPYGLLHEGRLSLAAAAGDPFAYPGAGGLYKRGSVRSLSTYSAAALQSDLEDSLYKAAGGGGPLYGDGYGFRLPPSSPQKLADVAAPPGGPPPPHSPYSGPPSRGSPVRQSFRKDSGSSSVFAESPGGKTRSAGSASTAGAPPSELFPGPGERSLVGFGPPVPAKDTETRERMEAMEKQIASLTGLVQSALLRGSEPETPSEKIEGSNGAATPSAPCGSGGRSSGATPVSGPPPPSASSTPAGQPTAVSRLQMQLHLRGLQNSASDLRGQLQQLRKLQLQNQESVRALLKRTEAELSMRVSEAARRQEDPLQRQRTLVEEERLRYLNDEELITQQLNDLEKSVEKIQRDVSHNHRLVPGPELEEKALVLKQLGETLTELKAHFPGLQSKMRVVLRVEVEAVKFLKEEPQRLDGLLKRCRGVTDTLAQIRRQVDEGVWPPPNNLLSQSPKKVTAETDFNKSVDFEMPPPSPPLNLHELSGPAEGASLTPKGGNPTKGLDTPGKRSVDKAVSVEAAERDWEEKRAALTQYSAKDINRLLEETQAELLKAIPDLDCASKAHPGPAPTPDHKPPKAPHGQKAAPRTEPSGRRGSDELTVPRYRTEKPSKSPPPPPPRRSFPSSHGLTTTRTGEVVVTSKKDSAFIKKAESEELEVQKPQVKLRRAVSEVARPASTPPIMASAIKDEDDEDRIIAELESGGGSVPPMKVVTPGASRLKAAQGQAGSPDKSKHGKQRAEYMRIQAQQQATKPSKEMSGSNETSSPVSEKPSASRTSIPVLTSFGARNSSISF

SEQ ID NO: 218598 - protein, 1035 aa, Artificial Sequence
  derived and/or modified sequence
MSEAELPLGFSRMNRFRQSLPLSRSASQTKLRSPGVLFLQFGEETRRVHITHEVSSLDTLHALIAHMFPQKLTMGMLKSPNTAILIKDEARNVFYELEDVRDIQDRSIIKIYRKEPLYAAFPGSHLTNGDLRREMVYASRESSPTRRLNNLSPAPHLASGSPPPGLPSGLPSGLQSGSPSRSRLSYAGGRPPSYAGSPVHHAAERLGGAPAAQGVSPSPSAILERRDVKPDEDLASKAGGMVLVKGEGLYADPYGLLHEGRLSLAAAAGDPFAYPGAGGLYKRGSVRSLSTYSAAALQSDLEDSLYKAAGGGGPLYGDGYGFRLPPSSPQKLADVAAPPGGPPPPHSPYSGPPSRGSPVRQSFRKDSGSSSVFAESPGGKTRSAGSASTAGAPPSELFPGPGERSLVGFGPPVPAKDTETRERMEAMEKQIASLTGLVQSALLRGSEPETPSEKIEGSNGAATPSAPCGSGGRSSGATPVSGPPPPSASSTPAGQPTAVSRLQMQLHLRGLQNSASDLRGQLQQLRKLQLQNQESVRALLKRTEAELSMRVSEAARRQEDPLQRQRTLVEEERLRYLNDEELITQQLNDLEKSVEKIQRDVSHNHRLVPGPELEEKALVLKQLGETLTELKAHFPGLQSKMRVVLRVEVEAVKFLKEEPQRLDGLLKRCRGVTDTLAQIRRQVDEGVWPPPNNLLSQSPKKVTAETDFNKSVDFEMPPPSPPLNLHELSGPAEGASLTPKGGNPTKGLDTPGKRSVDKAVSVEAAERDWEEKRAALTQYSAKDINRLLEETQAELLKAIPDLDCASKAHPGPAPTPDHKPPKAPHGQKAAPRTEPSGRRGSDELTVPRYRTEKPSKSPPPPPPRRSFPSSHGLTTTRTGEVVVTSKKDSAFIKKAESEELEVQKPQVKLRRAVSEVARPASTPPIMASAIKDEDDEDRIIAELEVFERSSVSSLPPTPRRQLIPTLLSPQDLGPPGGSAPGPTRKSGGGSVPPMKVVTPGASRLKAAQGQAGSPDKSKHGKQRAEYMRIQAQQQV

SEQ ID NO: 218599 - protein, 921 aa, Artificial Sequence
  derived and/or modified sequence
MGMLKSPNTAILIKDEARNVFYELEDVRDIQDRSIIKIYRKEPLYAAFPGSHLTNGDLRREMVYASRESSPTRRLNNLSPAPHLASGSPPPGLPSGLPSGLQSGSPSRSRLSYAGGRPPSYAGSPVHHAAERLGGAPAAQGVSPSPSAILERRDVKPDEDLASKAGGMVLVKGEGLYADPYGLLHEGRLSLAAAAGDPFAYPGAGGLYKRGSVRSLSTYSAAALQSDLEDSLYKAAGGGGPLYGDGYGFRLPPSSPQKLADVAAPPGGPPPPHSPYSGPPSRGSPVRQSFRKDSGSSSVFAESPGGKTRSAGSASTAGAPPSELFPGPGERSLVGFGPPVPAKDTETRERMEAMEKQIASLTGLVQSALLRGSEPETPSEKIEGSNGAATPSAPCGSGGRSSGATPVSGPPPPSASSTPAGQPTAVSRLQMQLHLRGLQNSASDLRGQLQQLRKLQLQNQESVRALLKRTEAELSMRVSEAARRQEDPLQRQRTLVEEERLRYLNDEELITQQLNDLEKSVEKIQRDVSHNHRLVPGPELEEKALVLKQLGETLTELKAHFPGLQSKMRVVLRVEVEAVKFLKEEPQRLDGLLKRCRGVTDTLAQIRRQVDEGVWPPPNNLLSQSPKKVTAETDFNKSVDFEMPPPSPPLNLHELSGPAEGASLTPKGGNPTKGLDTPGKRSVDKAVSVEAAERDWEEKRAALTQYSAKDINRLLEETQAELLKAIPDLDCASKAHPGPAPTPDHKPPKAPHGQKAAPRTEPSGRRGSDELTVPRYRTEKPSKSPPPPPPRRSFPSSHGLTTTRTGEVVVTSKKDSAFIKKAESEELEVQKPQVKLRRAVSEVARPASTPPIMASAIKDEDDEDRIIAELESGGGSVPPMKVVTPGASRLKAAQGQAGSPDKSKHGKQRAEYMRIQAQQQV

SEQ ID NO: 218600 - DNA, 3552 bp, Artificial Sequence
  derived and/or modified sequence
atgggcaacgcccccagccaggaccccgagagaagcagcccccccatgctgagcgccgacgacgccgagtaccccagagagtacagaaccctgggcggcggcggcggcggcggcagcggcggcagaagattcagcaacgtgggcctggtgcacaccagcgagagaagacacaccgtgatcgccgcccagagcctggaggccctgagcggcctgcagaaggccgacgccgacagaaagagagacgccttcatggaccacctgaagagcaagtacccccagcacgccctggccctgagaggccagcaggacagaatgagagagcagcccaactactggagcttcaagaccagaagcagcagacacacccagggcgcccagcccggcctggccgaccaggccgccaagctgagctacgccagcgccgagagcctggagaccatgagcgaggccgagctgcccctgggcttcagcagaatgaacagattcagacagagcctgcccctgagcagaagcgccagccagaccaagctgagaagccccggcgtgctgttcctgcagttcggcgaggagaccagaagagtgcacatcacccacgaggtgagcagcctggacaccctgcacgccctgatcgcccacatgttcccccagaagctgaccatgggcatgctgaagagccccaacaccgccatcctgatcaaggacgaggccagaaacgtgttctacgagctggaggacgtgagagacatccaggacagaagcatcatcaagatctacagaaaggagcccctgtacgccgccttccccggcagccacctgaccaacggcgacctgagaagagagatggtgtacgccagcagagagagcagccccaccagaagactgaacaacctgagccccgccccccacctggccagcggcagccccccccccggcctgcccagcggcctgcccagcggcctgcagagcggcagccccagcagaagcagactgagctacgccggcggcagaccccccagctacgccggcagccccgtgcaccacgccgccgagagactgggcggcgcccccgccgcccagggcgtgagccccagccccagcgccatcctggagagaagagacgtgaagcccgacgaggacctggccagcaaggccggcggcatggtgctggtgaagggcgagggcctgtacgccgacccctacggcctgctgcacgagggcagactgagcctggccgccgccgccggcgaccccttcgcctaccccggcgccggcggcctgtacaagagaggcagcgtgagaagcctgagcacctacagcgccgccgccctgcagagcgacctggaggacagcctgtacaaggccgccggcggcggcggccccctgtacggcgacggctacggcttcagactgccccccagcagcccccagaagctggccgacgtggccgccccccccggcggccccccccccccccacagcccctacagcggcccccccagcagaggcagccccgtgagacagagcttcagaaaggacagcggcagcagcagcgtgttcgccgagagccccggcggcaagaccagaagcgccggcagcgccagcaccgccggcgccccccccagcgagctgttccccggccccggcgagagaagcctggtgggcttcggcccccccgtgcccgccaaggacaccgagaccagagagagaatggaggccatggagaagcagatcgccagcctgaccggcctggtgcagagcgccctgctgagaggcagcgagcccgagacccccagcgagaagatcgagggcagcaacggcgccgccacccccagcgccccctgcggcagcggcggcagaagcagcggcgccacccccgtgagcggcccccccccccccagcgccagcagcacccccgccggccagcccaccgccgtgagcagactgcagatgcagctgcacctgagaggcctgcagaacagcgccagcgacctgagaggccagctgcagcagctgagaaagctgcagctgcagaaccaggagagcgtgagagccctgctgaagagaaccgaggccgagctgagcatgagagtgagcgaggccgccagaagacaggaggaccccctgcagagacagagaaccctggtggaggaggagagactgagatacctgaacgacgaggagctgatcacccagcagctgaacgacctggagaagagcgtggagaagatccagagagacgtgagccacaaccacagactggtgcccggccccgagctggaggagaaggccctggtgctgaagcagctgggcgagaccctgaccgagctgaaggcccacttccccggcctgcagagcaagatgagagtggtgctgagagtggaggtggaggccgtgaagttcctgaaggaggagccccagagactggacggcctgctgaagagatgcagaggcgtgaccgacaccctggcccagatcagaagacaggtggacgagggcgtgtggcccccccccaacaacctgctgagccagagccccaagaaggtgaccgccgagaccgacttcaacaagagcgtggacttcgagatgcccccccccagcccccccctgaacctgcacgagctgagcggccccgccgagggcgccagcctgacccccaagggcggcaaccccaccaagggcctggacacccccggcaagagaagcgtggacaaggccgtgagcgtggaggccgccgagagagactgggaggagaagagagccgccctgacccagtacagcgccaaggacatcaacagactgctggaggagacccaggccgagctgctgaaggccatccccgacctggactgcgccagcaaggcccaccccggccccgcccccacccccgaccacaagccccccaaggccccccacggccagaaggccgcccccagaaccgagcccagcggcagaagaggcagcgacgagctgaccgtgcccagatacagaaccgagaagcccagcaagagcccccccccccccccccccagaagaagcttccccagcagccacggcctgaccaccaccagaaccggcgaggtggtggtgaccagcaagaaggacagcgccttcatcaagaaggccgagagcgaggagctggaggtgcagaagccccaggtgaagctgagaagagccgtgagcgaggtggccagacccgccagcaccccccccatcatggccagcgccatcaaggacgaggacgacgaggacagaatcatcgccgagctggagagcggcggcggcagcgtgccccccatgaaggtggtgacccccggcgccagcagactgaaggccgcccagggccaggccggcagccccgacaagagcaagcacggcaagcagagagccgagtacatgagaatccaggcccagcagcaggccaccaagcccagcaaggagatgagcggcagcaacgagaccagcagccccgtgagcgagaagcccagcgccagcagaaccagcatccccgtgctgaccagcttcggcgccagaaacagcagcatcagcttctag

SEQ ID NO: 218601 - DNA, 3108 bp, Artificial Sequence
  derived and/or modified sequence
atgagcgaggccgagctgcccctgggcttcagcagaatgaacagattcagacagagcctgcccctgagcagaagcgccagccagaccaagctgagaagccccggcgtgctgttcctgcagttcggcgaggagaccagaagagtgcacatcacccacgaggtgagcagcctggacaccctgcacgccctgatcgcccacatgttcccccagaagctgaccatgggcatgctgaagagccccaacaccgccatcctgatcaaggacgaggccagaaacgtgttctacgagctggaggacgtgagagacatccaggacagaagcatcatcaagatctacagaaaggagcccctgtacgccgccttccccggcagccacctgaccaacggcgacctgagaagagagatggtgtacgccagcagagagagcagccccaccagaagactgaacaacctgagccccgccccccacctggccagcggcagccccccccccggcctgcccagcggcctgcccagcggcctgcagagcggcagccccagcagaagcagactgagctacgccggcggcagaccccccagctacgccggcagccccgtgcaccacgccgccgagagactgggcggcgcccccgccgcccagggcgtgagccccagccccagcgccatcctggagagaagagacgtgaagcccgacgaggacctggccagcaaggccggcggcatggtgctggtgaagggcgagggcctgtacgccgacccctacggcctgctgcacgagggcagactgagcctggccgccgccgccggcgaccccttcgcctaccccggcgccggcggcctgtacaagagaggcagcgtgagaagcctgagcacctacagcgccgccgccctgcagagcgacctggaggacagcctgtacaaggccgccggcggcggcggccccctgtacggcgacggctacggcttcagactgccccccagcagcccccagaagctggccgacgtggccgccccccccggcggccccccccccccccacagcccctacagcggcccccccagcagaggcagccccgtgagacagagcttcagaaaggacagcggcagcagcagcgtgttcgccgagagccccggcggcaagaccagaagcgccggcagcgccagcaccgccggcgccccccccagcgagctgttccccggccccggcgagagaagcctggtgggcttcggcccccccgtgcccgccaaggacaccgagaccagagagagaatggaggccatggagaagcagatcgccagcctgaccggcctggtgcagagcgccctgctgagaggcagcgagcccgagacccccagcgagaagatcgagggcagcaacggcgccgccacccccagcgccccctgcggcagcggcggcagaagcagcggcgccacccccgtgagcggcccccccccccccagcgccagcagcacccccgccggccagcccaccgccgtgagcagactgcagatgcagctgcacctgagaggcctgcagaacagcgccagcgacctgagaggccagctgcagcagctgagaaagctgcagctgcagaaccaggagagcgtgagagccctgctgaagagaaccgaggccgagctgagcatgagagtgagcgaggccgccagaagacaggaggaccccctgcagagacagagaaccctggtggaggaggagagactgagatacctgaacgacgaggagctgatcacccagcagctgaacgacctggagaagagcgtggagaagatccagagagacgtgagccacaaccacagactggtgcccggccccgagctggaggagaaggccctggtgctgaagcagctgggcgagaccctgaccgagctgaaggcccacttccccggcctgcagagcaagatgagagtggtgctgagagtggaggtggaggccgtgaagttcctgaaggaggagccccagagactggacggcctgctgaagagatgcagaggcgtgaccgacaccctggcccagatcagaagacaggtggacgagggcgtgtggcccccccccaacaacctgctgagccagagccccaagaaggtgaccgccgagaccgacttcaacaagagcgtggacttcgagatgcccccccccagcccccccctgaacctgcacgagctgagcggccccgccgagggcgccagcctgacccccaagggcggcaaccccaccaagggcctggacacccccggcaagagaagcgtggacaaggccgtgagcgtggaggccgccgagagagactgggaggagaagagagccgccctgacccagtacagcgccaaggacatcaacagactgctggaggagacccaggccgagctgctgaaggccatccccgacctggactgcgccagcaaggcccaccccggccccgcccccacccccgaccacaagccccccaaggccccccacggccagaaggccgcccccagaaccgagcccagcggcagaagaggcagcgacgagctgaccgtgcccagatacagaaccgagaagcccagcaagagcccccccccccccccccccagaagaagcttccccagcagccacggcctgaccaccaccagaaccggcgaggtggtggtgaccagcaagaaggacagcgccttcatcaagaaggccgagagcgaggagctggaggtgcagaagccccaggtgaagctgagaagagccgtgagcgaggtggccagacccgccagcaccccccccatcatggccagcgccatcaaggacgaggacgacgaggacagaatcatcgccgagctggaggtgttcgagagaagcagcgtgagcagcctgccccccacccccagaagacagctgatccccaccctgctgagcccccaggacctgggcccccccggcggcagcgcccccggccccaccagaaagagcggcggcggcagcgtgccccccatgaaggtggtgacccccggcgccagcagactgaaggccgcccagggccaggccggcagccccgacaagagcaagcacggcaagcagagagccgagtacatgagaatccaggcccagcagcaggtgtag

SEQ ID NO: 218602 - DNA, 2766 bp, Artificial Sequence
  derived and/or modified sequence
atgggcatgctgaagagccccaacaccgccatcctgatcaaggacgaggccagaaacgtgttctacgagctggaggacgtgagagacatccaggacagaagcatcatcaagatctacagaaaggagcccctgtacgccgccttccccggcagccacctgaccaacggcgacctgagaagagagatggtgtacgccagcagagagagcagccccaccagaagactgaacaacctgagccccgccccccacctggccagcggcagccccccccccggcctgcccagcggcctgcccagcggcctgcagagcggcagccccagcagaagcagactgagctacgccggcggcagaccccccagctacgccggcagccccgtgcaccacgccgccgagagactgggcggcgcccccgccgcccagggcgtgagccccagccccagcgccatcctggagagaagagacgtgaagcccgacgaggacctggccagcaaggccggcggcatggtgctggtgaagggcgagggcctgtacgccgacccctacggcctgctgcacgagggcagactgagcctggccgccgccgccggcgaccccttcgcctaccccggcgccggcggcctgtacaagagaggcagcgtgagaagcctgagcacctacagcgccgccgccctgcagagcgacctggaggacagcctgtacaaggccgccggcggcggcggccccctgtacggcgacggctacggcttcagactgccccccagcagcccccagaagctggccgacgtggccgccccccccggcggccccccccccccccacagcccctacagcggcccccccagcagaggcagccccgtgagacagagcttcagaaaggacagcggcagcagcagcgtgttcgccgagagccccggcggcaagaccagaagcgccggcagcgccagcaccgccggcgccccccccagcgagctgttccccggccccggcgagagaagcctggtgggcttcggcccccccgtgcccgccaaggacaccgagaccagagagagaatggaggccatggagaagcagatcgccagcctgaccggcctggtgcagagcgccctgctgagaggcagcgagcccgagacccccagcgagaagatcgagggcagcaacggcgccgccacccccagcgccccctgcggcagcggcggcagaagcagcggcgccacccccgtgagcggcccccccccccccagcgccagcagcacccccgccggccagcccaccgccgtgagcagactgcagatgcagctgcacctgagaggcctgcagaacagcgccagcgacctgagaggccagctgcagcagctgagaaagctgcagctgcagaaccaggagagcgtgagagccctgctgaagagaaccgaggccgagctgagcatgagagtgagcgaggccgccagaagacaggaggaccccctgcagagacagagaaccctggtggaggaggagagactgagatacctgaacgacgaggagctgatcacccagcagctgaacgacctggagaagagcgtggagaagatccagagagacgtgagccacaaccacagactggtgcccggccccgagctggaggagaaggccctggtgctgaagcagctgggcgagaccctgaccgagctgaaggcccacttccccggcctgcagagcaagatgagagtggtgctgagagtggaggtggaggccgtgaagttcctgaaggaggagccccagagactggacggcctgctgaagagatgcagaggcgtgaccgacaccctggcccagatcagaagacaggtggacgagggcgtgtggcccccccccaacaacctgctgagccagagccccaagaaggtgaccgccgagaccgacttcaacaagagcgtggacttcgagatgcccccccccagcccccccctgaacctgcacgagctgagcggccccgccgagggcgccagcctgacccccaagggcggcaaccccaccaagggcctggacacccccggcaagagaagcgtggacaaggccgtgagcgtggaggccgccgagagagactgggaggagaagagagccgccctgacccagtacagcgccaaggacatcaacagactgctggaggagacccaggccgagctgctgaaggccatccccgacctggactgcgccagcaaggcccaccccggccccgcccccacccccgaccacaagccccccaaggccccccacggccagaaggccgcccccagaaccgagcccagcggcagaagaggcagcgacgagctgaccgtgcccagatacagaaccgagaagcccagcaagagcccccccccccccccccccagaagaagcttccccagcagccacggcctgaccaccaccagaaccggcgaggtggtggtgaccagcaagaaggacagcgccttcatcaagaaggccgagagcgaggagctggaggtgcagaagccccaggtgaagctgagaagagccgtgagcgaggtggccagacccgccagcaccccccccatcatggccagcgccatcaaggacgaggacgacgaggacagaatcatcgccgagctggagagcggcggcggcagcgtgccccccatgaaggtggtgacccccggcgccagcagactgaaggccgcccagggccaggccggcagccccgacaagagcaagcacggcaagcagagagccgagtacatgagaatccaggcccagcagcaggtgtag

SEQ ID NO: 218603 - DNA, 3552 bp, Artificial Sequence
  derived and/or modified sequence
atgggaaacgccccatcgcaggaccccgagaggtccagtccacctatgctctccgctgatgatgcagagtaccctcgtgagtataggactctgggcggtggcggaggaggaggttctggcgggaggcggttctctaatgtgggtctcgtgcacacttctgagagacggcatacggtgatagctgcccagtcgctggaggccctgagcggcctgcaaaaagccgacgctgataggaagcgcgacgcgttcatggaccatttgaaatcgaagtatccacagcacgccctcgccttgcggggccagcaggaccgaatgcgggaacagcccaactattggtcctttaaaactcggagctcccggcacactcagggcgctcagccaggactggccgaccaggctgctaaactgagttacgcctctgccgagagtctggaaaccatgtcagaagcagaactaccactcggctttagtcgtatgaaccggtttagacagagtcttcccctcagcaggagcgcaagccaaaccaagttacgcagtccaggcgttctgtttctgcagtttggcgaggaaacccggcgtgtacacattacccatgaagtttcttcactagacactctgcacgcgcttattgcccacatgtttccacagaagttaacaatgggtatgcttaagagccccaacactgctatactgattaaagacgaagcccgcaatgtcttttacgagctggaagatgtgcgcgatattcaggaccggtcaattataaaaatctatcgtaaagagcctctgtacgctgccttccccggtagccatctcaccaatggggatcttcggcgagagatggtgtatgccagccgcgagtcgtcacccacccgcagactcaacaatctgagtccggcacctcaccttgcgtcaggatctcctccccccgggctgccaagtggcttgccaagtggcttacaatcaggctcaccgtctcgttcacggttaagctacgccggcgggaggccgccatcttatgccgggtcacctgtccaccacgcagccgaacgcctgggtggggcccccgccgcgcagggtgtgtcaccctccccaagcgctattcttgagaggagagatgtgaagccagacgaggatcttgctagcaaggctggggggatggtgctggtgaaaggcgaagggctgtacgcggatccgtatgggctcctgcacgagggaagactgagtctggcggcagctgccggcgatcccttcgcttaccccggcgcaggtgggctgtataaacgtgggtcagtaagaagtctctctacatattctgcagccgctctgcagagcgacctggaggatagcctatacaaggctgccggcggcggaggcccactctacggtgacgggtacggatttcggttaccacccagctccccccaaaaactggcagatgtagccgcacctcccggcggccccccccctccccacagcccctattccggccccccctcacgcggcagccccgtgcgtcagtcgttccgtaaagattccggatcaagctccgtgttcgcggaatctcctggtgggaagacaaggtccgccggaagcgccagcaccgcaggtgctcctccctccgagctctttcctggaccgggagaacgctctctagttgggtttggccccccggtacccgccaaagatacggagacgcgagaacgaatggaagcaatggaaaagcagattgcttccctgaccggtctggtgcagtccgctttgctccgcggctctgaaccagagactccaagcgagaagatcgagggctccaatggcgccgcgacccctagcgcgccatgtggatctggggggaggagtagcggcgcgaccccagttagcgggccgccccccccttctgctagtagtacaccagcgggccaacctactgccgtgtcccggctccaaatgcagctccacttgcggggtctgcagaattctgccagtgacctccgaggccagcttcagcagctgcggaagttacagctacagaaccaggagagtgttcgcgcactcctgaagagaaccgaggccgagctttctatgcgagtcagcgaggcggccaggcggcaagaggatcccctgcagcggcagaggaccttggttgaggaagaacggctgaggtatttgaatgatgaggagcttattacccaacaactcaatgacctcgagaagtcggttgagaaaatccagcgtgatgtctctcataatcatagacttgtccctggcccggagctagaagagaaggcactggtgttgaagcaattgggcgaaaccttgacagaactgaaggctcattttccagggctgcagtccaagatgcgtgtcgtgctccgggtcgaggtggaagccgtgaagttcttaaaggaagagccacagaggttagacggcttactgaaacgctgtcgaggggtgacggataccctcgcacagattagaagacaggtcgacgagggcgtctggcctccgcctaataacttactgtcccagtctcccaaaaaagttaccgcggagaccgacttcaacaaatccgtcgacttcgaaatgccaccccccagccctccactgaatctgcatgagttgagcgggccagctgaaggcgcgtccttaaccccaaagggaggcaatccaaccaaggggcttgacacccccgggaaacggagcgtcgacaaggctgtatcagtcgaggcagccgaaagagactgggaagagaaaagggccgctttgacccagtactcagcaaaagacataaatcgcctgcttgaagaaacccaggccgagctacttaaggctattcccgacttggactgcgcttccaaagcgcacccagggcctgcgcccacgccggatcacaagcctccaaaggcaccccatggccagaaagcggccccacgtaccgaaccatcgggccggcgcgggtctgatgaactcaccgtgcctagataccggactgagaaaccatcaaaatcaccacctccacccccccccagaagaagctttccctcctcccacggtctgaccactactagaacaggagaggtggtcgtcacctccaagaaagattcggctttcatcaagaaagctgaatcagaggagctggaagttcagaagccccaggtcaaactgcgccgtgccgtgtctgaagtcgcgagacccgcatccacccctcccatcatggccagtgccatcaaagacgaggacgatgaagaccggattattgcagagctcgagagtggaggtggcagtgtgccccctatgaaagtggtgacccctggtgccagcaggctcaaagccgcccaagggcaggctggcagtcctgataagtccaagcacggaaagcagcgagctgaatacatgcgtatccaggcccaacagcaggcaaccaaacccagcaaagaaatgtccggctctaatgaaaccagctccccagtgagcgagaagccaagtgcaagccgcacttctatacccgtgttaacctccttcggagcacggaatagttcaatctccttctag

SEQ ID NO: 218604 - DNA, 3108 bp, Artificial Sequence
  derived and/or modified sequence
atgtcagaagcggaattgcccttaggatttagccgcatgaataggttccggcagagtctgcccctgtcacggagtgcaagccaaaccaagctcaggtcccccggcgtactctttctccagtttggagaggagacacgcagggtgcacatcacacatgaagtgagcagcttggatactctccacgccctcatagcccatatgtttccccagaaacttacaatgggcatgttgaagagtcccaacactgccattttgatcaaagatgaggccaggaatgtcttctacgaattggaagatgtgagggacattcaggataggagcatcatcaagatttacagaaaggagccgttatacgctgccttccctggctcccatctgactaacggcgacctgcgccgggagatggtctatgcaagtcgcgagtcctcaccaacgaggcggctgaataacctgtcccccgcaccacatttggcttccggctcccctccaccaggtctcccctcaggactgccatctggtttgcaatcaggatcaccaagccgttcaagactttcatatgcaggcgggaggcccccgagctatgccggctcccctgtccaccatgccgcagagcgattgggcggggctccagccgctcagggggtgtccccctcaccgagtgcgatcctcgaacggcgagacgtgaagcccgacgaagatctggccagcaaggccgggggaatggttcttgtgaaaggggaggggctctatgctgatccctatggtttgttgcatgagggtcggctctcgttggccgccgcagctggcgatccattcgcctatcccggagccggaggcctctacaagagagggagcgttcgaagcctgagcacatactctgcggctgcccttcagagtgacctggaggacagcctgtacaaggccgctggtggtggggggcctctgtatggtgacggctatgggtttaggctccctccctcaagcccccagaagcttgctgacgtggctgccccccctggcggcccacctcctccccatagcccttactccggcccaccgtctcgggggtctcctgtgcgccaatcatttaggaaggacagcggcagcagcagcgtgtttgctgagtccccaggggggaagactagatctgccggctcagccagcacagccggggcaccgccctcagagctgttccctggcccaggcgagaggtctttggttggcttcggccctccagtgccagcaaaagatactgagacacgcgaaagaatggaggcaatggaaaagcagatagcgtctctgactggcttggtccagtcggccttgctgcggggcagcgagccagaaacaccctcagagaaaatcgaggggagcaatggagctgccactccaagcgccccctgtgggtctggagggagatccagtggcgcgaccccagttagcgggcctccaccgccatcggcctcttcgacgcctgctgggcagccaacagccgttagtcggctgcagatgcaattgcacttgagaggcctccagaactcagcctccgatctccggggacagctccagcaactgcggaagttacagctgcaaaaccaggagtccgtgcgcgcactcctcaagcgtactgaagcagagctgtcaatgcgcgtgagtgaagcagctcggaggcaagaggatccactgcaaaggcagcgcacactggtggaagaagaacgactgaggtatctaaacgacgaagagttaattactcagcagttgaacgacctggaaaaatctgtggagaaaattcaaagggatgtgtcccataatcacagactggtccctggcccggaactggaggagaaagccctggtacttaaacagctaggcgaaacgctgaccgagcttaaagcccattttcctggccttcagtccaaaatgagagtcgtcctgagagtagaagtagaggccgtgaagtttctgaaggaagaaccacaacgattagacggcctgctgaaacgatgtaggggagtgacggacacgttggcccagatccgccggcaggtcgatgagggcgtgtggcccccccctaacaaccttcttagtcagagccccaagaaggttacagctgagacggacttcaacaagagtgttgacttcgaaatgcccccaccctctcctccactgaacctccacgagctgagtggcccggctgagggcgcttcactgactcctaagggcggcaatcctacaaaggggttagacacccctggaaagaggtctgttgataaggcagtctctgtcgaggccgctgagcgggattgggaagaaaagcgtgccgctcttactcaatatagcgccaaggatataaacagattgctcgaagagacacaggcagagttattgaaagcgattcctgatctggattgcgccagcaaagcccacccagggcccgccccgactccagaccacaagccaccaaaggctccacatggtcagaaagctgctccaaggacggaaccttccggaagacgcggcagcgacgagctcacggttccccgttatagaaccgaaaaaccttcaaaatcgcctccaccgccgccgcccagaagatcctttcctagttctcacggcctgaccactacgcgcacaggtgaagtagtggtgacatccaagaaagactctgcttttatcaagaaagccgagtcggaggagctagaggtgcagaagccacaggtaaagctgagaagggccgtctctgaagtggcccgtccggcctctacaccccctatcatggcctctgccatcaaagatgaggatgacgaggatcgcatcatcgcggagctggaggtctttgagagatcttcagtaagctctcttccccccactccacgacgtcaattgatccctactttgttgagtccacaggatctgggcccaccagggggctccgcgccaggtccaactagaaaatcaggcggtggtagcgttccacccatgaaggtcgttacgcctggggcctcccgcttgaaagcggcacagggccaggcaggcagtcccgacaagtccaagcacggcaagcaacgagcagagtacatgcgcattcaggcccaacagcaggtatag

SEQ ID NO: 218605 - DNA, 2766 bp, Artificial Sequence
  derived and/or modified sequence
atgggaatgttgaaatctccaaatactgccattctgataaaagacgaggcaagaaatgtgttttatgaacttgaggacgtgcgggatatccaggaccgctctatcataaagatataccggaaggagcccctgtatgcagctttcccgggatctcatcttacaaacggagatctcaggcgagagatggtttatgctagccgagaaagttctcctaccaggaggttgaataatctctctcctgctccgcacctcgctagcgggagcccccctcctggcctaccatcgggtctgccctctggcttacagtcaggctccccgagcagaagccgcctgagctatgccggaggtagaccacctagttatgctgggagtcccgtgcaccatgcagcggagagactgggcggagcccccgcagcccagggcgtgtcaccatcccctagcgccatactggaacgcagggacgtgaaacctgacgaagacctggcaagcaaggctggaggaatggttttagtgaagggagaggggctgtacgctgacccttatggactcttgcacgaagggagactgagtcttgctgccgccgcaggcgaccctttcgcataccccggggctggggggctgtacaagagaggaagtgtgaggagcctctctacctattctgctgcagcgttgcagtctgacctggaggattcactatacaaagccgcgggtggtggaggaccactttacggagacggttacggtttccgtctacctccatctagccctcaaaagctcgcggatgttgcagcccctccaggaggcccgcccccgccgcatagtccttacagtggcccaccatcgcgggggagcccagtccggcagagctttcgtaaggatagtggctcgagttctgtgtttgccgaatctcctggcggaaagaccaggtcggcgggcagcgcctcgactgctggggcgccgccgagcgaactttttccaggacccggcgagcgcagcttggtgggctttgggccgccggtgccagctaaggacaccgagacgagggagagaatggaggcgatggagaaacagattgcttctctgactggattggtgcaatcagccctgctgcgggggagtgaacccgaaacaccaagcgaaaagattgaaggtagcaatggcgctgccacaccttcagccccatgtggtagcggcggtcgatctagtggtgctacgcctgtttctggacctccgccaccatcagcatcaagtactcctgctgggcagcccactgccgtctctcgactgcagatgcagctgcacctcaggggtcttcagaacagtgcgagcgatttaaggggacagcttcagcagctgcgcaaactccagttgcagaaccaagaatcggttcgggccctcctgaagcggactgaagcagaactctccatgcgggtcagcgaagctgcaagacgccaagaagatccgctgcagaggcaacgcacgcttgttgaggaagagcgcctccgttacctgaatgacgaggaactcatcactcagcagctgaatgacctggagaaaagcgtggaaaagatacaacgcgatgtttcccacaatcaccggctcgttccaggtccggagctagaggagaaggctctagtcctaaaacagttaggtgaaaccctgaccgagctgaaagctcacttcccagggctgcagtccaaaatgcgtgtcgttctgagagtggaggtcgaagctgtcaagttccttaaagaggagccacagaggctggacgggcttctgaagcggtgccggggagtcacagacaccctggcacagatcaggcgccaagtggacgaaggagtgtggccaccccctaataacctgttatcccagagcccaaaaaaggtcaccgcagaaactgactttaacaagtccgtggatttcgaaatgcccccacccagtccgccacttaacctccacgagttgtccggcccagccgaaggtgcttcgctgacgccaaagggcggcaaccccactaaaggtctggacactccaggcaagcgaagcgtggataaggccgtctcagttgaagccgccgagcgagattgggaagagaagagagccgcgctgacacaatacagcgctaaggatatcaaccgcctattggaggagacacaggcagagcttctgaaggctatccctgatctcgactgcgcctccaaggcccatcctgggcccgctccgacacccgatcacaagccaccaaaggctccacatggacaaaaagccgccccgagaacagaaccaagtggcaggcgcggttcagatgaattaacggtcccccgctaccgaaccgaaaaaccctctaagtcccctcccccaccgccaccccgtcgtagctttcccagttcccatggcctgacaacaaccaggacaggagaggtggtggtcactagcaagaaggacagtgcctttatcaagaaggcagaaagtgaggagctggaggtacagaaaccacaggtgaagctgcggcgggcagtgtctgaagtcgcacggccggcttccacgccccccattatggcctccgctataaaagacgaggacgatgaagacaggattatagccgaactggaatccggcggcggcagtgtgcccccaatgaaggttgttacacccggagcatctagattgaaggccgcccaaggtcaggccggcagtcctgataagtccaagcacgggaagcagcgggcagagtacatgagaattcaagcacagcagcaagtatag

SEQ ID NO: 218606 - DNA, 3552 bp, Artificial Sequence
  derived and/or modified sequence
atgggaaatgcccccagccaggaccctgagaggagcagcccccccatgctgtctgcagatgatgctgagtacccccgggagtaccgcaccctgggcggcggcggcggcggcggcagcggcggccgccgcttcagcaatgtgggcctggtgcacaccagcgagaggaggcacacagtgattgctgcccagagcctggaggccctgagcggcctgcagaaggcagatgctgacaggaagagagatgccttcatggaccacctgaagagcaagtacccccagcacgccctggccctgcggggccagcaggacaggatgagggagcagcccaactactggagcttcaagaccaggagcagccgccacacccagggcgcccagcccggcctggccgaccaggccgccaagctgtcctatgccagcgctgagagcctggagaccatgtctgaggccgagctgcccctgggcttcagcaggatgaaccgcttccggcagagcctgcccctgagccgcagcgccagccagaccaagctgcggagccctggggtgctcttcctgcagtttggagaggagacccggcgggtgcacatcacccatgaggtgagcagcctggacaccctgcacgccctgattgcccacatgttcccccagaagctgaccatgggcatgctgaagagccccaacacagccatcctgatcaaggatgaggccagaaatgtgttctatgagctggaggatgtgcgggacatccaggacaggagcatcatcaagatctacaggaaggagcccctgtatgctgccttccctggcagccacctgaccaacggggacctgcggcgggagatggtgtatgccagccgggagagcagccccacccggcggctgaacaacctgagccctgccccccacctggccagcggcagccccccacctggcctgcccagcggcctgcccagcggcctgcagagcggcagccccagccgcagccggctgtcctatgccggcggccggcccccatcctatgccggcagccctgtgcaccacgccgctgagcggctgggcggggccccagctgcccagggcgtgagccccagccccagcgccatcctggagaggagagatgtgaagccagatgaggacctggccagcaaggccggcggcatggtgctggtgaagggggagggcctgtatgctgacccctacggcctgctgcacgagggccgcctgagcctggccgctgctgctggggacccctttgcctacccaggagctgggggcctgtacaagaggggctctgtgcgcagcctgagcacctacagcgctgctgccctgcagagcgacctggaggacagcctgtacaaggctgctgggggcggcggccccctgtatggagatggctacggcttccggctgccccccagcagcccccagaagctggctgatgtggccgcccctcctgggggccccccaccaccccacagcccctacagcggcccccccagccggggcagccctgtgcggcagagcttcaggaaggacagcggcagcagctctgtgtttgctgagagccctgggggcaagaccaggtctgctggcagcgccagcacagctggggcccctccttctgagctgtttcctggccctggagagaggagcctggtgggctttggacctcctgtgcctgccaaggacacagagacccgggagaggatggaggccatggagaagcagatcgccagcctgaccggcctggtgcagagcgccctgctgcggggcagcgagcctgagacccccagcgagaagattgagggcagcaatggagctgccaccccatctgccccctgtggcagcggcggccgcagcagcggggccacccctgtgtctggccccccacctccttctgccagcagcaccccagctggccagcccacagctgtgtcccggctgcagatgcagctgcacctgcggggcctgcagaacagcgccagtgacctgcggggccagctgcagcagctgaggaagctgcagctgcagaaccaggagagcgtgcgggccctgctgaagaggacagaagctgagctgtccatgagggtgtctgaggccgcccggcggcaggaggaccccctgcagaggcagaggaccctggtggaggaggagcggctgcgctacctgaatgatgaggagctgatcacccagcagctgaatgacctggagaagtctgtggagaagatccagagagatgtgagccacaaccaccggctggtgcccggccctgagctggaggagaaggccctggtgctgaagcagctgggggagaccctgacagagctgaaggcccacttccctggcctgcagagcaagatgagggtggtgctgcgggtggaggtggaggccgtgaagttcctgaaggaggagccccagaggctggatggcctgctgaagcgctgccggggcgtgacagacaccctggcccagatccggcggcaggtggatgagggcgtgtggcccccacccaacaacctgctgagccagagccccaagaaggtgacagctgagacagacttcaacaagtctgtggactttgagatgcccccacccagcccccccctgaacctgcacgagctgagcggccctgctgagggcgccagcctgacccccaagggcggcaaccccaccaagggcctggacaccccaggcaagaggtctgtggacaaggctgtgtctgtggaggccgctgagcgggactgggaggagaagagagctgccctgacccagtacagcgccaaggacatcaaccggctgctggaggagacccaggccgagctgctgaaggccatcccagacctggactgtgccagcaaggcccaccctggccctgcccccaccccagaccacaagccacccaaggcccctcatggccagaaggccgcccccaggacagagcccagcggccggcggggcagtgatgagctgactgtgccccgctacagaacagagaagcccagcaagagccccccacctcctccaccccggcgctccttccccagcagccacggcctgaccaccaccaggactggagaggtggtggtgaccagcaagaaggacagcgccttcatcaagaaggccgagagcgaggagctggaggtgcagaagccccaggtgaagctgcggcgggctgtgtctgaggtggcccggcctgccagcaccccacccatcatggccagcgccatcaaggatgaagatgatgaggaccgcatcatcgccgagctggagagcggcggcggctctgtgccccccatgaaggtggtgacccctggggccagccggctgaaggccgcccagggccaggccggcagcccagacaagagcaagcacggcaagcagagagctgagtacatgaggatccaggcccagcagcaggccaccaagcccagcaaggagatgagcggcagcaatgagaccagcagccctgtgtctgagaagcccagcgccagcaggaccagcatccctgtgctgaccagctttggagccaggaacagcagcatctccttctag

SEQ ID NO: 218607 - DNA, 3108 bp, Artificial Sequence
  derived and/or modified sequence
atgtctgaggccgagctgcccctgggcttcagcaggatgaaccgcttccggcagagcctgcccctgagccgcagcgccagccagaccaagctgcggagccctggggtgctcttcctgcagtttggagaggagacccggcgggtgcacatcacccatgaggtgagcagcctggacaccctgcacgccctgattgcccacatgttcccccagaagctgaccatgggcatgctgaagagccccaacacagccatcctgatcaaggatgaggccagaaatgtgttctatgagctggaggatgtgcgggacatccaggacaggagcatcatcaagatctacaggaaggagcccctgtatgctgccttccctggcagccacctgaccaacggggacctgcggcgggagatggtgtatgccagccgggagagcagccccacccggcggctgaacaacctgagccctgccccccacctggccagcggcagccccccacctggcctgcccagcggcctgcccagcggcctgcagagcggcagccccagccgcagccggctgtcctatgccggcggccggcccccatcctatgccggcagccctgtgcaccacgccgctgagcggctgggcggggccccagctgcccagggcgtgagccccagccccagcgccatcctggagaggagagatgtgaagccagatgaggacctggccagcaaggccggcggcatggtgctggtgaagggggagggcctgtatgctgacccctacggcctgctgcacgagggccgcctgagcctggccgctgctgctggggacccctttgcctacccaggagctgggggcctgtacaagaggggctctgtgcgcagcctgagcacctacagcgctgctgccctgcagagcgacctggaggacagcctgtacaaggctgctgggggcggcggccccctgtatggagatggctacggcttccggctgccccccagcagcccccagaagctggctgatgtggccgcccctcctgggggccccccaccaccccacagcccctacagcggcccccccagccggggcagccctgtgcggcagagcttcaggaaggacagcggcagcagctctgtgtttgctgagagccctgggggcaagaccaggtctgctggcagcgccagcacagctggggcccctccttctgagctgtttcctggccctggagagaggagcctggtgggctttggacctcctgtgcctgccaaggacacagagacccgggagaggatggaggccatggagaagcagatcgccagcctgaccggcctggtgcagagcgccctgctgcggggcagcgagcctgagacccccagcgagaagattgagggcagcaatggagctgccaccccatctgccccctgtggcagcggcggccgcagcagcggggccacccctgtgtctggccccccacctccttctgccagcagcaccccagctggccagcccacagctgtgtcccggctgcagatgcagctgcacctgcggggcctgcagaacagcgccagtgacctgcggggccagctgcagcagctgaggaagctgcagctgcagaaccaggagagcgtgcgggccctgctgaagaggacagaagctgagctgtccatgagggtgtctgaggccgcccggcggcaggaggaccccctgcagaggcagaggaccctggtggaggaggagcggctgcgctacctgaatgatgaggagctgatcacccagcagctgaatgacctggagaagtctgtggagaagatccagagagatgtgagccacaaccaccggctggtgcccggccctgagctggaggagaaggccctggtgctgaagcagctgggggagaccctgacagagctgaaggcccacttccctggcctgcagagcaagatgagggtggtgctgcgggtggaggtggaggccgtgaagttcctgaaggaggagccccagaggctggatggcctgctgaagcgctgccggggcgtgacagacaccctggcccagatccggcggcaggtggatgagggcgtgtggcccccacccaacaacctgctgagccagagccccaagaaggtgacagctgagacagacttcaacaagtctgtggactttgagatgcccccacccagcccccccctgaacctgcacgagctgagcggccctgctgagggcgccagcctgacccccaagggcggcaaccccaccaagggcctggacaccccaggcaagaggtctgtggacaaggctgtgtctgtggaggccgctgagcgggactgggaggagaagagagctgccctgacccagtacagcgccaaggacatcaaccggctgctggaggagacccaggccgagctgctgaaggccatcccagacctggactgtgccagcaaggcccaccctggccctgcccccaccccagaccacaagccacccaaggcccctcatggccagaaggccgcccccaggacagagcccagcggccggcggggcagtgatgagctgactgtgccccgctacagaacagagaagcccagcaagagccccccacctcctccaccccggcgctccttccccagcagccacggcctgaccaccaccaggactggagaggtggtggtgaccagcaagaaggacagcgccttcatcaagaaggccgagagcgaggagctggaggtgcagaagccccaggtgaagctgcggcgggctgtgtctgaggtggcccggcctgccagcaccccacccatcatggccagcgccatcaaggatgaagatgatgaggaccgcatcatcgccgagctggaggtgtttgagaggagctctgtgagcagcctgccccccaccccccggcggcagctgatccccaccctgctgagcccccaggacctgggccccccaggcggcagcgcccctggccccaccaggaagagcggcggcggctctgtgccccccatgaaggtggtgacccctggggccagccggctgaaggccgcccagggccaggccggcagcccagacaagagcaagcacggcaagcagagagctgagtacatgaggatccaggcccagcagcaggtgtag

SEQ ID NO: 218608 - DNA, 2766 bp, Artificial Sequence
  derived and/or modified sequence
atgggcatgctgaagagccccaacacagccatcctgatcaaggatgaggccagaaatgtgttctatgagctggaggatgtgcgggacatccaggacaggagcatcatcaagatctacaggaaggagcccctgtatgctgccttccctggcagccacctgaccaatggagacctgcggcgggagatggtgtatgccagccgggagagcagccccacccggcggctgaacaacctgagccctgccccccacctggccagcggcagccccccacctggcctgcccagcggcctgcccagcggcctgcagagcggcagccccagccgcagccggctgtcctatgctgggggccggccccccagctatgccggcagccctgtgcaccacgccgctgagcggctgggcggggccccagctgcccagggcgtgagccccagccccagcgccatcctggagaggagagatgtgaagccagatgaggacctggccagcaaggccggcggcatggtgctggtgaagggggagggcctgtatgctgacccctacggcctgctgcacgagggccgcctgagcctggccgctgctgctggggacccctttgcctacccaggggccggcggcctgtacaagaggggctctgtgcgcagcctgagcacctacagcgctgctgccctgcagagcgacctggaggacagcctgtacaaggccgccggcggcggcggccccctgtatggagatggctacggcttccggctgccccccagcagcccccagaagctggctgatgtggccgcccctcctgggggccccccaccaccccacagcccctacagcggcccccccagccggggcagccctgtgcggcagagcttcaggaaggacagcggcagcagctctgtgtttgctgagagccctgggggcaagaccaggtctgctggcagcgccagcacagctggggccccacccagcgagctgtttcctggccctggagagaggagcctggtgggcttcggcccccctgtgcctgccaaggacacagagacccgggagaggatggaggccatggagaagcagatcgccagcctgaccggcctggtgcagagcgccctgctgcggggcagcgagcctgagaccccatctgagaagattgagggcagcaatggagctgccacccccagcgccccctgtggcagcggcggccgcagcagcggggccacccctgtgtctggccccccaccacccagcgccagcagcaccccagctggccagcccacagctgtgtcccggctgcagatgcagctgcacctgcggggcctgcagaacagcgccagtgacctgcggggccagctgcagcagctgaggaagctgcagctgcagaaccaggagagcgtgcgggccctgctgaagaggacagaggccgagctgtccatgagggtgtctgaggccgcccggcggcaggaggaccccctgcagaggcagaggaccctggtggaggaggagcggctgcgctacctgaatgatgaggagctgatcacccagcagctgaatgacctggagaagtctgtggagaagatccagagagatgtgagccacaaccaccggctggtgcccggccctgagctggaggagaaggccctggtgctgaagcagctgggggagaccctgacagagctgaaggcccacttccctggcctgcagagcaagatgagggtggtgctgcgggtggaggtggaggccgtgaagttcctgaaggaggagccccagaggctggatggcctgctgaagcgctgccggggcgtgacagacaccctggcccagatccggcggcaggtggatgaaggagtgtggcccccacccaacaacctgctgagccagagccccaagaaggtgacagctgagacagacttcaacaagtctgtggactttgagatgcccccacccagcccccccctgaacctgcacgagctgagcggccctgctgagggcgccagcctgacccccaagggcggcaaccccaccaagggcctggacacccctgggaagaggtctgtggacaaggctgtgtctgtggaggccgctgagcgggactgggaggagaagagagctgccctgacccagtacagcgccaaggacatcaaccggctgctggaggagacccaggccgagctgctgaaggccatcccagacctggactgtgccagcaaggcccaccctggccctgcccccaccccagaccacaagccacccaaggccccccacggccagaaggccgcccccaggacagagcccagcggcagaagaggaagtgatgagctgactgtgccccgctacagaacagagaagcccagcaagagccccccacctcctcctccaagaagaagcttccccagcagccacggcctgaccaccaccaggactggagaggtggtggtgaccagcaagaaggacagcgccttcatcaagaaggccgagagcgaggagctggaggtgcagaagccccaggtgaagctgcggcgggctgtgtctgaggtggcccggcctgccagcaccccacccatcatggccagcgccatcaaggatgaagatgatgaagatcgcatcatcgccgagctggagagcggcggcggctctgtgccccccatgaaggtggtgacccctggggccagccggctgaaggccgcccagggccaggccggcagcccagacaagagcaagcacggcaagcagagagctgagtacatgaggatccaggcccagcagcaggtgtag

SEQ ID NO: 218609 - DNA, 3552 bp, Artificial Sequence
  derived and/or modified sequence
atgggcaacgcccccagccaggaccccgagcggagcagcccccccatgctctctgcagacgacgccgaataccctcgtgaatacagaacattggggggcggcggggggggagggagtggcggcagacgtttcagcaatgtcggcctggtgcatacctctgagaggaggcacacggtgattgccgcccagagccttgaggccttatctgggctgcagaaagctgacgcagatcgcaagagagatgcattcatggaccacctgaagtcaaagtacccacaacacgcgcttgctctgcgcgggcaacaagatagaatgcgtgagcagccaaactactggtcctttaaaacgaggagttctcggcacactcagggtgcccagccaggtttggcagatcaagccgccaaactctcatatgcatccgccgagagcctggagacaatgtcagaggcagaactgcctctggggttttccagaatgaacaggtttcgacagagcctgccactgtctaggagcgcttcgcagacaaagctccgttcacctggagtcctattcctgcaatttggggaagagactcgccgggtccacattacccacgaggtcagcagtctggacacgcttcacgctctgatcgcacacatgtttccacagaaacttacaatgggtatgctgaaaagcccaaatacagctatcttaatcaaggatgaggcccggaatgtgttttatgagcttgaggacgttcgggatatccaggaccggagtatcataaaaatttaccgcaaagaacctctgtatgcagcattccccggaagccacctgacgaatggagatctgcgccgggaaatggtttacgccagcagagagagcagcccaacacggcgcctcaataatttgagtccggcccctcacctggctagcgggtcccccccaccagggttgccttctggcctcccatctggactccaatctggcagcccgagtcgaagtcgcctgtcctacgcaggcggtcgtcctccctcctacgctggttctcctgtccatcatgcagccgaaaggttgggaggggcacctgcagcccagggggtgtccccctcaccttccgcaatattagagcggcgcgatgtgaaacccgacgaggacttggccagcaaggcaggaggcatggtactggttaagggcgagggcttatacgccgatccctacggccttctccacgaggggcgcctgtctcttgccgcagcggccggcgacccctttgcttatcctggcgcagggggattatataaacggggctccgtccgctctttaagcacctacagcgctgccgctctgcagtctgatctggaagattctctgtacaaagccgcgggcgggggtggaccactgtatggcgatgggtatggttttcgcctgccccctagcagcccccagaagctggcagatgtggccgccccccccggcgggccccctcctcctcactcaccttactcagggccaccctcccgcggctctcccgtgaggcagtcctttcgaaaagattctggaagcagttccgtcttcgcagaatcccctggcgggaaaaccagatccgctggcagcgcatctaccgccggagcaccccctagtgaactattcccaggcccaggcgaacgatctctcgtaggattcggcccccctgtgcctgctaaggatactgagaccagagagcgcatggaggcaatggaaaagcagattgcctcccttaccggactggtgcagagcgcgctgctgaggggctctgaaccagaaacaccgtctgaaaaaatcgagggtagcaatggtgccgctacaccaagtgccccctgtgggtcaggaggtagaagctccggggcgactccggtgtctggacccccacctccgagcgccagttcaactcccgcaggtcagccaactgccgtaagccggctacagatgcagcttcaccttaggggcctgcagaactccgccagtgatctgcgcgggcagcttcagcagctacgaaaactgcagctgcaaaatcaagagtcggtcagggcactgcttaagagaacagaggccgagttgagcatgcgcgtgtcagaggctgcccggagacaggaggaccctcttcaacggcagaggactctggttgaagaggagagactaagatatttgaacgacgaagaactgataacccagcagcttaacgatctcgagaaaagcgttgagaagattcagcgagatgtctcccataaccatcggctcgtgccaggcccggagttggaggaaaaagcattggtccttaagcagctgggagagactctgaccgaactgaaggcccacttccccggactgcaatcaaagatgagagtggtcctgagggttgaagttgaagcagtcaaattcctgaaagaggagccacagagactcgatggtctgctcaaaaggtgccggggagtgactgacacgcttgcccagatccggcgccaggtggacgagggtgtgtggccaccaccaaataacctgctgtcccagtcccccaaaaaggtgacagccgaaaccgactttaacaaatcagtcgatttcgagatgccccctcccagccctccactgaatttacacgagctctccgggccagccgagggggctagtctgactcccaagggaggcaatcccacaaaggggctggacacacccggcaagcgctccgtggataaggcagtttccgtcgaagctgccgagcgtgattgggaagagaagagagccgccctgactcagtactcggccaaagatataaataggctgctagaagagacccaagcagagctcctcaaggccatcccggacctagactgtgcttctaaagcgcaccccggccccgcccccacccccgaccacaaaccccctaaggctccccatggccagaaagcggcacctcgtacggagccttcaggccgaagggggagcgacgagttgacagtgccccgttaccgcacagagaagccgtcgaagtcccctccacctcccccacctaggaggtcattcccttcttcacatgggttgaccacgacccggaccggtgaggtagttgttacctccaagaaggatagcgccttcattaagaaggccgaaagcgaggagttggaggtgcagaagcctcaggtgaagctgagacgtgccgttagcgaagttgctaggccggcttccacccctccgattatggcatctgccattaaagatgaggacgacgaggaccgcatcatagccgagctcgagagtgggggcgggagcgtgccccctatgaaggtggtgacacccggtgccagcaggctgaaagcagctcagggtcaggccggaagtccagataagtcaaaacatggcaaacagcgggcggagtacatgcgcatacaggcacagcagcaggctacaaagccctccaaggagatgagcggatccaatgagacgtccagcccggtgtccgagaagccctcagctagtcgaacatctatcccagtcttaactagcttcggggcgagaaactcctccatcagtttttag

SEQ ID NO: 218610 - DNA, 3108 bp, Artificial Sequence
  derived and/or modified sequence
atgagcgaggccgagctgcccctgggcttcagccggatgaaccggttccgccagtccctgcctctcagtcgtagtgcctcacagacaaagctgcgcagccccggcgtcctgttcctacaatttggggaggagacacggagagttcatatcacacacgaggttagctctcttgacacactgcacgcccttattgctcacatgtttccacagaagctcactatgggaatgctgaaaagccccaatactgcaattctgatcaaggatgaagcccgaaacgtgttctacgagctggaggatgttcgggatatccaggataggtcaatcattaagatctaccgcaaagaacccttgtatgccgctttcccaggtagccatctcacaaatggggacttgcgccgcgaaatggtttatgcctccagagagtccagtcctacccggagacttaataacctgtctcctgcccctcatctcgcttcggggagccctcctcccggccttccatctgggttgccatcgggcttgcagagcggttcacctagtcgctcccgtctatcttacgctgggggccggcctccttcctatgccgggtcccctgtacaccacgccgctgagcggcttggtggcgctcccgccgcccagggggtgtctccatccccgagcgccattttagaaaggcgagatgtaaagccagacgaagacctggcttcaaaagccggtggaatggtcttagtgaaaggtgaggggctctatgccgacccatacggacttctacatgaaggccggctctccctcgccgctgccgctggtgatcccttcgcatacccaggggccggaggattgtacaagagaggatccgtccgttcattgagcacttactcagccgccgcgttgcaaagcgatcttgaggacagtttgtacaaagctgcagggggcgggggccccctgtacggggacggctatggcttccggctaccgcctagtagccctcagaaactggcggatgtcgccgcgcccccaggcggtcccccgcctccccacagtccatactctggtccaccctctcgcggatcaccagtgaggcaatcgttccgcaaagattccggctcttccagtgtattcgcagaatctcccggtggcaagacccgttccgctggtagtgcctcaaccgcaggtgcacctccaagcgaactctttcccggacccggggaacggagcctggtgggcttcggtccacccgtccccgcgaaggacacggagaccagggagcgcatggaggcaatggagaaacaaattgcctccctcaccggactcgtccaatcggctcttctgcgtggaagtgagcccgagaccccttccgaaaaaatagagggttccaatggagctgccaccccttccgccccctgcggaagtggcgggcgatcctccggcgctacccctgtgagcggtccacccccaccatcggcgtcatccactcctgctggacagccaactgcggtgagtcgtcttcagatgcagcttcacctgcggggtctgcagaactcagcatccgacctgcgggggcagctccaacaattgcggaagcttcaactgcagaatcaagagagcgtcagagcactgctcaagcgcacagaggccgaactgtcaatgagagtaagcgaagccgctcgcagacaggaggacccactgcaacggcagagaacactagtggaggaagaacgactccggtacctgaacgacgaggaactcattactcaacagctgaacgacctggagaagtccgttgagaagatacagcgcgatgtgagccacaaccatcgtctggtgcctggccctgagcttgaagagaaggctctcgtgttgaaacaactgggtgaaacgttgaccgaactgaaggcacatttccccggccttcagagcaagatgcgcgtggttctaagagttgaagttgaggccgtaaaattcctcaaggaggagcctcagaggctcgacggcctgctaaagcgttgcaggggcgtcactgacactcttgctcagatcaggcgtcaagtggatgagggagtgtggcccccacccaataaccttctgtcacagtcaccaaaaaaggtgactgctgaaacggacttcaacaaatctgtggacttcgaaatgcctcctccaagcccgcccctcaatctacatgagctgtccggacccgcagaaggggccagcctcacacctaagggaggtaaccctaccaagggtcttgacaccccaggcaagcgaagcgtggataaagccgtcagcgttgaggcagcggagcgagactgggaagagaaaagggctgcactcacacaatattccgccaaagatataaatagactcctggaagagactcaggccgagctgctgaaggccatacccgacctcgactgtgctagcaaagcccatccaggcccagcccctactccggatcataaaccccccaaggcgccccatggacagaaggcggctccacggacagagccatccgggcgtaggggttccgatgaattgacagttcctcgctatagaaccgagaagccttccaagagtcctccaccaccacccccaagacgctccttcccatccagccatggacttacaactacccgcactggggaggtggtggtgaccagcaaaaaggattccgcatttattaaaaaggccgagtcagaggaactggaagtccagaagcctcaggtgaagctgaggcgggcggtttctgaggtagccaggccagccagcaccccgcctatcatggcctctgctatcaaagatgaagatgatgaggaccgtatcatcgcagagctagaggtgttcgagcgaagcagtgtatcttccctgcccccaaccccccggcgtcagctgattccgacactcctgagccctcaggacctcggcccccccggtggctccgcccctggacctaccagaaaatctgggggaggcagcgtgccccccatgaaggtggtaactccaggggccagccgtttgaaagctgctcaggggcaagccgggagccccgacaagtcaaaacacgggaagcaaagggccgagtatatgcgcattcaagcacaacaacaggtttag

SEQ ID NO: 218611 - DNA, 2766 bp, Artificial Sequence
  derived and/or modified sequence
atgggcatgctgaagagccccaacaccgccatcctgatcaaggacgaagcccggaatgttttctatgaactcgaggatgttcgtgacattcaagatagatcaatcataaaaatctacagaaaagagccattatatgccgcctttcccgggtcccatctgaccaacggcgatctgcggcgagaaatggtatacgcaagtagagaatctagtcctactcggagattgaataacctatcccccgctccccacctggcttctggctcccctccgcctggtctgccctcaggactgcccagcggacttcagagtggatctccttcacggagtagactgagctacgcagggggaagaccgccatcttacgccggctcgcctgtgcaccatgccgccgagcgcttgggcggtgctcctgccgctcagggcgtgtcccctagtcctagtgctatcctggagaggagagacgtgaaacccgacgaagatctggcatctaaggctggaggaatggtgttggtaaagggcgaggggctatatgccgatccctacgggcttctccacgagggtcggctgtcccttgccgccgccgctggggatcctttcgcctatccaggtgcaggaggattatacaaacgggggagtgtgaggtccctcagcacctattcagcagcggctctccaaagtgatcttgaggattctctctataaggcggccggcggaggaggaccgctgtatggagacggttacggctttcgcctcccccccagctcacctcagaaacttgcagatgtggcagcccctcccggaggacctccccccccccactctccatactctggacctccatctcggggaagtcctgtacggcagtcgttcaggaaagatagcggcagcagctcagtgttcgctgaatctcccggcggcaagaccaggagcgccggctcggcgtctacagcaggagccccccccagcgagctgttccccggacctggtgagcggagtcttgtcgggtttgggccaccagttcctgcaaaggacaccgaaacccgtgagagaatggaggctatggaaaagcaaatcgcctctcttactggcctagttcagtctgcgctgctccgagggagtgagccagagacacctagcgagaagatagaaggcagcaatggagccgccaccccctctgcaccatgcggaagcggaggcagatcgagtggagcaacccccgtttccggtccacccccaccaagcgcgtcatccacaccagctggccaacccaccgccgttagtcggctgcaaatgcagctccacttgcgggggctccaaaactctgctagtgacttgaggggacaactgcagcagctcagaaaacttcagctgcagaatcaggaatccgtgcgtgcccttttaaaacgcactgaggctgagctgtcaatgagagtgtcagaggctgcgcggcgccaagaggatcctctacaacggcagcggactttggtggaggaagagcggcttcggtacctgaatgacgaggagctgattacccaacagttgaatgaccttgaaaagagcgtcgagaagatacagcgagatgtttcccacaatcatcgactggtgcccggtccagagctagaggagaaggccctcgtcttgaagcagttaggggagacactgaccgaacttaaggctcattttccaggactgcaaagtaaaatgcgtgtcgtgttacgggtcgaggtggaggcagtgaagtttttaaaggaggagccgcagaggctggacggcctgctgaagagatgccggggggtcactgacactctggctcagatccggagacaagtggatgagggggtatggccccccccaaataatctgttgagccagagccctaagaaagtaaccgcggagactgactttaataaaagcgtggatttcgaaatgccacctccaagcccaccgctgaatttacacgagctttctggccccgccgagggagccagcctgaccccaaaagggggtaatcctaccaagggcctggacacccctggaaaacgttcagttgacaaagctgtgagcgtggaggcagcggagagggactgggaagaaaaacgtgccgcgctcacacagtattccgctaaagacatcaaccggttgctggaggagacacaagctgaactcttaaaggcgatcccagacctggattgcgcgagcaaggcacatcccggccccgcccctacaccagatcacaagcccccaaaggcacctcatgggcaaaaagctgcacctagaaccgagccttctggccggcgcggttccgacgaactgaccgtgcctcgatacaggacagaaaagccttccaagtctcctccacctccccctcctcgccggtccttcccgagctcccacggactcaccactaccaggacaggagaagtggtagttacttccaaaaaggattctgccttcataaagaaggctgaatccgaagaacttgaggtacagaagcctcaagtgaaactaaggcgtgcagtgtctgaggtagcacgcccagcgagcaccccgcctataatggcttccgccattaaggatgaggacgatgaggaccgcattattgcagagctggagagtggggggggatctgtccctcccatgaaggtggtcacccctggcgcctcccggctgaaggccgcacaaggtcaagcaggctctccggataagtcgaagcatgggaagcaacgagccgaatatatgagaattcaggcccaacaacaggtttag

SEQ ID NO: 218612 - DNA, 3552 bp, Artificial Sequence
  derived and/or modified sequence
atgggtaatgccccaagtcaggatcccgaacgctcctcccctcccatgttgtccgccgatgacgccgaatatccgcgagaataccgcacgttgggagggggaggcggagggggttcaggcggacgtagattttctaatgtggggctggtgcacactagcgagagacgacataccgtaatcgccgctcagtctttagaggctctgtcaggactgcagaaggccgacgcagacaggaagcgggatgcgtttatggaccatctgaaatccaagtatccccagcatgccctggcactccgaggccaacaggaccgaatgcgggagcagccaaactactggtcatttaagaccagatccagtcgtcacacacaaggcgctcaacccggactagccgatcaagcagccaaactgtcatatgcttcagcagagagcctggagacgatgagcgaggcagagcttccactgggcttttcccgcatgaatcggttcagacagagtctgcccttgagccgaagcgcctcacagaccaaactgcggtctcctggagtcctgttcctccagtttggtgaggagacgagacgggtgcatattacccacgaggtatccagtctggacactctacatgcactgattgcgcacatgttcccgcaaaagttgaccatgggcatgctgaagtctccgaatacagccatactgattaaggatgaggcaaggaatgtgttttatgaacttgaagacgttcgcgacatccaggacagatcaataattaaaatataccgcaaagaacccttatatgcggcttttcctggttctcacctgactaatggggatctgaggcgcgaaatggtatatgccagtagggagagtagccctacccggagactcaataacttatcccccgcaccacatctcgcgagcgggtctccccctcccggactgccctctggcctgccatccggattacagagcggaagtccttcacgctctcgcctgtcatacgctggcggtcgaccaccttcctatgcgggatcgcccgtacatcatgctgctgaaaggcttggaggggcacccgcagcccagggagtgtccccctccccatccgccattttggagagaagggacgtgaaaccggacgaggatttggcctcaaaggccggaggcatggtgcttgtgaagggcgaaggcctatacgcagacccctacgggctgcttcacgaaggccgactgagtctggccgcagcggctggcgatcccttcgcttaccctggggcaggtggcctgtacaaaagaggcagtgtgcgcagtctcagtacgtattctgcagccgcactacaatcagaccttgaagactcactgtacaaagcggctgggggaggaggacctttgtacggcgatggctacgggttccggctcccaccatccagtccacagaagctggcggacgtggccgctccacccggagggcctcctccgcctcatagcccttacagcgggcctccgtcccgagggtcacccgtccgccagagtttccgcaaggattcaggcagtagcagcgtgttcgccgaaagccccggtggaaagacacgctccgccggatccgcatcaacggctggcgctcccccttcagagctgttccccggacctggcgagcggtcgctcgtggggttcggtccccctgttccagctaaggacaccgaaacccgcgaacggatggaggccatggagaagcagatcgcctcactgactgggctggttcagtcagcacttctgcgcggatcagaacccgaaacccctagcgaaaagatcgaaggctcgaacggagccgctaccccttcagcaccatgcggatctggtgggcgatcatctggtgccactcctgttagcggaccaccgccaccgagtgctagctccacaccagccggtcagcctaccgcagtatcccgattgcagatgcagcttcacctacgcggtctgcagaactcagcctctgacctgcgcggacagcttcagcaactgcgaaagcttcagctgcagaaccaagagtcagtgcgcgcactcctgaagcgcaccgaggctgagctctctatgagagtttcagaagccgctcggcgtcaggaggatcccctccaaagacaacgaacgctggttgaagaagaacgattgagatatctgaatgacgaagaactcattacccagcaactgaacgacctggagaaatccgtggagaagattcaaagggatgtgtcacacaaccatcggttagtaccagggcctgagctggaggaaaaggctcttgtgttgaagcagctcggagagactcttacagaattaaaggcccatttccccggactgcagagcaaaatgagagtggttcttcgagttgaggttgaagctgttaaattcttgaaggaggaacctcaacgcctagatggactgctgaaacggtgccgtggggtaacagacactttagcccagattcgtcgtcaggttgatgagggcgtgtggcctccgcctaataatcttctcagccagagtccaaagaaggtcaccgctgagacagatttcaacaagagtgtcgatttcgagatgccacccccttcgccgcctttgaacctccacgaactgagcggccctgcagagggcgcttcgttgacacccaagggcggaaacccgaccaagggccttgatacacctgggaagcgatcagtggacaaagccgtcagcgtcgaagccgcagagcgcgattgggaagaaaagcgtgccgctctcactcagtactctgctaaagacatcaacagactcttagaggaaacacaggcagaactcctgaaagctattcctgacttagactgtgcctcaaaagcccaccccggaccagcccctactcccgatcacaagcctcccaaagcaccacatggccagaaggccgctcctcggaccgaacctagcggccgacggggaagcgatgaattgactgtgccgaggtaccggaccgaaaagccaagtaagtcccccccacccccaccccctcgccgatcctttccaagttctcacggactgactaccacccggacaggcgaggttgtggtgacttccaagaaagactccgcatttataaaaaaggctgaaagcgaggaattagaagtgcagaaacctcaggtcaagcttagacgggctgtaagcgaagtcgcacgacctgcgtcgacccccccaataatggctagtgcaatcaaggatgaagacgatgaggatcgcattatcgcagaactggaaagcggaggtggctcagtaccccctatgaaagtggttactcccggagcatcccgacttaaggcagctcagggacaggcaggatcaccagacaagtcaaaacatggcaaacagcgagccgaatacatgcgtatccaggctcagcagcaagccacaaaaccatctaaggaaatgagcgggagtaatgagacctcttccccagtctccgaaaaaccttctgccagccgcacatccataccagtcttaactagttttggcgctaggaactcctcgatcagcttttag

SEQ ID NO: 218613 - DNA, 3108 bp, Artificial Sequence
  derived and/or modified sequence
atgtccgaagccgaactcccgctcggattttcacgcatgaacagattccgtcagtctctgcctctaagtcggtccgcatcacagacaaagctaaggagtccaggggttctgttcttacagttcggcgaagaaacccgtagggtgcatatcacccatgaggtgtcatccttagacaccctgcatgcactgatagcacacatgtttcctcaaaagctcactatggggatgctcaagtcaccaaatacagccatcctgattaaagatgaagctcggaacgttttctatgagctcgaagatgttagagacattcaggaccggagtataatcaagatctaccggaaggagccactttatgcggcatttccaggaagtcacctgacaaatggcgatttgaggcgggaaatggtctatgcctctcgagagtcgagcccaacacgaagactcaataaccttagcccagctccccatctggctagcgggtcccctccaccaggcctgcccagcgggttgccctcagggctgcagagcggatccccaagcagatcccgactcagttatgccggaggtcgcccaccatcctacgccggatccccagtacatcacgctgcagagagacttggtggcgcacccgcagctcagggcgtttctccgagcccaagtgcaatactggagcgacgcgatgtgaagcccgatgaagacctcgcctcaaaggctgggggtatggtgttggtgaagggagaaggcctctacgcagatccatatggacttctgcatgaggggaggctgtcactggcagccgcagccggtgatccctttgcataccctggggctggaggcctatacaagaggggctctgtgcgaagtctttcaacttactcagctgccgcactgcagtccgacctagaagattccctctacaaggcggctggcggaggtggcccactttacggagacggctacggattcagattaccccctagcagtccacaaaaactggctgatgtggcggctccccctggtggtccccctccacctcacagtccttatagcggtcccccaagccgcggatccccagttcgccaatcgtttcggaaggactccggcagctcaagcgtttttgctgagtcccctggcggaaagacccggtccgctggctctgcatcaaccgccggagccccaccgtccgaactctttcctggccctggggaaaggtcactcgtgggatttgggcctccggtgcctgcaaaggatactgagacacgggaaaggatggaagctatggaaaagcagatagcgtctctcacgggactcgtccaaagcgcactgttaagggggtctgagcctgaaacgccctctgaaaaaatagaaggctccaatggagctgccacaccctcagccccttgtggctcggggggtaggtccagtggtgccacccctgtgagtggaccccctcctccctccgccagctctactcctgccggtcaaccaacggccgtgtctaggttgcaaatgcagctgcacctgcggggtctccagaatagcgcatccgacctgcgaggacagctgcaacaactccgaaaactgcagctgcagaatcaagaatcagtgcgcgcactgctcaagaggaccgaagctgagctgagcatgagggtgtctgaagctgcccgtagacaggaagatccactgcagcggcaaaggacactggttgaagaggaaagactgagatacctcaatgatgaggagttgataacacagcagcttaacgacctcgagaagtctgtggagaagattcaacgggatgttagtcataaccatagactggttccaggccctgagctggaagaaaaggctctggttttgaagcaactcggagagacactgacggagttgaaggcccattttccgggtttacagtctaagatgcgcgtcgtcctgcgagtcgaggtagaagcagtaaagttcctaaaggaagaaccccagaggctggatgggctcctcaagagatgtcggggagtaaccgacacactggcccagattagacgccaggttgatgagggtgtgtggccaccacccaacaacctcctctcccagtctccaaagaaagttaccgcagaaacagactttaataaatcggtggactttgaaatgccgccaccttctccgccacttaacctccatgagctcagcgggcctgccgaaggcgcatccctgacaccaaaggggggtaatcccactaagggtctggatacccctggtaagcgctctgtcgataaagctgtctctgtcgaggccgctgagcgcgattgggaggagaaacgagctgctctgactcagtacagcgcaaaagacattaatcggctgcttgaggaaacgcaagcggaacttctgaaggcgatacctgacctcgattgtgcaagcaaggcccatcccggaccagcccctacacctgatcataaacccccaaaggccccacatggccagaaggctgcgcctagaacggaacctagcggtcgtcgagggtctgatgagttgaccgtacctcgctatcgcacagaaaagccttcaaagtccccaccaccaccacctccgaggcggagctttccttcttcacacggccttacaactacccggacgggggaagtggttgtgacgagcaagaaggatagcgcctttatcaagaaggctgagtctgaagaattggaggtacagaagccccaggtgaagttgagaagggccgtcagtgaagttgcgagacctgcttccactccccctatcatggccagtgctattaaagacgaggacgatgaagatcggatcattgccgaactcgaggtgtttgaaaggtccagtgtatcaagcctgcctcccacacctcggaggcagctcatacctacattactgagcccgcaggacctcggcccacccggaggaagcgcccctggcccaaccaggaaatccgggggaggatccgttccgcctatgaaagtcgtcaccccgggtgcctctagactgaaagcagcccagggccaagccggaagccccgacaagtccaagcacgggaaacaaagagccgagtatatgcggattcaggcccagcagcaggtttag

SEQ ID NO: 218614 - DNA, 2766 bp, Artificial Sequence
  derived and/or modified sequence
atggggatgttaaagtcgccaaacacggcaatcttgatcaaggatgaggccaggaacgtattctacgagctcgaagacgtaagagacatacaggacaggagcatcataaagatatatcgaaaagaacccctgtacgcagcgtttcccggtagtcacctgactaatggagaccttcgccgagaaatggtgtatgccagccgcgagtcttcccctaccaggcgcttgaataacctgtctccagcaccacaccttgcttctggctccccacctcccggactcccgtccgggctcccgagcggcttgcagtctggatccccctctaggagccgcttgtcttatgccggagggcgtcctccttcctacgctggcagccccgtccaccacgcagcagagcgtctgggcggtgcgcctgctgctcagggagtatcgccatctccaagcgccatactagagagacgcgatgtgaaaccagacgaagatcttgcgtccaaagctggcggaatggtgctggtgaagggcgagggcctctacgccgacccatacggcctcctgcacgaaggacggctttctctggcagctgccgctggagatccctttgcctaccccggagctgggggtctgtataaacggggatctgttcggagcctctcaacctacagcgctgccgctctgcagagcgacctggaagactccttatacaaagccgctgggggtgggggaccattatatggcgatggctacgggtttcgcttacccccatcatcacctcagaagctcgctgacgttgccgctcctcctggcggaccccctcccccacattctccctattccggtccacccagtcgcggaagcccagtgaggcagtctttcaggaaagactccgggagttcctcagtcttcgctgagtctcccggagggaagacacggtccgctggaagcgcatcaacagccggagcccctccttccgagctttttccgggacccggagagagatctttggtcggcttcggacctcctgtcccagcgaaggacactgagaccagagagcggatggaagcaatggaaaagcagattgcatcacttaccggactggtccagagcgccctcctcagaggcagcgagcccgagaccccctcagaaaaaatcgagggatctaatggggctgcaacaccttcggccccatgtggctccggaggaaggtcctccggggctaccccagtgtccggtccgccaccgccaagcgcctcctctacacccgctggtcaacccaccgccgtatcacgcctccagatgcagctccatctgaggggactgcaaaattcagcatctgatctacgaggccagctgcagcagctgcggaaactgcagcttcaaaaccaggagtctgttagggccttacttaaaaggacggaggctgagctcagtatgcgggtaagtgaagctgctagacgacaggaggatccactgcagaggcagcggacattagttgaagaagaacggcttcggtatttgaacgatgaagaactcattacccagcagttgaacgatctggagaagagtgtagagaagattcagcgggacgtcagccataatcaccggcttgttccaggaccagaactcgaagaaaaggctttggttctgaagcagttaggagagactctcactgaactcaaggcccattttcctggcttacagtcaaaaatgcgcgtggtgctgcgagtcgaggttgaggccgttaaatttctcaaagaagaaccacaacgattagacggactacttaagcgttgccgaggtgttacagatactcttgcgcaaatcaggcgccaagtcgatgaaggagtgtggccaccacccaacaatctgctgtctcaatctcccaagaaggtgacagcggagacagactttaataaaagtgtcgacttcgagatgcctcctccaagcccaccccttaacctccatgaactgtcaggccctgctgagggcgcaagcctgacaccgaaagggggaaaccccaccaaaggcctagatacgccaggtaaacggagtgtggacaaagcagtttctgtcgaagcagcagaacgagattgggaggaaaagcgtgccgcactgactcaatactctgctaaagacattaatcggctgctggaggagactcaagccgagcttctaaaggccattcccgacctcgactgtgcctccaaggctcatcccggtcccgctcccactcctgatcataagcccccaaaggctccccacgggcagaaggccgcacccagaacggagccatcaggtcgcagaggatccgatgagttaaccgtgcctaggtaccgaaccgagaagccatctaaaagccctccgcctcctcctcctcgcagatccttccccagcagccacggtctgactactaccagaaccggggaagtggtagtgacatccaaaaaggattcagccttcatcaaaaaggcagaaagcgaggaacttgaagtccagaaaccacaggtgaagcttagacgcgctgtcagcgaagtggcacggcctgcatccacacccccaataatggcttcggctatcaaagatgaggatgacgaagaccgtataatcgcagagctcgagtccggcggtggtagcgtgccacctatgaaggtggtcactccaggggcttctaggctcaaggccgctcagggccaagccggatcccctgataagagtaaacacgggaagcaaagagccgagtatatgcggatccaggcccagcagcaggtgtag

SEQ ID NO: 218615 - DNA, 7050 bp, Artificial Sequence
  derived and/or modified sequence
acactcgctctcgcacactcggtgacacgcccgcgcgcgcgctcacccacacgcccggccgccggcgccctcccagctggtccaccccggcggggcccgcgcccccggcccgcccgcctggcaccgcgccccggggctggggccgagcgaggagcccgcgaggcggcgagagggcgagcgccaggcaggccggcccggggcccccgccccccgcgcccccgcccgatggggaacgctccgtcccaagatccggagcggagcagcccccccatgctgtctgcggacgatgcggagtacccgcgggagtaccggaccctggggggcgggggcggcgggggcagcgggggccggcgcttctccaacgtggggctggtgcacacgtccgagcggcggcacacggtgatcgcggcccagagtctggaggcgctcagcgggctccagaaggcggacgccgaccgcaagcgtgatgccttcatggaccacctgaagagcaagtacccacagcacgccctggccctgcgaggccagcaggacaggatgcgagagcagccaaactactggagtttcaagacccgcagctcacgccacactcagggagcccagcccgggctggcagaccaggcggcaaagctgtcctacgcctccgccgagtcgctggagaccatgtcggaggccgagctgcccctgggcttcagcaggatgaaccgcttccgacagagcctgcctctctcccgctcggccagccagaccaagctgcgctccccaggggtgctgttcctgcagttcggggaggagactcggcgcgtgcacatcacgcacgaggtcagcagcctggacacgctgcacgcactcatcgcgcacatgttcccgcagaagctcaccatgggcatgcttaagtcgcccaataccgccatcctcatcaaagacgaggctcgcaacgtcttctacgagctggaggacgtccgggacatccaggaccgcagtattatcaagatctacagaaaggagcccctctacgctgccttccctggctcacatctcaccaacggggacctccggagagagatggtgtacgcatcgcgggagtcctcgcccacgcggcgcctcaacaacctgtcaccagcgccgcacctggcatccggctcgccgccgcccgggctgccgtcggggctgccgtccgggctgcagtccggttcgccgtcgcgttcgcgcctatcgtacgccggggggcgcccgccttcgtacgccggcagcccggtgcaccacgcggccgagaggctgggaggcgccccggccgcccagggcgtcagccccagccccagcgccatcctggagcggcgcgacgtgaagccggacgaggacctggcgagcaaggcgggcggcatggtgctggtgaaaggcgagggcctctatgctgacccctacgggctgctgcacgagggccgtctgagcctggccgcggccgccggcgacccgttcgcctacccgggcgccggcggcctctacaagcgcggctcggtgcgctcgctcagcacctactcggccgccgcgctgcagtccgatctggaggactccctgtacaaggcggcgggcggcggcggcccgctgtacggcgacggctacggcttccgcctgccgccttcgtcaccgcagaagctggccgacgtggcagcaccccccggaggtcccccgccaccgcacagcccctactcggggccgcccagccgcggctcgccagtgcgccagtccttccgcaaggactcgggctcctcgtccgtctttgccgagagtcctggagggaagacccgcagcgcggggagcgcctcgacggccggagctcccccttcggagctcttccctgggcctggggaacgctcgctggttgggttcgggccgccagtgccagccaaggacacggagaccagggagcgcatggaggccatggagaagcagattgccagcctcacaggcctggtgcagagcgccttactgcgaggctctgagcctgagacccccagcgagaagattgaaggctccaatggagcagccaccccctcagcaccctgtgggtcaggcggccggagcagcggggccaccccggtgtccggcccgcccccgccctcggccagcagcacccccgcaggtcagcctaccgccgttagccggctgcagatgcagcttcacctgcgaggcctgcagaacagcgccagtgacttgcgcggccagctccagcagttgcgcaagctccagctacagaaccaggagtcggtgcgcgcgctgctgaagcgcacggaggcagagctgagcatgcgcgtgtcggaggcggcgcggcggcaggaggacccgctgcagcggcagcgcaccctggtggaagaggaacggctgcgctatctcaacgacgaggagcttattacccagcagctcaatgacctggagaaatcggtggagaagatccagagagacgtgtcccacaaccaccggctggtgcccggccctgagctggaggagaaggcactggtgctgaagcagctcggggagacgctgacagagctcaaggctcacttcccgggcctgcagagcaagatgcgggtggtgctgcgcgtggaggtggaggcggtgaagttcctgaaggaggagccccagcgcctggatgggctcctcaagcgctgccgcggggtcacggacacgctggcccagatccgaaggcaagtggatgagggtgtgtggccaccccccaacaatctcctgagtcagtcccccaagaaggtgacggcagagactgacttcaacaagagcgtggacttcgaaatgccaccccccagccccccgctgaacctgcatgagctgagcgggccagctgaaggagcctctcttacccccaaggggggcaaccccaccaaaggcctggacactcctggcaagagaagcgtggacaaagctgtgtctgttgaggctgcagagcgagactgggaggagaagcgggcagccctgacccagtacagtgccaaggacatcaaccggctgctggaagagacacaggcagagctgctcaaggccatccctgacctggactgtgccagcaaggcccatccaggcccggcccccactccagatcacaagccccccaaggccccccacggccagaaggcagccccccgaacggagcccagtgggaggaggggctcagatgagttgaccgtgccccgataccgcacagagaagccctccaagtcgcccccaccgccccctccccgccggagcttcccctcctcccatggcctgaccaccacacgtaccggagaggtggtggtcaccagcaagaaggactcggccttcatcaagaaggctgagtccgaggagctggaggtgcagaagccccaggtgaagctgcgccgggctgtgtctgaggtggcccgcccagcctccacaccacccatcatggcctcggccatcaaggacgaggatgacgaggatcgcatcatcgcagagctagagagtggcggaggcagtgtaccacccatgaaggtggtgactccgggggcctctcggctgaaggcggcccagggccaggcgggcagccccgacaaaagcaaacatggcaagcagagggccgagtacatgcggatccaggcccagcagcaggccactaaaccatctaaagagatgagcgggtcgaatgagacctcgagcccagtctcagaaaagccctcggcttccagaacctctatccctgtattgacttcctttggggcaaggaattcttccatctccttctagaagcccctcaccccgctgccccgcctgtccccctccctcactcctgccatttctcccctctcttccttcatctccaccccaccccaccctactctccagacgccctgaggggtgtgccctgaagaggagggtgcggccctcctcagcgacccctacccatcatctgttggtgtttttggttttgtttttttttttttttttaacaattaacttttaattatctttttttaaacagtaaaactaaaaaccaaacacaccaccttccttgatcccagctggcctctcgctggccgcacctgtcacatctctccttcttctctttcaccactctttcccccagtccatcctgaagctcctgcacccccttcccgccttcccctcacttcccaagaatactccaaacaaactctgaaccacggagacttggagcagtgggagacccctctcccgtttctcgataccttcctggaggaacgcggggacatcggaccaacccatacatcaagccagagagcggggcttagggagactggccttggagatgccccactccctgtctaagctccgacaagactgtgacttcctctgtggctgctctgcctcctcccactcacacccaagtgggcctggagtagagacggacaggctggagacgaggccggagtttgagaggcctcagggtgggtgtgaggccatggagtctgtatccctggggaggcgctggcctcctgggccttgccgtccagtggggagtggagggcagaggccctttggtctgctggctgtggagggtgggttgcacggacagccggatatcggggacactgccttgggagagggcggcccggacgggtatttggtacttttagtttcctgatttagcactttaaatggcattaacttattgaatggggatggggtgggcaagagtgaggggcctagaaaaccaggttttgtggcttgcagttgggggaagggtctggtttgagggaaatgggagggtcgagaggggcttgacggggagcactgaagacacctgggacccgcaggtggggtgacttgaacttcagtcatcctcttggcaatttgagggttttcccaggaaaggatgagacgtagtttttcaatggggctctggtgaccctggtgagatgtctgaaggtccctgaggcctgaccatccagccagcgcccctggcctgtggacgccctgcctgccctgcagaggcggttggcagtgccgcctggcttttggccgggtcctggggaggcagagagaggccaattttggttctcactcctggccccccagagggcacagtgaggagccggtagggagaggataggagaagaggaggaggaggagcggggtccccggccgcaggattcccacttggagcacaaagtgaagtaagcacaggggagggggactagaatcagtcccccatagcaagcacagaaaggaggagctgcgcagaaggcagagccccccagaccctggggcctggctggggaaggtccgcacctggggagagctgggagctgttgaaggtttggggggaggggaaacgggttgtgtttcttcatttctttttttgtttttgcctttgttggttcatccttgttttctagctttggatcatttttgtaccaaggcgagcaagcctttttgaaaaataacaaaagaggaaaaaaaaaatccctcctggaaaaaaaaaaaaaccctggaaaatagaaaaaaaaaaaaggacctcataaatgatgcaattacttttaattgcaggcaactctttacatttaagtgaagtgtcttaacattttatattgttttaaaaatatatttacatattatatatataatatacgtaatataaatatatataaatatttaaaaaagaaaaaaaaaagaaaaccacggcactctccctggccactgttttggcgggggaggggggctggggggcgggcacgtcggcctggcttctgtggtcccagtgaaatggtctggtttgatttggctgtacagagaccccctgacttgggaggggaggggggagtggtgccccctcctccctccactccattactctctgcttgctacttcgcttgcccccagctcccaccctcagccctgtgactggaatgtgtgccccaccgtcattgtcctgagttgaatgtccctttgtgggggaggtggggggggcagtgtccatccacgaaggggcagaaggagggagccacgtgccccgccccacccgctcgggtgaagcccagtgggatttgcatctttctttctctttggttcctgcacatttatgggctgggaggcatccgtgtggaattgcgtgcagcctgtgtgtgtgctggcacaagcccatgcactgtgtgtgcagacgcatggggcctgcacccacaggcatggccgagcacatgtgtgggggaaggcgtgggcacataggtgcatgtaacctgtttgggcattggcacgtgcctacctgcatgttagcgtgagaggagctttgtgtgtgagaacatgtgtaatgtgtgtgcagacatgccgagagccagagacttgtgtgtgggccacgtacatgtggatagagacgcatacatggaggtgcatgtaatctgtgtctccgagtgtgtgtgtgcaggtatgtgtgctggtgcagacccaagtgtgtgggtgtgcctctgtgtgcgtgtgttccatcatccctgcaccactggctccagatcccttcctgagcccccgtccccgctggccctctcacagcctgcagcacatcagtgcccccagctgcatgcgcctcgctgctctgtccatcagtgtgtgcttgaccaagagaaaactaagacgtctcgggggacccctgtacctggtcctctcagcccccgcccactgtgctgtgttactcgcatgggggatttcctgccccttccacaatatgctgtttccccaggagcctcaggcctgaggctctgagtggggtccccagggggccccccggggtgagccccggctccacaccctgccccatccaccctgtagggcccatgttggtgtagcagtgatggcttctgtggatattctgtgacctctgtcggtgtaacttgacaatttctaaatggaaaagggttgctgtgttttctctgtctctcttttttaatgtccttttttcttctcccccgctccctgctctctttccttttcagtttttctagccaagtgtttggggctttaataaaacttgtttctttttcctctcctgga

SEQ ID NO: 218616 - DNA, 3653 bp, Artificial Sequence
  derived and/or modified sequence
gcattgcagcaaagggcaccggcggcggcggccgcggctgcggaggcggccgggggagagaagagcccgggcgggtgggagtaggggccctccctccccagccggacgcaggacctggggctggggaccccgcacgtacacctgtggccgcagcagccaaactactggagtttcaagacccgcagctcacgccacactcagggagcccagcccgggctggcagaccaggcggcaaagctgtcctacgcctccgccgagtcgctggagaccatgtcggaggccgagctgcccctgggcttcagcaggatgaaccgcttccgacagagcctgcctctctcccgctcggccagccagaccaagctgcgctccccaggggtgctgttcctgcagttcggggaggagactcggcgcgtgcacatcacgcacgaggtcagcagcctggacacgctgcacgcactcatcgcgcacatgttcccgcagaagctcaccatgggcatgcttaagtcgcccaataccgccatcctcatcaaagacgaggctcgcaacgtcttctacgagctggaggacgtccgggacatccaggaccgcagtattatcaagatctacagaaaggagcccctctacgctgccttccctggctcacatctcaccaacggggacctccggagagagatggtgtacgcatcgcgggagtcctcgcccacgcggcgcctcaacaacctgtcaccagcgccgcacctggcatccggctcgccgccgcccgggctgccgtcggggctgccgtccgggctgcagtccggttcgccgtcgcgttcgcgcctatcgtacgccggggggcgcccgccttcgtacgccggcagcccggtgcaccacgcggccgagaggctgggaggcgccccggccgcccagggcgtcagccccagccccagcgccatcctggagcggcgcgacgtgaagccggacgaggacctggcgagcaaggcgggcggcatggtgctggtgaaaggcgagggcctctatgctgacccctacgggctgctgcacgagggccgtctgagcctggccgcggccgccggcgacccgttcgcctacccgggcgccggcggcctctacaagcgcggctcggtgcgctcgctcagcacctactcggccgccgcgctgcagtccgatctggaggactccctgtacaaggcggcgggcggcggcggcccgctgtacggcgacggctacggcttccgcctgccgccttcgtcaccgcagaagctggccgacgtggcagcaccccccggaggtcccccgccaccgcacagcccctactcggggccgcccagccgcggctcgccagtgcgccagtccttccgcaaggactcgggctcctcgtccgtctttgccgagagtcctggagggaagacccgcagcgcggggagcgcctcgacggccggagctcccccttcggagctcttccctgggcctggggaacgctcgctggttgggttcgggccgccagtgccagccaaggacacggagaccagggagcgcatggaggccatggagaagcagattgccagcctcacaggcctggtgcagagcgccttactgcgaggctctgagcctgagacccccagcgagaagattgaaggctccaatggagcagccaccccctcagcaccctgtgggtcaggcggccggagcagcggggccaccccggtgtccggcccgcccccgccctcggccagcagcacccccgcaggtcagcctaccgccgttagccggctgcagatgcagcttcacctgcgaggcctgcagaacagcgccagtgacttgcgcggccagctccagcagttgcgcaagctccagctacagaaccaggagtcggtgcgcgcgctgctgaagcgcacggaggcagagctgagcatgcgcgtgtcggaggcggcgcggcggcaggaggacccgctgcagcggcagcgcaccctggtggaagaggaacggctgcgctatctcaacgacgaggagcttattacccagcagctcaatgacctggagaaatcggtggagaagatccagagagacgtgtcccacaaccaccggctggtgcccggccctgagctggaggagaaggcactggtgctgaagcagctcggggagacgctgacagagctcaaggctcacttcccgggcctgcagagcaagatgcgggtggtgctgcgcgtggaggtggaggcggtgaagttcctgaaggaggagccccagcgcctggatgggctcctcaagcgctgccgcggggtcacggacacgctggcccagatccgaaggcaagtggatgagggtgtgtggccaccccccaacaatctcctgagtcagtcccccaagaaggtgacggcagagactgacttcaacaagagcgtggacttcgaaatgccaccccccagccccccgctgaacctgcatgagctgagcgggccagctgaaggagcctctcttacccccaaggggggcaaccccaccaaaggcctggacactcctggcaagagaagcgtggacaaagctgtgtctgttgaggctgcagagcgagactgggaggagaagcgggcagccctgacccagtacagtgccaaggacatcaaccggctgctggaagagacacaggcagagctgctcaaggccatccctgacctggactgtgccagcaaggcccatccaggcccggcccccactccagatcacaagccccccaaggccccccacggccagaaggcagccccccgaacggagcccagtgggaggaggggctcagatgagttgaccgtgccccgataccgcacagagaagccctccaagtcgcccccaccgccccctccccgccggagcttcccctcctcccatggcctgaccaccacacgtaccggagaggtggtggtcaccagcaagaaggactcggccttcatcaagaaggctgagtccgaggagctggaggtgcagaagccccaggtgaagctgcgccgggctgtgtctgaggtggcccgcccagcctccacaccacccatcatggcctcggccatcaaggacgaggatgacgaggatcgcatcatcgcagagctagaggtgtttgagagaagctcagtgtcttccctcccccccacgccccgccgccagctgatccccaccttgctgtccccccaggacctggggccccccgggggctcagccccaggccctacacggaagagtggcggaggcagtgtaccacccatgaaggtggtgactccgggggcctctcggctgaaggcggcccagggccaggcgggcagccccgacaaaagcaaacatggcaagcagagggccgagtacatgcggatccaggcccagcagcaggtctaatgagcaggcgcggaggctgtgtggagagtggacatacctcacctgtgggtgtttactgcccttgtggcctggtcagaggctgcagggtggctcctggacccagatgttgtgagagacccttagtgcactcgtttgatttagttaatatttatgagcagctcctgtatgacaggcccattctgggtgtgagggtgggggctgtgatatgtccagatgctctcacttaaagaaggttctagactcagaggcaagacgttagagaaggttctagactc

SEQ ID NO: 218617 - DNA, 4632 bp, Artificial Sequence
  derived and/or modified sequence
gttcccgcagaagctcaccatgggcatgcttaagtcgcccaataccgccatcctcatcaaagacgaggctcgcaacgtcttctacgagctggaggacgtccgggacatccaggaccgcagtattatcaagatctacagaaaggagcccctctacgctgccttccctggctcacatctcaccaacggggacctccggagagagatggtgtacgcatcgcgggagtcctcgcccacgcggcgcctcaacaacctgtcaccagcgccgcacctggcatccggctcgccgccgcccgggctgccgtcggggctgccgtccgggctgcagtccggttcgccgtcgcgttcgcgcctatcgtacgccggggggcgcccgccttcgtacgccggcagcccggtgcaccacgcggccgagaggctgggaggcgccccggccgcccagggcgtcagccccagccccagcgccatcctggagcggcgcgacgtgaagccggacgaggacctggcgagcaaggcgggcggcatggtgctggtgaaaggcgagggcctctatgctgacccctacgggctgctgcacgagggccgtctgagcctggccgcggccgccggcgacccgttcgcctacccgggcgccggcggcctctacaagcgcggctcggtgcgctcgctcagcacctactcggccgccgcgctgcagtccgatctggaggactccctgtacaaggcggcgggcggcggcggcccgctgtacggcgacggctacggcttccgcctgccgccttcgtcaccgcagaagctggccgacgtggcagcaccccccggaggtcccccgccaccgcacagcccctactcggggccgcccagccgcggctcgccagtgcgccagtccttccgcaaggactcgggctcctcgtccgtctttgccgagagtcctggagggaagacccgcagcgcggggagcgcctcgacggccggagctcccccttcggagctcttccctgggcctggggaacgctcgctggttgggttcgggccgccagtgccagccaaggacacggagaccagggagcgcatggaggccatggagaagcagattgccagcctcacaggcctggtgcagagcgccttactgcgaggctctgagcctgagacccccagcgagaagattgaaggctccaatggagcagccaccccctcagcaccctgtgggtcaggcggccggagcagcggggccaccccggtgtccggcccgcccccgccctcggccagcagcacccccgcaggtcagcctaccgccgttagccggctgcagatgcagcttcacctgcgaggcctgcagaacagcgccagtgacttgcgcggccagctccagcagttgcgcaagctccagctacagaaccaggagtcggtgcgcgcgctgctgaagcgcacggaggcagagctgagcatgcgcgtgtcggaggcggcgcggcggcaggaggacccgctgcagcggcagcgcaccctggtggaagaggaacggctgcgctatctcaacgacgaggagcttattacccagcagctcaatgacctggagaaatcggtggagaagatccagagagacgtgtcccacaaccaccggctggtgcccggccctgagctggaggagaaggcactggtgctgaagcagctcggggagacgctgacagagctcaaggctcacttcccgggcctgcagagcaagatgcgggtggtgctgcgcgtggaggtggaggcggtgaagttcctgaaggaggagccccagcgcctggatgggctcctcaagcgctgccgcggggtcacggacacgctggcccagatccgaaggcaagtggatgagggtgtgtggccaccccccaacaatctcctgagtcagtcccccaagaaggtgacggcagagactgacttcaacaagagcgtggacttcgaaatgccaccccccagccccccgctgaacctgcatgagctgagcgggccagctgaaggagcctctcttacccccaaggggggcaaccccaccaaaggcctggacactcctggcaagagaagcgtggacaaagctgtgtctgttgaggctgcagagcgagactgggaggagaagcgggcagccctgacccagtacagtgccaaggacatcaaccggctgctggaagagacacaggcagagctgctcaaggccatccctgacctggactgtgccagcaaggcccatccaggcccggcccccactccagatcacaagccccccaaggccccccacggccagaaggcagccccccgaacggagcccagtgggaggaggggctcagatgagttgaccgtgccccgataccgcacagagaagccctccaagtcgcccccaccgccccctccccgccggagcttcccctcctcccatggcctgaccaccacacgtaccggagaggtggtggtcaccagcaagaaggactcggccttcatcaagaaggctgagtccgaggagctggaggtgcagaagccccaggtgaagctgcgccgggctgtgtctgaggtggcccgcccagcctccacaccacccatcatggcctcggccatcaaggacgaggatgacgaggatcgcatcatcgcagagctagagagtggcggaggcagtgtaccacccatgaaggtggtgactccgggggcctctcggctgaaggcggcccagggccaggcgggcagccccgacaaaagcaaacatggcaagcagagggccgagtacatgcggatccaggcccagcagcaggtctaatgagcaggcgcggaggctgtgtggagagtggacatacctcacctgtgggtgtttactgcccttgtggcctggtcagaggctgcagggtggctcctggacccagatgttgtgagagacccttagtgcactcgtttgatttagttaatatttatgagcagctcctgtatgacaggcccattctgggtgtgagggtgggggctgtgatatgtccagatgctctcacttaaagaaggttctagactcagaggcaagacgttagagaaggttctagactcagaggcaagaggttagagatgggtgagtccatctctttttcagatgagggggcagctcagaggaggagaggggcttcccaaaggtgcacagcaaggtggcatcacagccaggatcgggacctaggaatcttggaacccttccctgcactggccctgggacagccctgggcacccaaggccctgcctccctactggctcccaggagaatttctcaaaaagcagccctccagccccccgcagcctctccacagctcccacctgcctcctcatggcccccagacaccctgcgagccccacctccagatctttttcctgccactgccagggatgagttccccttgtcctgtccgggctggaccctcctgggtgcccagcagagcagctgacactgacagagctttcgctggggccaggcatgcgcattatctcatctcacactcaccacactgaggaaggtctattacccccatgtgacgggggcggaaactgaggcttaatccaaggccacacggctagcaagtggggggcaggacacaagtccagactgcctccctccccaccacaaagtgcttcagcctctccagcagccccttccctcagctctaatgatgttgcactgtttcccaccctagtccctccctccccagagcccagctcctccgctgtggtgtcagcctcatgcctttatggcccagcctccaccccatctccggggttgcctgggtctccagtgacatcgagatgggctcttttcacccccctcccccactgctctgcagcatgtggccttgtagaccccccccacacctgcatagggctgtgcagaccctctgttcctcagcatcctctccccagcctccacctggagcctctgggctcctttctgggtgactccctctattttttgagacggagtcttgctctgtctcccaggctggagtccagtggtgtgatctcagctcactgcagcctccgcctcctgggttcaagtgattctcgtgcctcagcctcccgagcagctgagactacaggctaattaccacactggctaatttttgtatttttagtagagacggggtttcaccatgttggccaggctggtctcaaactcctgagctcaggtgatcctcccacctcagcctcccaaagtgctgggattacaggcgtgagccattgcaccctgcctgggcgactctcctttgcctgcctcttcccttcctgtgccccactcctcagcctcttctcctcacaccatgccttcctctcctcaggcaccaggtgcactgcttagtccctgcccccacccaggtctccattctgagctccagtcacccacacacgcttccccgggcatccccaggctcctcgaatgcgtgtgtccagacataatgctcccccgaccacgctgccccagccggtacgaggctgccccagctgctgtctccctcaggaagggtcgcccacccccagccttcccaagcccctccgtgcccctgtctcacttccagtgctccagtagcctttcttataaacatggcttctttcttgtaaagtaataaatgtttacagtgg

SEQ ID NO: 218618 - protein, 1176 aa, Artificial Sequence
  derived and/or modified sequence
MAAAAGAAAAAAAEGEAPAEMGALLLEKETRGATERVHGSLGDTPRSEETLPKATPDSLEPAGPSSPASVTVTVGDEGADTPVGATPLIGDESENLEGDGDLRGGRILLGHATKSFPSSPSKGGSCPSRAKMSMTGAGKSPPSVQSLAMRLLSMPGAQGAAAAGSEPPPATTSPEGQPKVHRARKTMSKPGNGQPPVPEKRPPEIQHFRMSDDVHSLGKVTSDLAKRRKLNSGGGLSEELGSARRSGEVTLTKGDPGSLEEWETVVGDDFSLYYDSYSVDERVDSDSKSEVEALTEQLSEEEEEEEEEEEEEEEEEEEEEEEEDEESGNQSDRSGSSGRRKAKKKWRKDSPWVKPSRKRRKREPPRAKEPRGVSNDTSSLETERGFEELPLCSCRMEAPKIDRISERAGHKCMATESVDGELSGCNAAILKRETMRPSSRVALMVLCETHRARMVKHHCCPGCGYFCTAGTFLECHPDFRVAHRFHKACVSQLNGMVFCPHCGEDASEAQEVTIPRGDGVTPPAGTAAPAPPPLSQDVPGRADTSQPSARMRGHGEPRRPPCDPLADTIDSSGPSLTLPNGGCLSAVGLPLGPGREALEKALVIQESERRKKLRFHPRQLYLSVKQGELQKVILMLLDNLDPNFQSDQQSKRTPLHAAAQKGSVEICHVLLQAGANINAVDKQQRTPLMEAVVNNHLEVARYMVQRGGCVYSKEEDGSTCLHHAAKIGNLEMVSLLLSTGQVDVNAQDSGGWTPIIWAAEHKHIEVIRMLLTRGADVTLTDNEENICLHWASFTGSAAIAEVLLNARCDLHAVNYHGDTPLHIAARESYHDCVLLFLSRGANPELRNKEGDTAWDLTPERSDVWFALQLNRKLRLGVGNRAIRTEKIICRDVARGYENVPIPCVNGVDGEPCPEDYKYISENCETSTMNIDRNITHLQHCTCVDDCSSSNCLCGQLSIRCWYDKDGRLLQEFNKIEPPLIFECNQACSCWRNCKNRVVQSGIKVRLQLYRTAKMGWGVRALQTIPQGTFICEYVGELISDAEADVREDDSYLFDLDNKDGEVYCIDARYYGNISRFINHLCDPNIIPVRVFMLHQDLRFPRIAFFSSRDIRTGEELGFDYGDRFWDIKSKYFTCQCGSEKCKHSAEAIALEQSRLARLDPHPELLPELGSLPPVNT

SEQ ID NO: 218619 - protein, 888 aa, Artificial Sequence
  derived and/or modified sequence
SEVEALTEQLSEEEEEEEEEEEEEEEEEEEEEEEEDEESGNQSDRSGSSGRRKAKKKWRKDSPWVKPSRKRRKREPPRAKEPRGVSNDTSSLETERGFEELPLCSCRMEAPKIDRISERAGHKCMATESVDGELSGCNAAILKRETMRPSSRVALMVLCETHRARMVKHHCCPGCGYFCTAGTFLECHPDFRVAHRFHKACVSQLNGMVFCPHCGEDASEAQEVTIPRGDGVTPPAGTAAPAPPPLSQDVPGRADTSQPSARMRGHGEPRRPPCDPLADTIDSSGPSLTLPNGGCLSAVGLPLGPGREALEKALVIQESERRKKLRFHPRQLYLSVKQGELQKVILMLLDNLDPNFQSDQQSKRTPLHAAAQKGSVEICHVLLQAGANINAVDKQQRTPLMEAVVNNHLEVARYMVQRGGCVYSKEEDGSTCLHHAAKIGNLEMVSLLLSTGQVDVNAQDSGGWTPIIWAAEHKHIEVIRMLLTRGADVTLTDNEENICLHWASFTGSAAIAEVLLNARCDLHAVNYHGDTPLHIAARESYHDCVLLFLSRGANPELRNKEGDTAWDLTPERSDVWFALQLNRKLRLGVGNRAIRTEKIICRDVARGYENVPIPCVNGVDGEPCPEDYKYISENCETSTMNIDRNITHLQHCTCVDDCSSSNCLCGQLSIRCWYDKDGRLLQEFNKIEPPLIFECNQACSCWRNCKNRVVQSGIKVRLQLYRTAKMGWGVRALQTIPQGTFICEYVGELISDAEADVREDDSYLFDLDNKDGEVYCIDARYYGNISRFINHLCDPNIIPVRVFMLHQDLRFPRIAFFSSRDIRTGEELGFDYGDRFWDIKSKYFTCQCGSEKCKHSAEAIALEQSRLARLDPHPELLPELGSLPPVNT

SEQ ID NO: 218620 - protein, 1176 aa, Artificial Sequence
  derived and/or modified sequence
MAAAAGAAAAAAAEGEAPAEMGALLLEKETRGATERVHGSLGDTPRSEETLPKANPDSLEPAGPSSPASVTVTVGDEGADTPVGATPLIGDESENLEGDGDLRGGRILLGHATKSFPSSPSKGGSCPSRAKMSMTGAGKSPPSVQSLAMRLLSMPGAQGAAAAGSEPPPATTSPEGQPKVHRARKTMSKPGNGQPPVPEKRPPEIQHFRMSDDVHSLGKVTSDLAKRRKLNSGGGLSEELGSARRSGEVTLTKGDPGSLEEWETVVGDDFSLYYDSYSVDERVDSDSKSEVEALTEQLSEEEEEEEEEEEEEEEEEEEEEEEEDEESGNQSDRSGSSGRRKAKKKWRKDSPWVKPSRKRRKREPPRAKEPRGVSNDTSSLETERGFEELPLCSCRMEAPKIDRISERAGHKCMATESVDGELSGCNAAILKRETMRPSSRVALMVLCETHRARMVKHHCCPGCGYFCTAGTFLECHPDFRVAHRFHKACVSQLNGMVFCPHCGEDASEAQEVTIPRGDGVTPPAGTAAPAPPPLSQDVPGRADTSQPSARMRGHGEPRRPPCDPLADTIDSSGPSLTLPNGGCLSAVGLPLGPGREALEKALVIQESERRKKLRFHPRQLYLSVKQGELQKVILMLLDNLDPNFQSDQQSKRTPLHAAAQKGSVEICHVLLQAGANINAVDKQQRTPLMEAVVNNHLEVARYMVQRGGCVYSKEEDGSTCLHHAAKIGNLEMVSLLLSTGQVDVNAQDSGGWTPIIWAAEHKHIEVIRMLLTRGADVTLTDNEENICLHWASFTGSAAIAEVLLNARCDLHAVNYHGDTPLHIAARESYHDCVLLFLSRGANPELRNKEGDTAWDLTPERSDVWFALQLNRKLRLGVGNRAIRTEKIICRDVARGYENVPIPCVNGVDGEPCPEDYKYISENCETSTMNIDRNITHLQHCTCVDDCSSSNCLCGQLSIRCWYDKDGRLLQEFNKIEPPLIFECNQACSCWRNCKNRVVQSGIKVRLQLYRTAKMGWGVRALQTIPQGTFICEYVGELISDAEADVREDDSYLFDLDNKDGEVYCIDARYYGNISRFINHLCDPNIIPVRVFMLHQDLRFPRIAFFSSRDIRTGEELGFDYGDRFWDIKSKYFTCQCGSEKCKHSAEAIALEQSRLARLDPHPELLPELGSLPPVNT

SEQ ID NO: 218621 - DNA, 897 bp, Artificial Sequence
  derived and/or modified sequence
tgaagtaagagaacacctctgcatgcagcagcgcagaaggggtcagtagagatctgtcatgtcctgctgcaggccggcgctaatattaatgcagttgataagcagcaacgaaccccccttatggaggccgttgttaataaccacctggaagtggcccggtacatggtccaacggggtggctgcgtgtactctaaagaagaagacggtagcacctgcttacaccatgcagccaaaatcggaaatttagaaatggtctcactgttattgtcaactggccaggtggatgtaaacgcacagggccagctcccccccccctccctgccatctcatccacaggatagcggtggctggaccccgattatatgggccgctgagcataaacatattgaagtgatcagaatgctgctcacacgtggcgcagacgtcactctaacagataacgaggagaatatttgtctgcattgggcatcctttaccgggtccgccgccattgccgaagttctattgaacgcccgatgcgatctccacgctgtcaactaccatggggatactccacttcacatagcagcccgtgagtcataccacgattgcgtccttttatttctcagcagaggagcaaaccccgaattaaggaacaaagagggcgataccgcctgggacctcactcccgagcgtagtgatgtctggtttgcactccagttaaaccgcaagctgcgtctcggggtgggcaacagagcaatacgtaccgaaaagattatttgtagggacgtggccaggggttatgaaaacgttcctatcccctgtgtgaacggcgtggatggggaaccttgccctgaggactataagtacatctccgagaactgtgaaacaagcacaatgaacatcgaccgcaattag

SEQ ID NO: 218622 - DNA, 897 bp, Artificial Sequence
  derived and/or modified sequence
tagagcaagaggacacccttgcacgccgcagcccaaaaaggatccgtggaaatttgtcatgttctcctacaggctggggcaaatatcaacgcagtggataagcagcagagaaccccgctgatggaggccgtcgtgaataatcacttggaagttgcaaggtatatggtgcaaaggggaggctgcgtctactccaaagaggaggacgggtctacatgtctgcaccacgcggcaaagataggtaacctcgaaatggtctcattgctgttgtcaaccggtcaggtggacgtgaacgcccaaggtcagttgccccctccgtctctcccatcacatccccaagactctggtggttggactcctatcatttgggccgctgaacacaagcacattgaagtaatcagaatgctgcttacccggggcgccgacgtgacacttaccgacaatgaggagaacatctgcttacactgggcctcattcacaggctcggccgctattgctgaagtactgctgaacgcccggtgtgatttgcatgccgtaaactaccatggagacacacctctgcatatcgccgcccgcgagagctaccacgattgtgtgctactgttcctgagtagaggcgccaaccccgagctccgtaacaaagagggcgacactgcgtgggacctgacaccagagcggtcggacgtgtggttcgcccttcagctcaacaggaagctgagactaggcgtagggaatagagccattcgcaccgagaagatcatctgcagggacgtcgcgcgaggctatgagaatgtaccaataccttgtgtcaacggtgtggatggagagccgtgccctgaggattacaaatacatttccgagaactgcgagacctcaacaatgaacatcgacagaaactag

SEQ ID NO: 218623 - DNA, 897 bp, Artificial Sequence
  derived and/or modified sequence
taatctaaaagaacgccactgcacgcagcagcacagaaaggctccgtggagatctgccatgtcctgctccaggcaggcgctaatattaacgccgtggacaaacaacagcgcactccgctgatggaagcagtcgtgaataaccacctagaagtggcccgttatatggttcaacgaggcggctgtgtctattctaaggaggaggacgggtcgacttgcctgcatcacgcagcgaaaatcgggaatctcgaaatggtgagcttgctcctgagcaccggacaggtagacgtgaacgcgcagggacagcttccaccacccagtctcccttcgcacccccaggatagtggtggctggaccccaattatatgggccgcggagcataagcacatcgaggtgattaggatgttgctgactaggggggctgacgtgacactcaccgataatgaagagaatatctgcttacattgggcctcttttaccgggagcgcggccatagccgaggtgcttctgaatgcccggtgtgatctgcacgccgtgaattaccacggcgatacgccattgcacattgccgccagagagagttaccacgactgcgtgctgctgttcctgtcgcggggggccaatcctgagctgcgcaacaaggagggggacactgcctgggaccttacccccgagcgctctgacgtttggttcgccctgcaactgaaccggaagctgcgcctaggcgtgggaaacagagcgataagaaccgagaaaattatttgccgcgatgtggcccgcggctatgagaatgtcccaatcccttgtgttaacggcgttgacggggaaccttgccctgaagactataagtacattagcgaaaactgtgagacctctaccatgaatatagatcgcaactag

SEQ ID NO: 218624 - DNA, 897 bp, Artificial Sequence
  derived and/or modified sequence
taaagcaagagaacgcctctccatgcggcggcgcagaagggatccgtagaaatttgccacgtgcttctgcaggctggggctaacatcaatgcagttgacaagcagcagcgaacgccacttatggaagctgtcgtgaataatcatttagaagtagcgaggtacatggtgcagcgggggggctgtgtgtattcaaaagaagaagacggttccacctgcctccaccacgccgctaagatcggaaatttagagatggtgtctttgctattatctacgggacaggttgatgtgaacgcccagggccagctgcctccccccagtctgcccagccacccacaggactcaggggggtggactccgatcatatgggccgcagaacacaaacacatcgaagtgattcgcatgctgcttactcggggcgctgacgtgaccctaactgataatgaagaaaatatatgtctgcattgggcaagtttcacagggtcagcggctatagctgaggtgttactgaatgccaggtgcgacctgcacgccgtgaattaccatggagatacacctctgcatattgccgccagagaatcctatcatgattgcgtgctgctgtttctctcacggggagccaatcccgaactcagaaacaaggaaggtgacactgcctgggatctcacacccgagcgctcagatgtgtggttcgctttacagttaaaccggaaactgcggttgggggtcggcaaccgggccattaggacagagaaaatcatttgccgcgacgtggctcggggctatgagaatgtacccatcccttgcgtgaacggcgtggatggcgagccgtgccctgaggattacaagtacatctcagagaattgcgagacaagcacaatgaatatcgatcgcaattag

SEQ ID NO: 218625 - DNA, 897 bp, Artificial Sequence
  derived and/or modified sequence
tgaagcaagaggacccccctccacgctgccgcccagaaaggctcagtcgagatttgccacgtgctgttacaggcaggagccaatattaatgcagttgataagcagcagaggaccccgctcatggaagcagtagtaaataaccacctggaggtcgcccgctatatggtccagagaggagggtgtgtgtacagcaaggaagaggacgggtctacatgtctgcatcatgccgcgaaaattgggaatttagagatggtctccctgcttctgagtacaggccaggttgatgtgaacgcgcagggccagctacccccgccctccctcccttcacaccctcaggattccggcggatggacaccaataatctgggctgccgaacacaagcatattgaagttatcaggatgttactgacgcgcggagcggacgtgacactcactgacaatgaggaaaacatttgccttcattgggcaagcttcaccggatcggcggcaattgccgaggtactactcaatgccaggtgtgacttgcatgccgtgaattaccatggggataccccactgcacattgccgctagggagtcgtaccacgactgcgtgctgctgttcctgtccaggggtgccaatcccgaattgcgcaataaagaaggcgataccgcctgggatctgaccccagagcgcagcgacgtgtggtttgctctgcaactcaaccgcaaactgagactaggagtgggcaacagagctatcagaacagaaaagattatctgtagagatgttgcacgcggatacgaaaacgtgccaatcccttgcgtgaacggagtggatggggagccatgcccagaggattacaagtacatttccgaaaactgcgagacttccaccatgaacattgatcggaactag

SEQ ID NO: 218626 - DNA, 897 bp, Artificial Sequence
  derived and/or modified sequence
tagtctaaacgcacccctcttcatgctgccgcacagaagggcagcgtcgagatctgtcacgtcttgctccaggctggggccaacatcaacgccgtggacaaacaacagaggactccactgatggaggccgttgtgaacaaccacctcgaggtggcccgctatatggtccagagaggcggctgcgtctactctaaggaggaggacgggtccacctgcctgcaccatgccgcaaagattggtaacctggaaatggtttccctgctgctcagcactggccaggtggatgtcaatgcacaggggcagttgccccccccatcactgcccagtcatccacaggactctggcggctggacacctatcatctgggccgcagagcataaacacatcgaggtgatacgcatgctcctgactaggggcgctgacgtcacactgacggataacgaagagaacatatgtctgcactgggcttcatttaccggtagtgcagcgatcgctgaagtgttactgaatgcacggtgcgacctccacgctgttaattaccatggtgatactcccctgcacatcgccgctagggaatcgtatcacgattgtgttttactgtttctgtctagaggggcaaatcctgagctgcgcaataaggagggcgataccgcctgggacctaacaccggaacgcagcgatgtgtggtttgctcttcagctcaatagaaaactccgcctgggagtggggaatagagccataagaactgagaagatcatttgtcgggatgtcgcccgcggctacgaaaacgtgccaattccctgcgtaaacggcgtcgacggggagccttgccctgaggattacaagtacattagtgagaactgtgaaacgagtacaatgaacattgatcgtaactag

SEQ ID NO: 218627 - DNA, 897 bp, Artificial Sequence
  derived and/or modified sequence
tgatcaaagaggacacccctgcatgcagctgcccagaaaggctcagtcgagatctgccacgtgttactgcaggctggagcaaacattaacgcggtggacaagcagcaaaggacccctctgatggaggctgtagtcaataatcacttagaagtcgccaggtacatggttcagcgggggggatgcgtttatagcaaggaagaggatgggagcacatgcctacaccatgcggccaagattggtaacttagagatggtctcactcctgctgagcaccggtcaggttgacgtgaatgctcaaggacagctccctccgccttcactgccatctcatcctcaggacagtggcggctggacccccattatttgggcagccgaacacaagcatatcgaggtgattcggatgctgctcaccaggggggctgacgtgacattaacagacaatgaagaaaacatttgcctccattgggcctccttcacaggctcagccgccatcgccgaggtcctcctgaacgcccggtgcgacctgcatgcagttaactatcacggcgacacccctctgcacatcgcagcgagggagagttaccacgactgtgtactgctcttcctgtccagaggagctaatccagagttgagaaacaaagagggcgacactgcctgggaccttacaccggaacgcagcgacgtatggttcgccctgcagctgaaccgcaagttgagactaggggtcggaaaccgcgccattcgcactgaaaagataatttgccgcgatgtggccagaggctacgagaacgtgcctattccctgtgtgaacggtgttgatggcgagccatgccctgaagactacaagtacatcagcgaaaactgcgaaacaagtacaatgaatatcgaccgcaactag

SEQ ID NO: 218628 - DNA, 897 bp, Artificial Sequence
  derived and/or modified sequence
tgaagcaagaggacccccctgcatgctgctgcccagaagggctctgtggagatctgccacgtgctgctgcaggccggggccaacatcaatgctgtggacaagcagcagaggacccccctgatggaggccgtggtgaacaaccacctggaggtggcccgctacatggtgcagagaggaggctgtgtgtacagcaaggaggaggatggcagcacctgcctgcaccacgccgccaagattggcaacctggagatggtgtccctgctgctgagcacaggccaggtggatgtgaatgcccagggccagctgcccccacccagcctgcccagccacccccaggacagcggcggctggacccccatcatctgggccgctgagcacaagcacattgaagtcatccgcatgctgctgaccagaggagcagatgtgaccctgacagacaatgaggagaacatctgcctgcactgggccagcttcaccggcagcgctgccatcgccgaggtgctgctgaatgcccgctgtgacctgcatgctgtgaactaccatggagacacccccctgcacatcgccgcccgggagagctaccatgactgtgtgctgctcttcctgagcagaggagccaaccctgagctgaggaacaaggagggggacacagcctgggacctgaccccagagaggagtgatgtgtggtttgccctgcagctgaacaggaagctgcggctgggcgtgggcaacagagccatcagaacagagaagatcatctgcagagatgtggcccggggctatgaaaatgtgcccatcccctgtgtgaatggagtggatggagagccctgcccagaggactacaagtacatcagcgagaactgtgagaccagcaccatgaacatcgacagaaattag

SEQ ID NO: 218629 - DNA, 897 bp, Artificial Sequence
  derived and/or modified sequence
tgaagcaagcggacccccctgcacgccgccgcccagaagggcagcgtcgaaatttgtcacgtcctgctccaagcaggggcaaatatcaatgctgtggataagcagcagaggactcctcttatggaagcagtagtcaacaatcatcttgaggtcgcccggtacatggtgcagcgcggcggctgcgtgtactccaaagaggaggatgggtcaacatgcctgcaccatgctgccaagatcggaaaccttgagatggtgagcctcttgttgtctacaggccaggtggacgtgaatgcccagggccagctgccaccgccaagcttaccatcccatccgcaggatagtggcgggtggaccccaataatctgggccgctgagcacaagcatatcgaagtcattcgcatgttgttgacaagaggcgccgatgtgacccttacggacaatgaagaaaatatttgtctgcactgggcctcatttaccggctcggccgcaatcgctgaggtgctcctgaacgctcggtgtgatctgcacgccgtgaattaccacggcgatacaccgctgcacatcgcagcacgggagtcctaccatgattgtgtcctgctgtttctcagccggggtgccaatcccgagctaagaaacaaagagggggataccgcctgggacctgacacctgagaggagtgacgtgtggtttgcactgcagctcaacagaaaactgagactgggggtcgggaacagggcaattcgcaccgaaaaaatcatctgccgggatgtggcgcgggggtatgaaaatgtgccaatcccatgcgtgaacggggtggacggagagccttgtcctgaggactacaaatacataagcgaaaattgcgaaacgtccaccatgaacattgaccgcaattag

SEQ ID NO: 218630 - DNA, 897 bp, Artificial Sequence
  derived and/or modified sequence
tgaagcaagcggacccccctgcacgccgccgcccagaagggcagcgttgaaatttgtcatgtactgctacaggccggcgctaacatcaacgctgttgacaaacaacagcgcacccccttgatggaagctgtggtcaataaccacctggaggttgcaaggtatatggtgcagcggggcgggtgtgtgtattcgaaggaagaagatggcagtacctgtcttcatcatgcggctaagattggaaacttggagatggtgtctttgctgctctccacaggccaggtggatgtgaacgcccagggtcagttacctcctccatccctaccttcgcaccctcaagactcaggtgggtggaccccgatcatctgggcagccgaacacaaacacatagaagtaatcaggatgcttctaacacggggcgcagacgtgacactgaccgataatgaggaaaacatttgtcttcattgggcatctttcaccggtagtgctgcgatcgctgaggtcctgcttaacgcccggtgtgatctgcatgctgtgaactaccacggcgataccccattgcatattgcggccagggaatcataccacgactgcgtgctactgttcttatctcgtggagccaaccctgagctgagaaataaggaaggcgacacagcctgggatctgacccccgaacggtcagatgtatggtttgctctccaattgaatcggaagttgagactaggagtcgggaatcgagcaatccggaccgaaaaaattatctgccgcgacgtggctcgaggctatgaaaatgtccccataccttgtgtcaatggtgtagatggagagccctgccctgaagactataaatatatcagcgagaactgcgagacatctacaatgaatatagaccgcaactag

SEQ ID NO: 218631 - DNA, 897 bp, Artificial Sequence
  derived and/or modified sequence
tgaagcaagcggacccccctgcacgccgccgcccagaagggcagcgtcgagatctgccatgtcctcctccaagcgggtgctaatataaacgctgtggataagcagcaacggactccgttgatggaagctgtggtgaataatcacttagaggttgcacgctatatggtgcagaggggtggctgcgtgtactcgaaggaggaggacggttccacttgtctgcaccatgccgcaaagattggtaacctcgagatggtcagcctgctgctgtccactggccaggtagacgtgaacgctcaggggcagttgcctccgccttccttgccgtcccatccacaggacagcggaggctggacaccaatcatctgggccgcagagcataagcatattgaggtcattcggatgttattaacaaggggagcagatgtaactctgaccgacaacgaagaaaacatctgcctgcattgggccagtttcacgggatctgctgcaattgccgaggtgttgttgaacgctagatgcgacctgcatgccgtgaactatcatggcgacactccactccatatcgctgccagagaatcttatcacgattgtgttttactcttcctatccagaggagccaatcctgagttgcgtaacaaagagggtgacacagcatgggatctgacccctgagaggtccgatgtgtggttcgccctgcagcttaacagaaaactcaggctgggagtcggaaacagagccatcagaacagagaagataatttgtcgcgatgtggcgagaggatatgaaaatgtgcctatcccctgtgtgaacggggtcgacggggaaccatgcccagaggactataagtatattagcgagaattgcgagacatccaccatgaatatcgacaggaattag

SEQ ID NO: 218632 - DNA, 897 bp, Artificial Sequence
  derived and/or modified sequence
tgaagcaagcggacccccctgcacgccgccgcccagaagggcagcgtcgaaatctgccatgtcttactgcaggccggcgcaaacattaacgccgttgacaaacaacaacgaaccccgctgatggaagccgttgtcaacaatcacttggaagttgcgagatatatggttcagcggggcgggtgtgtatatagcaaggaggaggacggtagcacatgtttacaccacgctgcaaaaattggcaacctcgagatggtgagccttctgctgagcaccggccaggttgatgtcaatgcccaggggcagctgcctccaccttcgctcccctctcacccacaagatagcgggggctggactccaattatctgggccgcggaacataagcacatcgaggtgattaggatgttgttgacacgtggtgctgacgttacccttaccgacaacgaagagaacatatgcttgcactgggccagttttacaggaagcgcagcgattgccgaggtcctcctgaacgcacggtgtgacctgcacgcagtgaattatcatggcgacacccctctgcacatagcggcaagggagagttatcacgactgtgtcctgctcttcctctcccgcggcgctaacccggagctgaggaataaggaaggtgatactgcatgggaccttacccctgagaggagcgatgtgtggtttgccttacagctaaaccgcaagctacgtttaggcgttggaaacagggctattcgcactgaaaaaatcatttgccgggatgtggcaagaggatatgaaaacgttcccatcccctgcgtaaacggggtggacggagagccttgtccagaagattataagtacatctccgagaattgtgagacttcaactatgaacattgaccgaaattag

SEQ ID NO: 218633 - DNA, 897 bp, Artificial Sequence
  derived and/or modified sequence
tgaagcaagcggacccccctgcacgccgccgcccagaagggcagcgtggaaatctgtcatgtgctcctgcaggcaggagctaacatcaacgctgttgacaaacaacagcggacccctttaatggaggcagttgtgaacaaccacttggaagtcgcacgatacatggtgcagcgtggaggatgtgtttatagtaaggaagaggacgggtctacttgtctccatcatgccgctaaaattgggaatttggaaatggtatcattgctgttatctacagggcaagtcgacgtcaacgcccaggggcagctaccccctcccagcttgccctctcacccccaggattccggcggctggacccctattatctgggcagcagagcataaacacattgaagtcattaggatgctcctgacccgaggcgccgacgttaccctaaccgacaacgaggagaatatctgtctacattgggcatccttcaccgggtctgctgctattgcagaggtgctgctcaatgccagatgcgatctgcatgctgtaaactatcacggcgacacgcctttacatatcgccgcccgggagtcctaccatgattgcgttctgctgtttctgtcccgcggcgctaacccagaactccgaaacaaagagggcgacaccgcttgggacctcacgccagagcgatcggacgtttggttcgctctccagctcaacaggaagctcaggctcggcgttggcaaccgagccatacgaaccgagaaaattatctgtcgggacgtcgcgcggggctacgagaatgttcccattccatgtgtgaatggcgtggacggcgaaccgtgccctgaggattataagtacatctccgagaactgcgagacaagtaccatgaatatcgaccgaaactag

SEQ ID NO: 218634 - DNA, 897 bp, Artificial Sequence
  derived and/or modified sequence
tgaagcaagcggacccccctgcacgccgccgcccagaagggcagcgtggaaatatgtcacgttctactgcaagccggagctaacataaatgccgtagacaagcagcagcgcacgccccttatggaagcagtcgtgaacaatcatctagaggtcgctagatatatggtgcagagagggggttgtgtatatagcaaagaggaagacggaagcacctgtctgcaccatgctgcgaaaatcggcaaccttgagatggtttccctactcctgtccacggggcaagttgatgtgaacgcgcaaggacagctcccccccccctctctccccagccatccacaggattcaggcggctggactcctatcatttgggccgccgaacataagcatattgaagttattcgcatgttactcacccgtggcgctgacgttacgttgacggataacgaggagaatatctgcctccactgggccagtttcacggggagcgccgcgatcgcggaggtgttactgaatgcgcggtgcgacctccatgcagttaactaccatggagacactccgcttcacattgctgcccgggagagctaccatgactgtgtcctgctgtttctgtcccgaggcgccaatcctgaacttcgaaataaagagggcgacaccgcctgggatctcacccccgagcggtcggatgtgtggttcgctctgcagcttaacaggaaactccgcctcggggttggcaacagagccatcaggaccgagaagatcatctgcagagacgttgctcgcggctatgagaacgtgcctatcccctgcgtcaacggggtggatggggaaccatgcccagaggattataagtatattagcgagaattgcgagacatccacaatgaatatcgatcgcaattag

SEQ ID NO: 218635 - DNA, 897 bp, Artificial Sequence
  derived and/or modified sequence
tgaagcaagcggacccccctgcacgccgccgcccagaagggcagcgtagagatctgccacgtgttgttgcaagccggcgccaacataaatgcagttgacaagcagcaacgcacaccactgatggaagccgtcgtgaataaccaccttgaagtcgctcggtatatggtccagagagggggctgtgtgtattccaaagaagaagacggaagcacatgtctgcatcatgcagcaaagatcggcaacctggaaatggtctctctcctgctgtcgactggccaggtcgatgtcaatgcgcagggacagctgcctcctccctctttgcccagtcatccccaggactctggcgggtggacccctataatatgggcggcagaacacaaacacatcgaggtcattagaatgctgctgaccagaggagccgacgtcactttaaccgataatgaagaaaacatctgccttcattgggcgagcttcaccggatctgccgctattgctgaagtgctgctcaacgcacggtgcgaccttcacgcagttaattaccatggtgacactcctctgcatatcgcagcccgtgagagttaccacgattgtgtactcctgttcttgagccgcggcgccaaccccgagctgcgtaacaaagaaggtgatacggcttgggacctgacgcccgagagaagcgatgtgtggtttgcccttcagctgaatagaaagttacgcctcggagtcggtaatagagccatccgaactgaaaagattatatgcagagatgttgctcgagggtatgagaatgttccaataccctgtgtgaatggcgtggacggggaaccttgtccagaggattataagtacatctcagagaattgtgagaccagcactatgaacattgatcgaaactag

SEQ ID NO: 218636 - DNA, 897 bp, Artificial Sequence
  derived and/or modified sequence
tagtcaaagcgtacccccctgcatgcagcggctcagaaaggctctgttgagatctgtcatgttctgctccaagccggagcgaatatcaatgcggtggataagcagcagcggactcctctgatggaagcagtggtgaacaaccacctggaggtggctaggtacatggttcaaaggggcggatgcgtgtatagtaaggaggaagacggttccacctgccttcaccacgctgctaagataggaaatctggagatggtgagcttgttactgtccacagggcaggtagacgttaacgcccagggtcaactgcctcccccaagcctgcctagccatcctcaagattcaggaggctggacaccgatcatttgggcagctgaacacaaacacattgaagtgatacgcatgctcctgacgaggggcgcagacgttaccctgaccgacaacgaggaaaatatctgcctccattgggcgagcttcaccggctctgccgcaatcgcagaggtgttgctcaatgccagatgcgacctgcatgctgtaaattatcatggggatactcctctgcatatcgccgcaagagagagttatcacgactgcgttctgctttttctttctcgcggtgccaacccagagctaagaaataaggaaggtgatacggcgtgggatttaacacccgaacgtagcgatgtatggtttgccttacagctcaacagaaagctgagacttggagtagggaatagggccattcgcacagaaaaaattatatgccgcgacgtagccaggggctatgaaaacgttcccatcccttgtgtgaacggcgttgacggggagccatgccccgaggactacaagtacatctccgagaattgcgaaacaagcactatgaatattgatcgcaattag

SEQ ID NO: 218637 - DNA, 897 bp, Artificial Sequence
  derived and/or modified sequence
tgatccaagagaacgcctctgcatgcagcagctcagaaagggtctgtggagatttgccacgtgcttctgcaggcgggtgctaacatcaatgcagttgacaagcagcagcggaccccgttgatggaggccgtcgtcaacaatcaccttgaagtcgccaggtatatggtgcagagaggaggttgcgtctattccaaggaggaggatgggtcgacatgcttgcaccatgcggctaagatcggaaacttggaaatggtgtccctgctgctgagcaccggtcaggtagacgtgaacgcccagggccaactgccgcctccctctcttccaagccatccccaggatagcggaggttggacacctatcatatgggccgctgagcacaagcatattgaggtgattcggatgctgctcacaagaggcgcagacgtgaccctgacagataacgaggagaacatttgtctccactgggcttcattcacgggtagtgcagccatcgctgaggtcctgctaaacgctagatgcgatctccacgctgtgaattaccatggagacactcctctgcacatagctgccagggagagctatcacgattgcgtgctgctgttcctaagcaggggcgcaaaccccgaacttcgcaacaaagaaggggacaccgcctgggatctcacacctgagagatcagatgtatggttcgccctgcagctgaatagaaaacttcgattgggtgttggaaatcgtgctatccgcacggagaagattatttgtcgggacgtggcgagaggttatgagaacgtgccaataccctgtgtgaatggagtggatggtgaaccttgtccagaagattacaaatatatctccgaaaactgcgagacaagcactatgaacatcgataggaattag

SEQ ID NO: 218638 - DNA, 897 bp, Artificial Sequence
  derived and/or modified sequence
tagtctaagcggaccccactacacgctgcggcacagaaaggcagtgttgagatctgtcacgttttgttgcaggctggagctaatatcaacgctgtggacaagcaacagaggacgcccttgatggaagcagtggtgaacaatcatttagaggtagcccgatacatggtgcagagggggggatgtgtctactctaaagaagaggacggctcaacctgtctgcaccatgcagctaagataggaaatttggagatggtgagcttgctgctttcaacaggtcaggtggatgttaacgcgcaaggccaattgcctcccccaagcttaccctcgcatccgcaggatagtggaggctggactccgatcatctgggcggcagagcataagcatatcgaggtcatccggatgcttctgaccagaggtgcagacgtaacattgactgataatgaggaaaatatttgtctgcactgggcctcattcacggggagcgcagcaattgccgaggttctgctcaacgcacgctgcgacctccatgccgtgaactaccacggcgacactccgctgcatattgctgcacgtgagtcctatcatgactgtgtactgctcttcctcagtaggggggctaatcccgaactgcggaataaggaaggcgataccgcttgggaccttactcctgaacggtccgacgtctggttcgccctgcagttgaaccggaaactccgcttgggggtcggaaacagggctattaggaccgagaagattatatgccgggacgttgctcgcggatacgaaaatgtgcctatcccttgcgttaacggggttgacggggaaccatgcccggaggactataaatatatctctgagaactgcgagaccagcactatgaacatcgaccgaaactag

SEQ ID NO: 218639 - DNA, 897 bp, Artificial Sequence
  derived and/or modified sequence
tagtcaaagcgaacccctctccacgccgctgcgcagaaaggctccgtggagatttgccatgtgttacttcaggctggcgcaaatatcaacgcagtcgataagcaacagcgtaccccactcatggaggctgtggtcaataatcatctggaagtggctcgatatatggtgcagcgtggaggttgtgtatacagcaaggaggaagatggtagtacatgtctccaccatgccgctaaaatcggcaacctagagatggtcagtctgttattgtccaccggacaagtcgatgtaaatgctcaaggtcagctgccaccaccgagcctcccctctcatccacaagactcggggggatggacacctataatttgggccgctgaacacaaacacatagaggtgattcgcatgctgctgacccgcggagcggatgttactttgaccgataacgaggaaaacatatgtcttcactgggcctcctttaccgggtccgcagcaattgccgaggtgctgctgaatgctagatgtgaccttcacgctgtgaattatcacggagacactccgctgcacattgctgcgcgtgaaagttaccacgactgcgtcctgctgttcctctcaagaggggctaatcccgagctcaggaataaggagggggatacagcctgggacctgactcccgagagatccgatgtttggtttgcgcttcaacttaataggaaactccgcttgggagtggggaaccgagctattcgaaccgagaaaataatttgtcgcgacgttgcaagggggtatgaaaatgttcccattccttgtgttaacggggtggacggggagccctgtcctgaagactataagtacatttcagaaaattgtgagacgtccaccatgaacattgatcggaattag

SEQ ID NO: 218640 - DNA, 897 bp, Artificial Sequence
  derived and/or modified sequence
taatcaaagaggacgcctctgcacgctgccgcacagaaagggtctgtggagatctgtcacgtactcctgcaggcaggcgctaatattaatgccgtagacaaacagcagaggactccgcttatggaggccgtggtaaacaaccacctggaggtggccaggtacatggtgcagcgcggtggttgtgtttacagtaaggaagaagacggatccacatgtctccatcacgctgctaaaattggcaaccttgagatggtttcactgctcctgagcaccggccaagtcgatgtgaatgcccagggtcagcttccccctccttccctgcccagccaccctcaggactctggcggttggactcccataatttgggctgcggaacacaagcacatcgaggtcatccgcatgcttctgacgagaggagccgatgtcaccctcactgacaacgaggagaacatttgcctacattgggctagcttcacaggctccgctgctatagccgaggtccttctgaatgcacggtgcgacctccacgcagtgaattaccacggggacacacctctgcacattgccgcaagggagagttatcacgactgtgtgctcctcttcctctcccggggagccaaccctgagcttagaaataaggaaggtgacacagcctgggacctcacacccgagaggtccgatgtttggttcgccctccaactgaataggaagctgcgtctcggggttggtaaccgagctattagaaccgaaaaaatcatatgtcgggatgtggcaagaggctacgaaaacgtcccgatcccctgcgtgaatggagtggacggcgagccatgccccgaagactataaatacatcagcgaaaattgcgagacctccaccatgaatatcgataggaactag

SEQ ID NO: 218641 - DNA, 897 bp, Artificial Sequence
  derived and/or modified sequence
tgaagcaagagaactccgctgcatgccgcagcgcaaaaagggtccgtggagatctgccacgtccttctgcaggcgggagccaacattaatgcagtggataagcagcagcggacaccattaatggaggccgtcgtgaacaaccatctcgaggtggctaggtacatggtccagcgcggtggctgcgtgtatagcaaggaggaagatggctccacttgtcttcaccacgctgccaaaatcggcaatttggaaatggtgtccctcctgctctcaactggccaagttgatgtaaatgcccagggacagctcccccctccgagcctcccctcccaccctcaggactccggtggatggacccccattatatgggccgcagagcacaagcatatagaggtaattaggatgctgcttactcgcggagccgatgtcacattgactgacaacgaggagaacatctgcctgcattgggcttcattcactggttcagctgctatcgcagaggtgctgttgaacgcccgatgtgacctgcatgcagtgaactaccatggagatacaccactgcatattgccgctcgcgagtcataccatgactgcgtgctgttattcctgtctcgaggtgctaaccccgaactgcggaacaaagaaggcgatactgcctgggatctgacaccggaaaggtcagatgtatggtttgctcttcaacttaatcgtaaactccgtttgggagtaggcaatagggccatcagaaccgagaaaattatttgcagagacgtcgcgagaggatatgaaaacgtgcctataccgtgtgtgaacggagtggacggggaaccttgccccgaggactataagtacatctctgaaaactgcgaaaccagcacaatgaatatagaccggaactag

SEQ ID NO: 218642 - DNA, 897 bp, Artificial Sequence
  derived and/or modified sequence
taatctaaacgcactcccctacacgcagccgcacagaaggggtctgtggaaatatgccacgtgttgttacaggccggagccaacatcaacgccgtcgataaacagcaaaggaccccactgatggaggcagtcgttaacaaccatctggaagttgccaggtacatggtccagaggggaggatgcgtgtactcaaaggaagaggacgggagtacatgtctacaccatgccgcaaagattggaaatcttgaaatggtaagcctactgttgtcaaccgggcaagttgatgtcaatgcacagggtcagctcccccctccatccctgccatctcaccctcaagattcagggggatggaccccaatcatctgggctgcagagcacaaacacatcgaagtgatacgcatgctgctgacgcgcggtgctgacgttactctgacagataatgaagaaaatatctgcctgcactgggccagcttcactggttctgcagctattgccgaagttctgctcaacgcaagatgtgacctacacgccgtgaattaccacggggacacccctctgcatatcgccgctagagaatcctaccatgattgcgtgctcttattcttgtctcggggagcaaaccccgagttaaggaataaagaaggtgataccgcatgggacctgaccccggaaaggtccgatgtttggttcgcccttcagcttaacaggaagttaagactgggcgtcggaaatagagcaatccgtaccgagaaaatcatatgtagggacgtcgccagagggtatgagaacgtgcccattccctgcgtcaacggtgtggatggcgaaccatgtcctgaagattacaagtatatcagtgagaactgtgagacgagtaccatgaatatcgaccgtaattag

SEQ ID NO: 218643 - DNA, 897 bp, Artificial Sequence
  derived and/or modified sequence
tgaagcaagagaacccccctgcacgccgccgcccagaagggcagcgtggagatctgccacgtgctgctgcaggccggcgccaacatcaacgccgtggacaagcagcagagaacccccctgatggaggccgtggtgaacaaccacctggaggtggccagatacatggtgcagagaggcggctgcgtgtacagcaaggaggaggacggcagcacctgcctgcaccacgccgccaagatcggcaacctggagatggtgagcctgctgctgagcaccggccaggtggacgtgaacgcccagggccagctgcccccccccagcctgcccagccacccccaggacagcggcggctggacccccatcatctgggccgccgagcacaagcacatcgaggtgatcagaatgctgctgaccagaggcgccgacgtgaccctgaccgacaacgaggagaacatctgcctgcactgggccagcttcaccggcagcgccgccatcgccgaggtgctgctgaacgccagatgcgacctgcacgccgtgaactaccacggcgacacccccctgcacatcgccgccagagagagctaccacgactgcgtgctgctgttcctgagcagaggcgccaaccccgagctgagaaacaaggagggcgacaccgcctgggacctgacccccgagagaagcgacgtgtggttcgccctgcagctgaacagaaagctgagactgggcgtgggcaacagagccatcagaaccgagaagatcatctgcagagacgtggccagaggctacgagaacgtgcccatcccctgcgtgaacggcgtggacggcgagccctgccccgaggactacaagtacatcagcgagaactgcgagaccagcaccatgaacatcgacagaaactag

SEQ ID NO: 218644 - DNA, 894 bp, Artificial Sequence
  derived and/or modified sequence
gagcaagcgcacgcccctgcatgcagccgcccagaagggctccgtggagatctgccatgtgctgctgcaggctggagccaacataaatgcagtggacaaacagcagcggacgccactgatggaggccgtggtgaacaaccacctggaggtagcccgttacatggtgcagcgtggtggctgtgtctatagcaaggaggaggacggttccacctgcctccaccacgcagccaaaatcgggaacttggagatggtcagcctgctgctgagcacaggacaggtggacgtcaacgcccagggccagctgcccccaccctcactcccttcccacccacaggacagtggggggtggacgcccatcatctgggctgcagagcacaagcacatcgaggtgatccgcatgctactgacgcggggcgccgacgtcaccctcactgacaacgaggagaacatctgcctgcactgggcctccttcacgggcagcgccgccatcgccgaagtccttctgaatgcgcgctgtgacctccatgctgtcaactaccatggggacacccccctgcacatcgcagctcgggagagctaccatgactgcgtgctgttattcctgtcacgtggggccaaccctgagctgcggaacaaagagggggacacagcatgggacctgactcccgagcgctccgacgtgtggtttgcgcttcaactcaaccgcaagctccgacttggggtgggaaatcgggccatccgcacagagaagatcatctgccgggacgtggctcggggctatgagaacgtgcccattccctgtgtcaacggtgtggatggggagccctgccctgaggattacaagtacatctcagagaactgcgagacgtccaccatgaacatcgatcgcaacat

SEQ ID NO: 218645 - protein, 710 aa, Artificial Sequence
  derived and/or modified sequence
MGGKQRDEDDEAYGKPVKYDPSFRGPIKNRSCTDVICCVLFLLFILGYIVVGIVAWLYGDPRQVLYPRNSTGAYCGMGENKDKPYLLYFNIFSCILSSNIISVAENGLQCPTPQVCVSSCPEDPWTVGKNEFSQTVGEVFYTKNRNFCLPGVPWNMTVITSLQQELCPSFLLPSAPALGRCFPWTNVTPPALPGITNDTTIQQGISGLIDSLNARDISVKIFEDFAQSWYWILVALGVALVLSLLFILLLRLVAGPLVLVLILGVLGVLAYGIYYCWEEYRVLRDKGASISQLGFTTNLSAYQSVQETWLAALIVLAVLEAILLLMLIFLRQRIRIAIALLKEASKAVGQMMSTMFYPLVTFVLLLICIAYWAMTALYLATSGQPQYVLWASNISSPGCEKVPINTSCNPTAHLVNSSCPGLMCVFQGYSSKGLIQRSVFNLQIYGVLGLFWTLNWVLALGQCVLAGAFASFYWAFHKPQDIPTFPLISAFIRTLRYHTGSLAFGALILTLVQIARVILEYIDHKLRGVQNPVARCIMCCFKCCLWCLEKFIKFLNRNAYIMIAIYGKNFCVSAKNAFMLLMRNIVRVVVLDKVTDLLLFFGKLLVVGGVGVLSFFFFSGRIPGLGKDFKSPHLNYYWLPIMTSILGAYVIASGFFSVFGMCVDTLFLCFLEDLERNNGSLDRPYYMSKSLLKILGKKNEAPPDNKKRKK

SEQ ID NO: 218646 - protein, 411 aa, Artificial Sequence
  derived and/or modified sequence
  misc_feature (1)..(1): Xaa can be any naturally occurring amino acid
XRDEDDEAYGKPVKYDPSFRGPIKNRSCTDVICCVLFLLFILGYIVVGIVAWLYGDPRQVLYPRNSTGAYCGMGENKDKPYLLYFNIFSCILSSNIISVAENGLQCPTPQVCVSSCPEDPWTVGKNEFSQTVGEVFYTKNRNFCLPGVPWNMTVITSLQQELCPSFLLPSAPALGRCFPWTNVTPPALPGITNDTTIQQGISGLIDSLNARDISVKIFEDFAQSWYWILVAVGQMMSTMFYPLVTFVLLLICIAYWAMTALYLATSGQPQYVLWASNISSPGCEKVPINTSCNPTAHLVNSSCPGLMCVFQGYSSKGLIQRSVFNLQIYGVLGLFWTLNWVLALGQCVLAGAFASFYWAFHKPQDIPTFPLISAFIRTLRYHTGSLAFGALILTLVQIARVILEYIDHKLR

SEQ ID NO: 218647 - protein, 411 aa, Artificial Sequence
  derived and/or modified sequence
  misc_feature (1)..(1): Xaa can be any naturally occurring amino acid
XRDEDDEAYGKPVKYDPSFRGPIKNRSCTDVICCVLFLLFILGYIVVGIVAWLYGDPRQVLYPRNSTGAYCGMGENKDKPYLLYFNIFSCILSSNIISVAENGLQCPTPQVCVSSCPEDPWTVGKNEFSQTVGEVFYTKNRNFCLPGVPWNMTVITSLQQELCPSFLLPSAPALGRCFPWTNITPPALPGITNDTTIQQGISGLIDSLNARDISVKIFEDFAQSWYWILVAVGQMMSTMFYPLVTFVLLLICIAYWAMTALYLATSGQPQYVLWASNISSPGCEKVPINTSCNPTAHLVNSSCPGLMCVFQGYSSKGLIQRSVFNLQIYGVLGLFWTLNWVLALGQCVLAGAFASFYWAFHKPQDIPTFPLISAFIRTLRYHTGSLAFGALILTLVQIARVILEYIDHKLR

SEQ ID NO: 218648 - protein, 710 aa, Artificial Sequence [sequence omitted]

SEQ ID NO: 218649 - DNA, 1236 bp, Artificial Sequence
  derived and/or modified sequence
tgaagagacgaggacgacgaggcctacggcaagcccgtgaagtacgaccccagcttcagaggccccatcaagaacagaagctgcaccgacgtgatctgctgcgtgctgttcctgctgttcatcctgggctacatcgtggtgggcatcgtggcctggctgtacggcgaccccagacaggtgctgtaccccagaaacagcaccggcgcctactgcggcatgggcgagaacaaggacaagccctacctgctgtacttcaacatcttcagctgcatcctgagcagcaacatcatcagcgtggccgagaacggcctgcagtgccccaccccccaggtgtgcgtgagcagctgccccgaggacccctggaccgtgggcaagaacgagttcagccagaccgtgggcgaggtgttctacaccaagaacagaaacttctgcctgcccggcgtgccctggaacatgaccgtgatcaccagcctgcagcaggagctgtgccccagcttcctgctgcccagcgcccccgccctgggcagatgcttcccctggaccaacgtgaccccccccgccctgcccggcatcaccaacgacaccaccatccagcagggcatcagcggcctgatcgacagcctgaacgccagagacatcagcgtgaagatcttcgaggacttcgcccagagctggtactggatcctggtggccgtgggccagatgatgagcaccatgttctaccccctggtgaccttcgtgctgctgctgatctgcatcgcctactgggccatgaccgccctgtacctggccaccagcggccagccccagtacgtgctgtgggccagcaacatcagcagccccggctgcgagaaggtgcccatcaacaccagctgcaaccccaccgcccacctggtgaacagcagctgccccggcctgatgtgcgtgttccagggctacagcagcaagggcctgatccagagaagcgtgttcaacctgcagatctacggcgtgctgggcctgttctggaccctgaactgggtgctggccctgggccagtgcgtgctggccggcgccttcgccagcttctactgggccttccacaagccccaggacatccccaccttccccctgatcagcgccttcatcagaaccctgagataccacaccggcagcctggccttcggcgccctgatcctgaccctggtgcagatcgccagagtgatcctggagtacatcgaccacaagctgagatag

SEQ ID NO: 218650 - DNA, 1236 bp, Artificial Sequence
  derived and/or modified sequence
tgaagagacgaggacgacgaggcctacggcaagcccgtgaagtacgaccccagcttcagaggccccatcaagaacagaagctgcaccgacgtgatctgctgcgtgctgttcctgctgttcatcctgggctacatcgtggtgggcatcgtggcctggctgtacggcgaccccagacaggtgctgtaccccagaaacagcaccggcgcctactgcggcatgggcgagaacaaggacaagccctacctgctgtacttcaacatcttcagctgcatcctgagcagcaacatcatcagcgtggccgagaacggcctgcagtgccccaccccccaggtgtgcgtgagcagctgccccgaggacccctggaccgtgggcaagaacgagttcagccagaccgtgggcgaggtgttctacaccaagaacagaaacttctgcctgcccggcgtgccctggaacatgaccgtgatcaccagcctgcagcaggagctgtgccccagcttcctgctgcccagcgcccccgccctgggcagatgcttcccctggaccaacatcaccccccccgccctgcccggcatcaccaacgacaccaccatccagcagggcatcagcggcctgatcgacagcctgaacgccagagacatcagcgtgaagatcttcgaggacttcgcccagagctggtactggatcctggtggccgtgggccagatgatgagcaccatgttctaccccctggtgaccttcgtgctgctgctgatctgcatcgcctactgggccatgaccgccctgtacctggccaccagcggccagccccagtacgtgctgtgggccagcaacatcagcagccccggctgcgagaaggtgcccatcaacaccagctgcaaccccaccgcccacctggtgaacagcagctgccccggcctgatgtgcgtgttccagggctacagcagcaagggcctgatccagagaagcgtgttcaacctgcagatctacggcgtgctgggcctgttctggaccctgaactgggtgctggccctgggccagtgcgtgctggccggcgccttcgccagcttctactgggccttccacaagccccaggacatccccaccttccccctgatcagcgccttcatcagaaccctgagataccacaccggcagcctggccttcggcgccctgatcctgaccctggtgcagatcgccagagtgatcctggagtacatcgaccacaagctgagatag

SEQ ID NO: 218651 - DNA, 2133 bp, Artificial Sequence
  derived and/or modified sequence
atgggcggcaagcagagagacgaggacgacgaggcctacggcaagcccgtgaagtacgaccccagcttcagaggccccatcaagaacagaagctgcaccgacgtgatctgctgcgtgctgttcctgctgttcatcctgggctacatcgtggtgggcatcgtggcctggctgtacggcgaccccagacaggtgctgtaccccagaaacagcaccggcgcctactgcggcatgggcgagaacaaggacaagccctacctgctgtacttcaacatcttcagctgcatcctgagcagcaacatcatcagcgtggccgagaacggcctgcagtgccccaccccccaggtgtgcgtgagcagctgccccgaggacccctggaccgtgggcaagaacgagttcagccagaccgtgggcgaggtgttctacaccaagaacagaaacttctgcctgcccggcgtgccctggaacatgaccgtgatcaccagcctgcagcaggagctgtgccccagcttcctgctgcccagcgcccccgccctgggcagatgcttcccctggaccaacatcaccccccccgccctgcccggcatcaccaacgacaccaccatccagcagggcatcagcggcctgatcgacagcctgaacgccagagacatcagcgtgaagatcttcgaggacttcgcccagagctggtactggatcctggtggccctgggcgtggccctggtgctgagcctgctgttcatcctgctgctgagactggtggccggccccctggtgctggtgctgatcctgggcgtgctgggcgtgctggcctacggcatctactactgctgggaggagtacagagtgctgagagacaagggcgccagcatcagccagctgggcttcaccaccaacctgagcgcctaccagagcgtgcaggagacctggctggccgccctgatcgtgctggccgtgctggaggccatcctgctgctggtgctgatcttcctgagacagagaatcagaatcgccatcgccctgctgaaggaggccagcaaggccgtgggccagatgatgagcaccatgttctaccccctggtgaccttcgtgctgctgctgatctgcatcgcctactgggccatgaccgccctgtacctggccaccagcggccagccccagtacgtgctgtgggccagcaacatcagcagccccggctgcgagaaggtgcccatcaacaccagctgcaaccccaccgcccacctggtgaacagcagctgccccggcctgatgtgcgtgttccagggctacagcagcaagggcctgatccagagaagcgtgttcaacctgcagatctacggcgtgctgggcctgttctggaccctgaactgggtgctggccctgggccagtgcgtgctggccggcgccttcgccagcttctactgggccttccacaagccccaggacatccccaccttccccctgatcagcgccttcatcagaaccctgagataccacaccggcagcctggccttcggcgccctgatcctgaccctggtgcagatcgccagagtgatcctggagtacatcgaccacaagctgagaggcgtgcagaaccccgtggccagatgcatcatgtgctgcttcaagtgctgcctgtggtgcctggagaagttcatcaagttcctgaacagaaacgcctacatcatgatcgccatctacggcaagaacttctgcgtgagcgccaagaacgccttcatgctgctgatgagaaacatcgtgagagtggtggtgctggacaaggtgaccgacctgctgctgttcttcggcaagctgctggtggtgggcggcgtgggcgtgctgagcttcttcttcttcagcggcagaatccccggcctgggcaaggacttcaagagcccccacctgaactactactggctgcccatcatgaccagcatcctgggcgcctacgtgatcgccagcggcttcttcagcgtgttcggcatgtgcgtggacaccctgttcctgtgcttcctggaggacctggagagaaacaacggcagcctggacagaccctactacatgagcaagagcctgctgaagatcctgggcaagaagaacgaggccccccccgacaacaagaagagaaagaagtag

SEQ ID NO: 218652 - DNA, 2133 bp, Artificial Sequence
  derived and/or modified sequence
atgggagggaagcagcgagatgaggatgatgaggcatatggcaagccagtaaagtacgacccctccttcagagggcctatcaagaaccgaagctgcactgatgttatttgctgcgtgctctttctgctttttattcttgggtacatagtcgttggtattgtagcatggctctacggagacccccgtcaggtgctgtatccgcggaactcaacaggagcctattgcggaatgggggagaataaagataagccttatctcctgtacttcaacatcttctcctgcattctctcgtccaacatcatctctgttgctgaaaatgggttgcagtgtccaacccctcaggtttgcgtgtcatcatgtccagaagacccctggaccgtgggaaagaacgagttctctcagaccgtaggggaagttttttacaccaagaataggaatttctgtcttcccggtgttccatggaatatgaccgtgattacttccttacagcaggagctctgccccagcttcctgctgcctagtgctcccgcccttggaagatgtttcccgtggaccaatgttaccccaccagccctaccaggaatcacaaacgacactacgattcagcaggggatctccggcctgattgatagtttgaatgccagggatatctcagtgaaaatctttgaggatttcgcacagtcttggtactggattctggtggctctaggagtggcattggtgttaagtctgttatttatcctgctcctgcgtctggtcgccggccctctggtccttgtactgattctgggcgtcctgggagtgctcgcatatgggatttactattgctgggaggaatatcgcgtgctacgtgataagggggcaagcatatcccagcttgggttcacaaccaatctgtctgcatatcagtcagtgcaggaaacctggcttgctgcgctgatcgtactggcagttctggaagcgattctccttctcatgctgatatttctgagacaacgcattcggattgcaatcgcactcctgaaagaggcttccaaagctgtggggcagatgatgagtaccatgttctaccctctggtaactttcgtcttgctcctgatttgtatcgcgtactgggccatgacggctctctatctcgccactagtggccaacctcaatacgtactttgggctagcaacatttcatctccaggctgtgagaaggtccccataaatacctcgtgtaatccaacagcacacctcgtcaattcttcatgtccgggattgatgtgtgtgtttcagggatatagtagcaaaggcctgattcaacgatcagtctttaatttgcaaatctacggtgtgctgggcctattctggaccctcaattgggtgcttgcgctgggacagtgcgtcctagccggtgcctttgcctcattttactgggcatttcacaaaccacaagatatacccacctttcctcttatctctgccttcattcgaacgttgcggtaccacactggctctctcgcattcggggcgctcattctgactctggtgcagatcgctcgcgtcatccttgaatacattgaccacaagctccggggggtacagaatcccgtggctcggtgtatcatgtgctgtttcaagtgctgcttgtggtgcttagagaagttcatcaaatttttaaaccggaatgcgtacatcatgatcgcaatatacgggaagaacttttgtgtgtcagcaaagaacgccttcatgctgttgatgagaaacattgtgagggtcgtggtgctcgataaggtgaccgacttgctgctattcttcggtaaactgctagtggtgggaggcgtgggggtcctatcattcttcttcttttctggtcgcatccctggactgggcaaagactttaaatcacctcatctgaactattactggctgcccatcatgaccagtatcctgggtgcctatgtcattgcttctggatttttctctgtcttcggtatgtgtgtagatactttatttctgtgttttctggaggacttggaacggaataacggctccctcgatagaccctactatatgagcaaatctctgcttaaaatcctcggaaagaaaaatgaggctccgccggacaacaaaaaacgtaaaaaatag

SEQ ID NO: 218653 - DNA, 2133 bp, Artificial Sequence
  derived and/or modified sequence
atgggaggcaaacaaagagacgaggacgatgaggcctatggcaaacccgtgaaatatgacccatcctttcgcggcccgatcaagaacaggtcctgtaccgatgttatctgttgcgttttgttcttgctcttcattctgggatacatcgtcgttgggatcgtggcatggctgtatggtgacccacggcaggtcctctatcctaggaactcaacaggggcgtattgcggcatgggtgagaacaaggataaaccatatttgctgtacttcaacatattctcatgcatcctttcgtcaaacattattagcgtggctgaaaatgggttacagtgtcccacaccacaggtgtgcgttagcagctgtccagaggacccttggaccgtaggtaagaacgagttttcccaaacagtgggcgaggtgttctataccaaaaaccgtaatttctgcctccctggcgtgccctggaacatgacagtgattactagcctgcagcaggaattatgtccttctttcttgctgccaagcgcgccggccctcggacgatgctttccctggaccaacgtgacccctccagccctgccaggcatcacaaacgacaccacaattcagcaaggcatcagcggattgatcgatagtctgaatgcgagggatatctctgtcaagattttcgaggactttgcccagagctggtactggatccttgtcgctctaggagttgccctcgttctttccttgctgttcatccttttattacgactggtcgccggtccattagtgctggtgttgatcctgggggtcttgggagtgctcgcatacggaatctattattgctgggaggagtacagagtactgcgggacaaaggcgcctccatctcacaactcggatttacaacgaacctgtcagcctatcagtccgtgcaagaaacctggctggctgccctgatcgtcctggccgtgctggaagctattctactcttgatgttgattttccttcggcaaagaattcggatcgcaatagccctcctgaaggaggcttccaaggcggtcggacagatgatgtcaactatgttttacccactggttacttttgtgctgctactgatttgcatcgcctattgggccatgacagccctctacctggcaacctccggtcagccccagtatgtcctctgggctagtaacatcagctccccggggtgtgaaaaggttcccattaatacgagctgcaatcccacagctcaccttgtcaattccagctgtccgggccttatgtgcgtgtttcagggctattcaagtaagggattgatccagagaagcgtctttaacctgcaaatttatggagtgttggggctcttctggacactgaattgggttctggctctgggacaatgtgtactcgcaggcgccttcgcaagcttctattgggcttttcataagccacaggacatcccaactttcccccttatcagcgccttcattcgaactctccgataccataccggaagtctcgctttcggggccctcattttgacactggtgcagatcgctagagtgattctcgagtatattgatcataagctgcgtggtgttcagaaccctgtggctcgatgcataatgtgttgcttcaagtgttgcctttggtgcttagagaaatttatcaagttcctgaaccggaacgcttatattatgatcgcgatctacggaaaaaatttctgtgtgtcagccaaaaatgcgttcatgttactgatgagaaacatagtccgagttgtagttttagataaggtcactgatctcctcctctttttcggtaaactgctggtcgtggggggcgttggggtcctgagcttcttctttttttctggtagaatacctgggctgggcaaggatttcaagtcaccacacttaaattactattggttgccaatcatgacatctattctcggcgcctatgtgatcgcgtcaggatttttttctgtgttcggaatgtgcgtggatactttgttcctgtgttttctcgaggacctggagcgcaataatgggtcactagatagaccatattacatgagcaagtccctgctgaagattttgggaaagaagaacgaggctccacccgacaacaagaaaagaaaaaaatag

SEQ ID NO: 218654 - DNA, 1236 bp, Artificial Sequence
  derived and/or modified sequence
tagagagacgaagatgacgaggcttacgggaaaccagttaagtatgacccatcctttaggggccccattaagaaccggagctgtacggatgtgatctgctgtgtcttatttctgctcttcatactcggctatatcgtggtgggaatagtggcgtggctctacggagacccccggcaggttctctaccccaggaattctaccggtgcatattgtgggatgggtgaaaacaaggacaagccctatctgttgtattttaatatcttctcctgtatcctctcttctaacataattagcgtagctgagaatggcttgcagtgccctactccacaggtgtgcgtgtcatcatgcccggaggacccttggacggtgggcaagaacgagtttagccagacagttggagaggtcttttacacgaagaacagaaacttttgtctccctggggtcccatggaatatgacagttatcacatcactgcagcaggagctctgtccttcgttcttgctgccaagcgcgccagctctaggccgatgtttcccatggacaaacgttactcctcctgccctccctggcattacgaatgataccaccattcaacaaggtatctcagggttgatcgattccctcaacgcccgcgacatatccgtgaagatctttgaagacttcgcgcagtcctggtattggatcctcgtcgctgttggccagatgatgagcacaatgttttacccccttgtgacattcgtgttgctgcttatatgcatcgcctattgggcaatgacagctctgtacctcgccactagcgggcagccccagtatgtattatgggctagtaatatttctagccctggatgtgaaaaggtgcccatcaacacatcctgcaacccgactgcccacctggtgaatagctcctgtcctggtctcatgtgcgtttttcaaggatactcatccaaaggcctaatccagaggtcagtgtttaatctccagatctacggcgtgctgggactgttttggactcttaattgggtcctggcacttggccagtgcgtgttggcaggcgcattcgccagcttttactgggcttttcacaagcctcaggacattccgactttcccactcatcagtgccttcataaggacactccggtaccatacaggtagcttggccttcggcgctctgattcttacgctagtccaaattgctcgtgtgattcttgagtatattgatcataaactgaggtag

SEQ ID NO: 218655 - DNA, 1236 bp, Artificial Sequence
  derived and/or modified sequence
tagagagacgaggacgacgaagcctacgggaagcccgtaaagtatgatccaagctttaggggcccaattaaaaaccggtcttgcaccgacgtgatttgctgcgtgctatttttgctctttatcttggggtatatcgtggtgggcatcgtcgcctggctgtacggagatccgcgtcaagttctgtatcctcgtaattctactggcgcctactgcggaatgggcgagaacaaggacaagccttatttactttatttcaacatcttttcatgcatcctgtcctctaatatcatttcagtggcggaaaatggtttgcaatgtccaactccccaggtctgtgtgtcctcatgccccgaggacccttggaccgtcggcaagaatgagttcagccagactgtgggagaggtgttttacactaagaaccgaaacttctgcttgccgggagtcccttggaacatgaccgtgatcacgagcctgcagcaggaattgtgcccctctttcttgttgccgagcgcccctgctctggggcggtgctttccctggaccaatatcactccacccgccctcccaggaatcaccaatgatactacgatccagcaaggcatttctggcctcatcgacagtctcaacgcgagggatatttctgtgaaaatctttgaggattttgcgcagtcttggtattggattcttgtcgctgtcggtcagatgatgtccaccatgttctatccccttgtgaccttcgtcctgctcctaatatgcatcgcttattgggcaatgaccgcactctatttagctacaagcggccagcctcagtacgtcctttgggctagcaacatttccagccctggttgcgaaaaggtccctatcaacaccagctgcaatcccacagcccacttggtgaatagcagttgtccgggcctgatgtgtgtcttccagggctactcatccaagggtctcatacaacggagcgtttttaacctgcagatttacggcgtcctgggtctgttttggaccctcaattgggtgttggctctgggtcaatgcgtgcttgccggtgccttcgccagtttttactgggcatttcacaaacctcaggatattcccaccttcccgttgatatctgcgttcattaggactctgcggtatcatactggtagcttagcatttggagcccttattctgactcttgtccagattgcacgagttattcttgagtatattgaccacaagctgcgctag

SEQ ID NO: 218656 - DNA, 2133 bp, Artificial Sequence
  derived and/or modified sequence
atgggaggaaagcaacgagacgaagacgacgaagcatatggtaaacccgtgaagtatgacccctccttcagggggcctattaaaaatagatcttgcaccgacgtcatctgctgtgttttgttcctcctgtttatccttggctacatcgtcgtggggatcgttgcctggctttatggagatcccagacaagtgctgtacccccgcaactccaccggagcttactgtggcatgggtgaaaacaaggataagccttaccttctgtattttaacatcttttcttgtatcctgtcttctaatattatttcagtcgccgagaatggtctgcaatgccctactccgcaggtctgcgtgagcagctgtcccgaagacccctggactgtgggcaagaacgaatttagccagactgtcggtgaggtgttttacactaaaaatcgcaacttctgtctgcccggtgttccatggaacatgaccgtcataaccagtctgcagcaggagctgtgcccttctttcctgctgccatcagctcccgcgctgggccggtgctttccatggactaatattacccctcccgcacttcccgggataaccaacgacaccacaatacagcagggaattagtgggttaattgacagcctgaatgcgcgcgatataagcgtcaagatattcgaggactttgcgcagtcctggtactggattttggtggcactgggagtagcccttgtgctgtcgctgttgttcatcttactgctgcggctggtggctggacccctggttctggtgttaattctcggtgtcctgggagttctggcctacggcatctactattgctgggaggagtatagggttcttcgcgataagggcgcgtcaatcagtcaactcggattcacaactaacctgtccgcttatcagagcgtgcaggaaacatggctggctgctctgatcgtgctggccgtcttagaagcaatcctgctgttagtgctgatcttcctccgccaaaggattaggatcgcaattgcactcctcaaggaggcatctaaagcagtgggccagatgatgtccaccatgttctaccctttagtgactttcgttctcctgctaatctgtatcgcatattgggccatgactgcactgtatctcgctacttctgggcagccccagtatgttctctgggcatcaaacatttccagccccgggtgcgagaaagtacccattaacactagttgcaacccgacggcccatcttgtgaatagcagttgcccgggcctgatgtgcgtttttcagggatattctagcaaaggcctgattcagcggtcagtattcaaccttcaaatctatggcgtccttggtctgttctggacactgaattgggtgctcgccctggggcagtgcgtccttgctggagcatttgcctccttctactgggcgtttcataagccacaggatatccctacattcccacttatctccgcgtttatcaggacactccggtaccataccggcagcttagcttttggggctttgattcttactctcgtccagattgcacgcgtaatcctcgaatatatcgatcacaaacttcgaggcgttcagaatcccgtggcccgttgtatcatgtgttgcttcaagtgctgtctatggtgcctggaaaagtttataaagttcctcaatcgaaacgcatacattatgatcgctatctacggaaagaatttctgcgtgagcgccaaaaacgcattcatgttgctcatgcggaatatcgtcagagtcgtggtcctcgataaggttacagaccttctcctcttctttggcaagctgctggttgtggggggcgtcggggttttaagcttttttttcttttccggtcggattcccgggctaggaaaggactttaagtccccccacctcaattattactggttgccaatcatgaccagcattctgggtgcctacgtcatcgcaagtggcttcttctcagtgttcggaatgtgcgtggacaccctgtttctctgttttttggaggacttagaacgcaataacgggagccttgatcggccatactatatgtctaagagtctgcttaagatcttgggaaagaagaacgaagcacctcccgataacaaaaagaggaagaagtag

SEQ ID NO: 218657 - DNA, 2133 bp, Artificial Sequence
  derived and/or modified sequence
atgggcgggaaacaaagggacgaagatgacgaggcctacgggaaacccgtgaagtacgaccctagctttcggggccctatcaagaaccggagttgcaccgatgtcatatgctgcgtcttattcctgttatttatcctcggttacatagtggttggtatcgtcgcatggctgtatggtgatcccaggcaggttctctatcctcgtaatagcaccggcgcgtattgcggaatgggcgagaacaaggacaagccttatttactgtacttcaatatcttctcctgcatattaagctcaaacattatttctgtagcagagaatggactccagtgtccgacaccccaagtttgtgtctcctcttgcccagaagacccttggacagttggaaaaaatgagtttagtcagacggtgggggaagttttttacacaaagaaccggaacttctgtctgccgggcgtgccatggaatatgaccgtgattaccagcctgcaacaggagctgtgtccaagttttctcttgcccagcgctcctgcccttggacgttgctttccctggaccaatattacccccccagctctgccagggattaccaatgacacaacgatccagcaggggataagcgggttaatagatagcctaaacgcacgcgatatctccgtaaagatctttgaggattttgcacagagctggtactggattctggtggcactgggcgtagctcttgtgttatcacttctattcattctgctcctaagattagtggccggtccgctggtgctagttctcattcttggggtgctgggggtgctcgcttacggaatctattactgttgggaggaataccgggttctacgagataagggcgccagtatcagtcagctgggctttactaccaacctgtccgcatatcaaagtgttcaagagacctggttagcagccctcatcgtcttagcagtgctagaagccattcttctgttagttttgatcttccttagacagagaatcagaatcgccatcgccctcctcaaggaggcgtccaaagccgtgggccagatgatgagcactatgttttatcctctggtcacattcgtattattactgatatgcatcgcttactgggctatgaccgccttgtatctggctacctcggggcagccccagtacgtgctctgggcctccaacatcagctctcctggatgcgaaaaagtccctatcaataccagctgcaacccgaccgcccatctggtgaactcttcctgtcctggcctaatgtgtgtgtttcaggggtatagctcaaaagggctaatccagcgctctgtcttcaaccttcagatatacggcgttttaggtctcttctggaccctaaattgggtgcttgcgcttggacagtgtgtgttggcaggagcctttgctagtttctattgggccttccacaaaccacaggacatacccaccttcccactgatttccgcatttattaggaccctgaggtaccacactgggtctttggccttcggagcccttattctaactctggtgcaaatcgcgcgcgtaattctagaatacatcgatcacaaattacgcggcgtacagaaccctgtcgccagatgtatcatgtgctgtttcaaatgttgcttatggtgcctggagaagtttattaagttcctgaatcgaaatgcgtacatcatgatcgccatctacggaaaaaatttctgtgtctcagccaagaacgcctttatgctcctgatgaggaatattgtgcgggttgtcgtgcttgacaaggttacagatctcctgctgtttttcggaaaactgctcgtggtggggggcgtcggagtgctgtccttctttttcttttctggcaggatacccggcctcgggaaagactttaaaagcccacacctcaactactactggttgccaataatgacatctatcctcggagcatatgtgattgcctccggctttttttctgtgtttggtatgtgtgtggacaccttattcctgtgctttctggaagatcttgaacggaacaatggctccttagaccggccatactacatgtctaaaagtctgctcaagatcctcgggaaaaagaacgaggcaccaccggacaataaaaaaagaaaaaagtag

SEQ ID NO: 218658 - DNA, 2133 bp, Artificial Sequence
  derived and/or modified sequence
atgggcggtaagcagagggacgaagatgatgaagcttacggaaagcccgtcaagtacgacccatccttcaggggtcctataaagaaccgaagttgcacagacgttatttgttgtgtactctttctcctatttatcttgggttacattgtggtaggtattgtcgcatggctgtatggcgatcctcggcaggtgctctatccgaggaactccaccggggcctactgtggcatgggcgaaaataaagataagccatacctgctatatttcaacatcttctcgtgcatcttgagctccaacatcatctccgtggccgaaaacggtcttcaatgtccaactccccaggtttgtgtttcctcttgccctgaggatccctggacagtgggcaaaaatgagttttcccaaaccgtaggtgaggtgttttataccaaaaaccgcaatttttgtttgcctggcgtgccatggaacatgacggtgattaccagtctccagcaggagctgtgcccttcatttttgctcccatccgcccccgctctgggacggtgcttcccttggaccaacgttactccccccgccttgcctggaattaccaatgacactaccattcaacaaggcatctctggactgatcgatagcctgaatgcccgcgatatctcagtgaagatatttgaagattttgctcagagctggtactggatcctggtcgctctgggggtggcattggtgttatctctgctgttcattcttttgcttagactagtggccggaccccttgtgctggtgcttattctgggagtgctcggagttctggcatacgggatctactactgttgggaagagtaccgagtgcttagggataagggcgctagtatctctcagttggggtttacgacgaatctaagcgcataccagtcagttcaagaaacctggctggctgccctgatcgtgttagccgtactggaagccatactgctgctgatgctcatctttttgcgccagagaatccgcattgctattgctctgttgaaagaggcctctaaagctgtgggacagatgatgagcaccatgttttacccgctcgttacatttgtcttgcttcttatttgcattgcttattgggcgatgactgcattgtatctagcaacctccggccagcctcagtatgtactgtgggctagcaatatatccagtcctggttgtgagaaagtgcccattaacaccagttgcaatcccacagcacatttggtgaactcatcctgtcccggccttatgtgtgtcttccagggatactcgagtaaaggcctgattcagagatcagtttttaacttgcagatttatggtgtactcggtctcttctggacccttaactgggtgttggctctggggcagtgcgtgcttgctggagccttcgcgagtttctattgggcctttcataaaccacaggatatacctacattccctctgatttctgcttttatccgcactctgcggtatcacaccgggtcactggctttcggcgctctgattctcaccttggtgcagatcgcacgggtgatcctcgagtatattgaccacaagctgaggggtgtgcaaaaccctgtggccagatgcatcatgtgctgttttaagtgttgtctatggtgtctcgagaagttcattaaattcttgaacagaaacgcgtatatcatgattgcgatttacggcaagaatttttgcgtttcagccaaaaatgcctttatgctgctaatgcgaaacatcgttagagtggtcgtactggacaaagtgaccgacctgctcctcttctttggaaagctcttggtcgtgggaggcgtaggtgtgttatcttttttctttttctctggaagaatcccgggcctcggaaaagatttcaaatcaccccacctgaactactattggctaccgatcatgacctccattctgggagcttacgttattgcctctggcttcttcagtgtgttcgggatgtgcgtagatactctctttctgtgctttttagaggatctggaacgaaataacggatccctcgacagaccatactacatgtccaagtcattgctgaaaatcttaggcaaaaagaacgaggcaccaccggacaacaaaaagaggaagaagtag

SEQ ID NO: 218659 - DNA, 1236 bp, Artificial Sequence
  derived and/or modified sequence
tgacgcgacgaagacgacgaagcctatggaaaaccggtgaaatacgaccctagcttccggggccctatcaaaaataggagctgcacagatgtgatttgttgcgtgctgttcctgctgttcatactcggatacatagtcgtgggcattgtcgcctggctgtatggagatcccagacaggtcctgtaccccaggaactccactggtgcatactgtggtatgggagagaataaagataaaccctacctgctttactttaatatattcagctgcatcctgagcagcaatattatctcagttgccgagaatggactgcagtgtcccacccctcaggtgtgtgtatctagttgtccagaggacccctggaccgtgggtaagaacgagtttagccaaacagtcggagaagtgttctacactaagaatcgtaacttctgcctgccaggagtgccatggaacatgacagtgattacaagcctgcagcaggagctgtgtcccagcttcctcctgccctcagcacccgcactcggacggtgtttcccgtggacaaacgtaacgccccctgcgttgcctggtattacaaatgatactaccattcagcaaggcattagtggactgatcgactcgctgaatgcccgcgacattagcgtcaagatctttgaggattttgcacaatcctggtattggatcctggtggctgtcggccagatgatgagtaccatgttttaccctctagtaactttcgtactgcttctcatttgcattgcctactgggctatgactgccctgtacctcgcaaccagtggtcagccgcagtacgtactttgggcttcaaacatatcctcaccaggctgtgaaaaggtgccgatcaatacgtcttgtaacccgactgcccaccttgtgaattcctcttgtccgggtctgatgtgtgtctttcaggggtactcctctaagggattgatccagagatcagtgttcaacctgcagatctacggggtgcttggactgttctggaccctgaactgggttctggccctgggccagtgtgtgctggctggcgcatttgccagcttttactgggccttccataaaccccaggacatcccaaccttccccctgatcagcgcatttatcaggacattacgttaccacacagggtccctggcctttggggcgctcatcttaaccctggtgcagattgctagggtgatcctggagtatatagaccataagctgcgctag

SEQ ID NO: 218660 - DNA, 1236 bp, Artificial Sequence
  derived and/or modified sequence
tgacgcgatgaggatgatgaggcatacggcaaaccggtaaagtatgacccttcttttagaggacccataaagaatagatcttgcaccgatgtgatctgctgcgttctgtttcttctttttattctgggctacatcgtggtcggtattgtggcttggctctatggagaccccaggcaggtgctgtaccctcgaaattcaaccggcgcgtactgcggtatgggagaaaataaagacaagccctaccttctttactttaacattttttcttgcatcctgtccagtaatatcatctctgtggcggaaaacggcctgcagtgtccaactccccaggtatgcgtgagtagctgtcccgaggatccatggactgttggaaagaatgaattctcccagacagtgggcgaagttttctacaccaagaacagaaacttttgcctgccaggcgtcccctggaatatgactgtgatcacatcactacaacaggagctgtgtccctcatttttgctgccctccgcccctgcccttggacgttgcttcccgtggacaaacgtaactccgcctgcattgcctgggattacaaatgacaccaccatccagcagggcatctctggactgattgattctctcaacgctagggatatttccgtgaagatttttgaggactttgcccagtcttggtattggatcctcgtggccgttggtcagatgatgtcaaccatgttctacccgttggtgacctttgtgctgctccttatctgtattgcttattgggccatgactgctctgtatctcgctacatcaggccaaccacagtatgtcctttgggcgagcaacatctccagccccggatgcgagaaagtgccgattaacacctcatgtaaccccaccgcacacctggtgaacagcagctgccccggtctgatgtgtgtgtttcaggggtattcatcaaagggactaatacaaaggtcagtgtttaacctacaaatctatggcgtcctggggttattctggactctcaattgggttctggccctaggtcagtgtgttttggcgggggcattcgcctccttttactgggctttccacaagccgcaggacataccgactttccctctcatcagcgcctttatccgcaccctgaggtaccatacaggatcgctggcttttggagccttgattctcacacttgtgcaaatcgccagggtaattctggagtacatcgaccataagctccgttag

SEQ ID NO: 218661 - DNA, 1236 bp, Artificial Sequence
  derived and/or modified sequence
tgaagagacgaggatgacgaagcttacggtaagccagtgaaatacgacccaagctttcgcgggccaattaagaatagaagctgcaccgacgtgatttgctgcgtactgttcctactttttattctgggctatatcgtggttggaatagtggcctggctatacggcgaccccaggcaggtgctgtacccacggaatagcacgggggcctattgtggcatgggggaaaacaaggacaagccttatcttctctatttcaatatcttctcctgcatcttgtcatccaatatcatctcagtggccgagaacggactccagtgccctactccacaggtatgcgtttctagctgtccggaggatccctggacagtgggaaagaacgagttctcccaaaccgtgggcgaggttttttatactaagaatcggaacttctgccttcccggggttccgtggaacatgaccgtgattacaagcctccagcaagagctctgtccttcctttctgttaccttcggcgcctgcactggggcggtgcttcccctggacaaacattacccctcctgccctgccaggcataactaatgacacaactattcaacagggcatctcaggtctcattgatagtctcaacgcaagagatatttctgttaagatcttcgaggactttgctcagtcttggtactggatcctcgtggctgttggccagatgatgtcaaccatgttttatccactggtcacctttgtgttgctgctgatttgcattgcttactgggccatgacagctttatacctagccacctccgggcagcctcagtatgtgctgtgggccagtaatatctctagcccgggttgtgaaaaggttccgattaatacgagttgtaaccccacggcccatctggttaatagctcctgtcccggcctgatgtgcgtgttccaaggttatagctcaaaggggttaatccagcgcagtgtgttcaacctacagatctacggtgtcctcggccttttttggactcttaactgggtgcttgctctgggccagtgtgtcttggccggagccttcgctagtttttactgggcatttcacaagccacaggatattccaacctttcctctcatttccgccttcatcagaacattaaggtaccacaccggatcccttgcattcggcgcactgatcctaacactggtgcagattgcccgcgtgattctggagtatatagaccataagctgcggtag

SEQ ID NO: 218662 - DNA, 2133 bp, Artificial Sequence
  derived and/or modified sequence
atgggcgggaagcagagagacgaagatgacgaggcatatggaaaacccgtcaagtacgacccttcctttcgcgggccgatcaagaaccgtagctgtacagatgtgatttgctgcgtgctgttcctgcttttcatactcgggtacattgttgtcggcatcgtagcatggctctacggtgacccccgtcaggtgctgtacccaagaaatagtacaggggcatattgtggaatgggcgagaataaagacaaaccttacctgctatactttaacatcttctcttgcatcttgtcctctaatattatctcagttgctgaaaacggactgcagtgtccaacgccacaggtttgtgtttccagttgccccgaagacccgtggacagttggtaagaatgaatttagccagactgtgggggaagtattctacacgaagaatcgcaatttctgtctgccaggagtgccttggaatatgaccgtaattacttccctgcaacaagagctttgtccctcctttctgctgccgagtgcacccgcccttggcaggtgcttcccttggactaatattacccctccggccctccctgggattactaatgacaccaccatacaacaaggaataagtggcctgatagactctttgaacgcccgtgatatctccgttaagatctttgaggacttcgctcagtcttggtattggattctggtggcattaggggtagcactggtcctgtccctccttttcatcttgctcttgcgattagtggccggccctctggtcctcgttctaattctgggtgtgcttggtgtcctggcttacggtatttattactgttgggaggaataccgagtgctgcgtgacaagggtgccagcattagccagctaggcttcacaaccaacttatcagcctatcagagcgtacaggagacatggctggccgcactgattgtcttggctgtcctggaagccattctcttactcgtgctaatattcttgcgtcagaggattaggattgccatcgcgctgctgaaagaagcttcgaaggcagtggggcaaatgatgagtactatgttttaccccctcgtgacattcgtcctgctgttgatatgtatcgcatattgggcgatgaccgccctatacttggcaacatcagggcagccccagtatgttctctgggccagcaatatttctagcccggggtgcgaaaaagtgcccattaacactagctgtaaccctactgcccaccttgtgaattcgtcctgtccgggactcatgtgcgtttttcaggggtacagcagtaaaggactcatccagaggtcagtctttaatcttcaaatatacggcgttctcggcctcttctggacgttgaattgggtgttagcactggggcagtgtgtactagccggtgcatttgccagcttttactgggccttccacaaacctcaggacatccccaccttccccttaatcagcgcttttatccggaccctccgctatcacactggatcccttgcgttcggcgcattgattctcacactagtccagattgctcgtgttatcttggagtacatcgatcacaaactccggggcgtgcagaatcctgtcgctaggtgtatcatgtgttgcttcaaatgttgcctttggtgtctagaaaagttcatcaagtttctgaaccgaaacgcttacatcatgatcgccatctatgggaaaaacttctgcgtgtctgcaaaaaacgcttttatgctgcttatgcgaaacattgtcagggttgtagttctggataaagtgacggacctgctgcttttttttggcaaattgctggtggtggggggcgtcggagtgttgtcattcttctttttcagcgggcgcatcccaggcctcggtaaagactttaagagtcctcatctgaactattattggctgcctatcatgacatctatcctcggggcctacgtcattgcctccggcttttttagcgtgtttgggatgtgcgtcgatacactcttcctgtgttttctggaagatctggaacgaaataatggaagtctggatagaccgtactatatgagcaaaagcctgttgaagattctgggcaaaaaaaacgaagcaccacctgataacaagaaacgcaaaaaatag

SEQ ID NO: 218663 - DNA, 1236 bp, Artificial Sequence
  derived and/or modified sequence
tagcgcgacgaagatgatgaagcatatggaaaacccgtcaagtatgacccatcgttcagaggtccaattaagaatagatcttgtacagatgtaatatgttgtgtgttgttcctcctcttcatcctgggatacatcgtggtgggcattgtggcttggctgtatggagatccacggcaggtgctttatcccagaaattcaacaggggcatattgcggcatgggggagaacaaggacaagccttatctgctgtactttaacattttctcctgcatcctgtcatccaacatcatatctgtggccgaaaatgggttgcagtgcccaacccctcaagtttgcgtatcttcctgccccgaggatccttggaccgtgggcaaaaacgagtttagccaaaccgttggtgaggtgttctacaccaaaaatcggaatttctgcttacccggcgtgccttggaacatgacagtgataacttctctgcagcaagagctgtgcccaagcttcctgctgccgtcagctcctgccctgggtagatgtttcccatggaccaacatcactcccccggccctgccaggaattacaaacgataccactattcagcagggaatctccggtttgattgacagtctgaacgctagggacatttctgtcaaaatattcgaggacttcgctcagtcctggtattggattctggtggcggtgggccagatgatgtcgacgatgttttatccccttgttacatttgtcctgctcctgatctgtatcgcatactgggctatgaccgcattatacctggcgactagtgggcaaccgcaatatgtgttatgggcctccaacatttcttctccaggttgcgagaaagtgcctataaacacgtcatgcaatcccacagctcatctagttaattccagttgccccggcctgatgtgcgtttttcagggctacagctccaaagggttaattcagaggagcgtgttcaatttacagatttatggggtgcttggcctgttttggactctgaattgggtgctggcactggggcaatgcgtgctagccggcgcgttcgccagtttttactgggctttccacaagcctcaggacatcccaacctttcccctaatcagcgcattcatccgaaccctcagataccacacgggatcactggctttcggggctttaattctaactcttgtgcaaatcgctagggttattctggagtacattgatcataagttgagatag

SEQ ID NO: 218664 - DNA, 2133 bp, Artificial Sequence
  derived and/or modified sequence
atgggaggaaagcagagagacgaggatgacgaggcctacggaaagccggtgaaatacgatccaagtttcagaggcccgattaaaaacaggtcctgtacagacgtaatttgctgtgtactgttcctgctctttatcctgggatacatcgtggttgggatcgtcgcttggttatacggtgatccgcgccaggttttataccccagaaactccaccggtgcttactgcggcatgggtgagaataaggacaagccctacttactttattttaacatcttcagctgcattcttagcagcaatattataagtgtcgccgagaacgggctccagtgtcccaccccccaggtctgcgttagttcctgtcccgaggacccctggacagtgggcaaaaacgaattctctcagactgtcggagaggtcttctacacaaaaaatcgtaacttttgcctccccggagtgccttggaacatgacagttattaccagtctccagcaggagctgtgtccctcctttctactgcctagcgctccagctctgggacggtgctttccctggaccaatgtaacgccccctgctctgcccggaatcacaaatgacaccaccatccagcagggtatcagcgggctgattgattcactaaacgcgagggatatatctgtaaagatttttgaggactttgctcagtcatggtattggatactggtggcccttggtgtcgctttggtgctgtcacttctgtttatcctactcctaaggctggtcgctggaccgttagttcttgtcctcatccttggcgtcctgggtgtcttggcctatggcatctactactgttgggaggaatatcgtgtactacgcgataagggtgccagcatttcacaattgggattcaccaccaatctgtcagcgtaccagagcgttcaggaaacttggctggcagccctcatcgtcctcgccgtgttggaggcaatcctgctcctgatgttaattttcttacggcaaagaatccgcatcgcgatcgctctactgaaggaagcttcaaaggccgtgggtcagatgatgagtactatgttctatcctttggtaacatttgtcctgctcctgatttgcattgcctattgggccatgaccgcattgtatctggcaacgtctggccagccccagtacgtgttgtgggcatccaatatctcttccccgggctgcgagaaggtccctataaataccagctgcaatcccaccgctcatctggtaaattccagttgccccgggctgatgtgcgtattccagggctactcttcaaagggactcatccagagaagtgtgttcaacctgcagatctacggtgtgcttggcctcttttggaccctgaactgggtgctcgcactaggtcagtgcgtgctcgcgggtgcctttgcaagtttttactgggcctttcacaagccccaagacattcctacttttcccctgattagtgcctttatccgcacacttagataccatactggtagtctcgcctttggtgccctgatcctgactcttgtccagatcgcccgagttatcctggagtatatcgaccataagctgcgaggggtgcaaaaccctgtggccaggtgtatcatgtgttgctttaaatgctgcctatggtgtcttgaaaagttcattaagttcttgaacaggaatgcctatatcatgatcgccatctacggtaagaacttctgcgtgtctgctaaaaatgcattcatgttactgatgcggaatatcgtacgagttgttgtcctggacaaggtgactgacctgctgcttttcttcggaaaattgcttgtcgtaggcggtgtgggagtgctgtctttcttctttttctcgggccggatacctggtctcggtaaggacttcaaaagcccacacctgaattattattggctacctattatgacaagtatcttgggcgcctatgtgattgcaagtgggttctttagtgtattcggaatgtgcgtcgatactctgttcctatgtttcctggaggatctggaacgcaacaacggatctctggacagaccttattacatgtccaaatctttgctgaaaatcctcggtaagaaaaatgaagccccccctgataacaaaaaaagaaaaaaatag

SEQ ID NO: 218665 - DNA, 1236 bp, Artificial Sequence
  derived and/or modified sequence
tgaagggacgaagatgacgaagcctacggcaaacctgtaaaatacgatccaagctttcgcggcccaattaaaaacagatcttgtacagatgtgatatgctgcgtgctgtttctcctctttatcttgggatacatcgtggtaggtattgtggcttggctgtacggtgatcctcgccaggtcctctatcctaggaactcgactggcgcatattgcggcatgggcgagaataaggacaagccctaccttctttatttcaatatatttagttgcatcctgagcagtaacattatctcagtggccgaaaacggattacagtgccctacgccacaggtgtgcgtgtctagttgcccggaagatccttggaccgtcggcaagaacgaatttagccagacggttggggaagtgttttacacgaagaatagaaatttttgcctccccggcgtgccctggaacatgaccgtcataaccagtttgcagcaagaactgtgtccatcattcttgctcccaagtgcaccggccctgggaagatgttttccctggactaatgtgaccccccctgccctgcccggcatcacaaacgacactacgattcagcagggcattagtggcctgattgactcactgaatgcgcgggacatttccgttaagatatttgaagactttgcgcagtcgtggtactggatacttgtggcagtcggccagatgatgtccaccatgttttacccccttgtcacgttcgtgctgctcctcatctgcatagcttattgggccatgactgccctgtatcttgccacttccgggcaaccccagtacgtgttgtgggctagcaacatttcctctcccggctgtgagaaagtgcctatcaacacttcttgcaatccaacagcgcatctagttaacagcagctgtcctggtctgatgtgtgtgttccagggctatagctccaaaggcctgatacagcgctctgtattcaacctacagatctatggggtcctcggactcttttggacactcaattgggtgctagcacttgggcagtgcgtcttggctggagcctttgcttccttttactgggcttttcataaaccgcaggacattcccactttcccactgatatcggctttcatccgtacactaaggtatcacacaggctctttggcgtttggcgccctgatactgactctcgtgcagatagccagggtaattttagagtatatcgaccacaagcttaggtag

SEQ ID NO: 218666 - DNA, 2133 bp, Artificial Sequence
  derived and/or modified sequence
atgggcggcaagcagagagatgaagatgatgaggcctacggcaagcctgtgaagtatgaccccagcttccggggccccatcaagaacagaagctgcacagatgtgatctgctgcgtgctcttcctgctcttcatcctgggctacatcgtggtgggcatcgtggcctggctgtatggagacccccggcaggtgctgtaccccaggaacagcactggagcctactgcggcatgggagagaacaaggacaagccctacctgctgtacttcaacatcttcagctgcatcctgagcagcaacatcatctctgtggctgaaaatggcctgcagtgccccaccccccaggtgtgtgtgagcagctgcccagaggacccctggacagtgggcaagaatgagttcagccagacagtgggggaggtgttctacaccaagaacagaaacttctgcctgcccggggtgccctggaacatgaccgtcatcaccagcctgcagcaggagctgtgccccagcttcctgctgcccagcgccccagccctgggccgctgcttcccctggaccaacgtgaccccaccagccctgcccggcatcaccaatgacaccaccatccagcagggcatcagcggcctgattgacagcctgaatgcccgggacatctctgtgaagatctttgaagattttgcccagagctggtactggatcctggtggccctgggcgtggccctggtgctgagcctgctcttcatcctgctgctgcggctggtggccggccccctggtgctggtgctgatcctgggcgtgctgggcgtgctggcctacggcatctactactgctgggaggagtacagagtgctgcgggacaagggggccagcatcagccagctgggcttcaccaccaacctgagcgcctaccagagcgtgcaggagacctggctggccgccctgattgtgctggccgtgctggaggccatcctgctgctgatgctgatcttcctgcggcagaggatccgcatcgccatcgccctgctgaaggaggccagcaaggctgtgggccagatgatgagcaccatgttctaccccctggtgacctttgtgctgctgctgatctgcatcgcctactgggccatgacagccctgtacctggccaccagcggccagccccagtatgtgctgtgggccagcaacatcagcagccctggctgtgagaaggtgcccatcaacaccagctgcaaccccacagcccacctggtgaacagcagctgccccggcctgatgtgtgtgttccagggctacagcagcaagggcctcatccagaggagcgtcttcaacctgcagatctatggagtgctgggcctcttctggaccctgaactgggtgctggccctgggccagtgtgtgctggccggggcctttgccagcttctactgggccttccacaagccccaggacatccccaccttccccctcatcagcgccttcatccgcaccctgcgctaccacacaggcagcctggccttcggggccctgatcctgaccctggtgcagatcgcccgggtcatcctggagtacatcgaccacaagctgcggggcgtgcagaaccctgtggcccgctgcatcatgtgctgcttcaagtgctgcctgtggtgcctggagaagttcatcaagttcctgaacagaaatgcctacatcatgattgccatctacggcaagaacttctgtgtgtctgccaagaatgccttcatgctgctgatgagaaatattgtgcgggtggtggtgctggacaaggtgacagacctgctgctcttcttcggcaagctgctggtggtgggcggcgtgggcgtgctgtccttcttcttcttcagcggccgcatccctggcctgggcaaggacttcaagagcccccacctgaactactactggctgcccatcatgaccagcatcctgggcgcctacgtgattgccagcggcttcttctctgtgtttggcatgtgtgtggacaccctcttcctgtgcttcctggaggacctggagaggaacaacggcagcctggaccggccctactacatgagcaagagcctgctgaagatcctgggcaagaagaatgaggcccccccagacaacaagaagaggaagaagtag

SEQ ID NO: 218667 - DNA, 1236 bp, Artificial Sequence
  derived and/or modified sequence
tgaagagatgaagatgatgaggcctacggcaagcctgtgaagtatgaccccagcttccggggccccatcaagaacagaagctgcacagatgtgatctgctgcgtgctcttcctgctcttcatcctgggctacatcgtggtgggcatcgtggcctggctgtatggagacccccggcaggtgctgtaccccaggaacagcactggagcctactgcggcatgggagagaacaaggacaagccctacctgctgtacttcaacatcttcagctgcatcctgagcagcaacatcatctctgtggctgaaaatggcctgcagtgccccaccccccaggtgtgtgtgagcagctgcccagaggacccctggacagtgggcaagaatgagttcagccagacagtgggggaggtgttctacaccaagaacagaaacttctgcctgcccggggtgccctggaacatgaccgtcatcaccagcctgcagcaggagctgtgccccagcttcctgctgcccagcgccccagccctgggccgctgcttcccctggaccaacgtgaccccaccagccctgcccggcatcaccaatgacaccaccatccagcagggcatcagcggcctgattgacagcctgaatgcccgggacatctctgtgaagatctttgaagattttgcccagagctggtactggatcctggtggccgtgggccagatgatgagcaccatgttctaccccctggtgacctttgtgctgctgctgatctgcatcgcctactgggccatgacagccctgtacctggccaccagcggccagccccagtatgtgctgtgggccagcaacatcagcagccctggctgtgagaaggtgcccatcaacaccagctgcaaccccacagcccacctggtgaacagcagctgccccggcctgatgtgtgtgttccagggctacagcagcaagggcctcatccagaggagcgtcttcaacctgcagatctatggagtgctgggcctcttctggaccctgaactgggtgctggccctgggccagtgtgtgctggccggggcctttgccagcttctactgggccttccacaagccccaggacatccccaccttccccctcatcagcgccttcatccgcaccctgcgctaccacacaggcagcctggccttcggggccctgatcctgaccctggtgcagatcgcccgggtcatcctggagtacatcgaccacaagctgaggtag

SEQ ID NO: 218668 - DNA, 1236 bp, Artificial Sequence
  derived and/or modified sequence
tgaagagatgaagatgatgaggcctacggcaagcctgtgaagtatgaccccagcttccggggccccatcaagaacagaagctgcacagatgtgatctgctgcgtgctcttcctgctcttcatcctgggctacatcgtggtgggcatcgtggcctggctgtatggagacccccggcaggtgctgtaccccaggaacagcactggagcctactgcggcatgggagagaacaaggacaagccctacctgctgtacttcaacatcttcagctgcatcctgagcagcaacatcatctctgtggctgaaaatggcctgcagtgccccaccccccaggtgtgtgtgagcagctgcccagaggacccctggacagtgggcaagaatgagttcagccagacagtgggggaggtgttctacaccaagaacagaaacttctgcctgcccggggtgccctggaacatgaccgtcatcaccagcctgcagcaggagctgtgccccagcttcctgctgcccagcgccccagccctgggccgctgcttcccctggaccaacatcaccccaccagccctgcccggcatcaccaatgacaccaccatccagcagggcatcagcggcctgattgacagcctgaatgcccgggacatctctgtgaagatctttgaagattttgcccagagctggtactggatcctggtggccgtgggccagatgatgagcaccatgttctaccccctggtgacctttgtgctgctgctgatctgcatcgcctactgggccatgacagccctgtacctggccaccagcggccagccccagtatgtgctgtgggccagcaacatcagcagccctggctgtgagaaggtgcccatcaacaccagctgcaaccccacagcccacctggtgaacagcagctgccccggcctgatgtgtgtgttccagggctacagcagcaagggcctcatccagaggagcgtcttcaacctgcagatctatggagtgctgggcctcttctggaccctgaactgggtgctggccctgggccagtgtgtgctggccggggcctttgccagcttctactgggccttccacaagccccaggacatccccaccttccccctcatcagcgccttcatccgcaccctgcgctaccacacaggcagcctggccttcggggccctgatcctgaccctggtgcagatcgcccgggtcatcctggagtacatcgaccacaagctgaggtag

SEQ ID NO: 218669 - DNA, 2133 bp, Artificial Sequence
  derived and/or modified sequence
atgggcggcaagcagagagatgaagatgatgaggcctacggcaagcctgtgaagtatgaccccagcttccggggccccatcaagaacagaagctgcacagatgtgatctgctgcgtgctcttcctgctcttcatcctgggctacatcgtggtgggcatcgtggcctggctgtatggagacccccggcaggtgctgtaccccaggaacagcactggagcctactgcggcatgggagagaacaaggacaagccctacctgctgtacttcaacatcttcagctgcatcctgagcagcaacatcatctctgtggctgaaaatggcctgcagtgccccaccccccaggtgtgtgtgagcagctgcccagaggacccctggacagtgggcaagaatgagttcagccagacagtgggggaggtgttctacaccaagaacagaaacttctgcctgcccggggtgccctggaacatgaccgtcatcaccagcctgcagcaggagctgtgccccagcttcctgctgcccagcgccccagccctgggccgctgcttcccctggaccaacatcaccccaccagccctgcccggcatcaccaatgacaccaccatccagcagggcatcagcggcctgattgacagcctgaatgcccgggacatctctgtgaagatctttgaagattttgcccagagctggtactggatcctggtggccctgggcgtggccctggtgctgagcctgctcttcatcctgctgctgcggctggtggccggccccctggtgctggtgctgatcctgggcgtgctgggcgtgctggcctacggcatctactactgctgggaggagtacagagtgctgcgggacaagggggccagcatcagccagctgggcttcaccaccaacctgagcgcctaccagagcgtgcaggagacctggctggccgccctgattgtgctggccgtgctggaggccatcctgctgctggtgctgatcttcctgcggcagaggatccgcatcgccatcgccctgctgaaggaggccagcaaggctgtgggccagatgatgagcaccatgttctaccccctggtgacctttgtgctgctgctgatctgcatcgcctactgggccatgacagccctgtacctggccaccagcggccagccccagtatgtgctgtgggccagcaacatcagcagccctggctgtgagaaggtgcccatcaacaccagctgcaaccccacagcccacctggtgaacagcagctgccccggcctgatgtgtgtgttccagggctacagcagcaagggcctcatccagaggagcgtcttcaacctgcagatctatggagtgctgggcctcttctggaccctgaactgggtgctggccctgggccagtgtgtgctggccggggcctttgccagcttctactgggccttccacaagccccaggacatccccaccttccccctcatcagcgccttcatccgcaccctgcgctaccacacaggcagcctggccttcggggccctgatcctgaccctggtgcagatcgcccgggtcatcctggagtacatcgaccacaagctgcggggcgtgcagaaccctgtggcccgctgcatcatgtgctgcttcaagtgctgcctgtggtgcctggagaagttcatcaagttcctgaacagaaatgcctacatcatgattgccatctacggcaagaacttctgtgtgtctgccaagaatgccttcatgctgctgatgagaaatattgtgcgggtggtggtgctggacaaggtgacagacctgctgctcttcttcggcaagctgctggtggtgggcggcgtgggcgtgctgtccttcttcttcttcagcggccgcatccctggcctgggcaaggacttcaagagcccccacctgaactactactggctgcccatcatgaccagcatcctgggcgcctacgtgattgccagcggcttcttctctgtgtttggcatgtgtgtggacaccctcttcctgtgcttcctggaggacctggagaggaacaacggcagcctggaccggccctactacatgagcaagagcctgctgaagatcctgggcaagaagaatgaggcccccccagacaacaagaagaggaagaagtag

SEQ ID NO: 218670 - DNA, 2133 bp, Artificial Sequence
  derived and/or modified sequence
atgggcggcaagcagcgggacgaggacgacgaggcctacggcaagccagtgaagtacgatccctcctttagaggacccataaagaaccggtcatgtacagacgtcatctgttgcgtcctgttcctccttttcattctcggatatatcgtagtcggtatagtcgcctggttgtacggggatccaaggcaggttctgtatccccggaatagcacgggcgcatattgcggcatgggagaaaacaaagacaaaccctatctgctttactttaatatcttttcttgtattctgtcatcaaatattatttcagtggccgagaacggcctccagtgtcccaccccccaagtctgtgtcagttcgtgtcctgaggacccctggaccgttgggaagaatgagttttctcagaccgtgggagaagttttttatacaaagaaccgaaacttctgtttgcctggtgttccttggaacatgactgtaatcacatcactgcaacaagagttgtgtccgagctttttgctcccgtcagcgccagccctaggccgctgtttcccctggacaaacgtgacaccacccgctttgcctgggatcaccaatgataccacaatacaacaagggattagcggtctcattgattctctgaatgcacgcgatatcagtgtgaaaattttcgaggacttcgctcagtcttggtactggatcctggtggccctgggagtggccctagttctctcccttctattcatactccttctgaggcttgtggctggaccgctggtgctggtgcttattctgggcgtcctgggtgtactggcttatggaatttactactgttgggaggaatatagggttctgagagataaaggcgcttccatctcacaactgggattcacgacaaatttgagcgcataccagtctgttcaggaaacttggctcgctgccctgattgttttggccgtgctcgaggcgatccttcttctgatgctgattttcctccgccaacgtattcggatagccatcgccttgctcaaggaggcaagcaaggccgtggggcagatgatgtcgactatgttttatccccttgtgaccttcgtcctcctgttaatatgcatcgcgtattgggctatgaccgccctatacttggccaccagtggacagccacagtacgtcctctgggcatcaaatattagcagccccggatgtgagaaagtgccaatcaatacttcatgcaaccctacagcgcacttggtaaactcatcatgcccaggcctgatgtgcgtcttccagggctacagtagtaaaggactgatccagaggagcgtattcaatctgcaaatttatggagtcttggggcttttctggactctgaattgggtcctggctctgggacagtgcgtcctggcgggggcattcgcgagcttctactgggccttccacaaaccacaggacatcccaacctttcccctgatcagcgcttttattcgcacactgcgctaccacaccggctcactggcatttggcgccctcattctgacattggtccagattgcgcgagtgattctggagtacattgaccataagctgcggggagtacagaatcctgtcgcccgatgcattatgtgctgctttaagtgttgcctttggtgcctggagaagtttataaaattccttaaccgcaacgcctatatcatgattgcaatatatggcaagaacttctgtgtcagcgccaagaacgcgttcatgctgctgatgcgtaatattgttcgagtggtggtgctggacaaggtgacagatctccttctcttcttcggaaaactgttagtggtgggcggagttggtgttctgtcattcttctttttctctggtcgaattcctgggttgggtaaggactttaaatctccacaccttaactactactggttacctattatgacgtcaattctgggggcttatgtgatagccagcggattcttttccgtgtttgggatgtgcgtggatacccttttcttatgtttcctcgaggaccttgagcggaacaacggctcactggacagaccttattacatgtctaaatccctgttgaaaattctagggaagaagaatgaggcaccaccagataacaagaagaggaaaaagtag

SEQ ID NO: 218671 - DNA, 2133 bp, Artificial Sequence
  derived and/or modified sequence
atgggcggcaagcagcgggacgaggacgacgaggcctacggcaagccggttaaatatgacccttcatttagggggccgatcaagaataggagttgcacagatgtgatttgctgtgtgctcttcttgttatttatactgggctacattgtggtcggcattgtcgcatggctttacggagacccaagacaagtcctgtatccccgtaactccactggtgcctattgcggtatgggcgagaacaaagataagccatacctactttattttaacattttttcatgcattctgtcttccaatattattagtgtagctgagaacgggctccaatgccccacaccacaagtttgcgtttccagctgcccagaagatccgtggaccgtcgggaagaacgagttctctcagaccgtgggggaggttttttacactaagaaccgcaacttctgcctacctggggtgccatggaacatgactgtcatcacttctttacaacaggaactttgtcctagcttcctgctgccttccgcacctgctctgggtcggtgctttccctggacaaatgtgacaccaccagcactacccgggattactaatgatactacgatccaacagggtatctctggactgattgatagcttgaacgcccgcgacatctctgtcaagatcttcgaagatttcgcccagtcatggtactggatcctggttgctctcggtgtcgccctggtgttgagcctgctttttatcctgctgctaaggctcgtggcaggacctctcgtgcttgtcctcatccttggtgtcttaggggtcctggcttatggaatctattactgttgggaggaataccgcgtactcagagacaagggcgcgtcaatctctcagcttgggttcaccacaaaccttagtgcctatcaatccgttcaggagacatggctagctgcactgattgtccttgccgtgttagaggctattcttctcctaatgttaatctttctccggcaaaggatacgcattgctatcgccctgctgaaagaagcatccaaggctgtgggacagatgatgtccaccatgttctaccccttggtgaccttcgtgctgctgctgatctgcatcgcatactgggctatgaccgccctgtatctcgcaacttcagggcagccgcaatatgtcctgtgggcatcaaatatctcatcccccggttgtgagaaggtccccataaacacatcctgcaaccccaccgcccaccttgtgaattcctcatgccccgggctgatgtgtgtctttcagggctactctagtaagggacttatacaaagaagcgtctttaacctgcagatttatggagtgttggggctgttctggacactgaactgggtgcttgccttgggacagtgtgtgcttgcaggtgcgtttgcatccttctattgggcgtttcataagccacaggatattcccaccttcccactgatttccgcctttatccgcacactgcgatatcatactggcagccttgcgttcggggccctaatcctgacccttgtgcaaattgcccgagtcatcctggagtatattgatcataaactgcgaggtgttcagaaccctgtcgctaggtgcataatgtgctgttttaaatgttgcctctggtgtctagagaagttcataaagttcttgaaccgtaacgcatatattatgattgctatctacggtaagaatttctgcgtgtctgctaagaacgccttcatgttgctcatgcggaacatcgtacgtgtggtagtgttagacaaggtcacagatttgttgctgttcttcgggaaacttctggtggtgggcggcgtgggcgtgctctcattctttttctttagtggcaggattccgggactggggaaggatttcaaatcacctcatctgaactattactggcttcctatcatgacgtcgatactgggagcctacgtgatcgcgagtggattttttagcgtgtttggaatgtgcgtagacaccctctttctgtgcttcctggaggaccttgagcggaataacgggtccttggacagaccgtattacatgagcaaatctcttctgaaaattcttggcaaaaagaacgaggcccccccggataataagaaaaggaagaaatag

SEQ ID NO: 218672 - DNA, 1236 bp, Artificial Sequence
  derived and/or modified sequence
tgacgggacgaggacgacgaggcctacggcaagcccgtgaagtacgatcccagttttcgagggcccatcaagaaccggagctgcacagacgtgatttgttgtgtcttattcctgctcttcatcctgggctatatcgtcgttggcatcgtggcctggctatacggcgaccctagacaagttctgtacccaagaaactccactggcgcatactgcgggatgggcgaaaataaggacaagccttatctcctgtacttcaatatcttctcttgcatcttgtccagtaatatcatttcagtggctgaaaacgggctgcagtgccccacaccccaggtgtgcgtctccagctgccccgaagatccttggacggttggaaaaaatgaattttcccaaactgtaggagaagtgttctacaccaagaataggaatttctgcctaccaggagtgccttggaacatgactgtgattacctcgctccagcaggagctgtgccccagcttcctgctccccagtgcccctgccttggggcggtgcttcccctggactaacgtaacgcctcccgctctccccggcattacaaacgatacaaccatccagcaggggatcagcggcttgattgattctctgaatgccagggacatatcggttaagattttcgaagacttcgctcagtcatggtattggatcctggtcgctgtgggtcagatgatgtcaactatgttctaccctcttgttacttttgtgttgctcctgatatgtatcgcctactgggccatgacagcactctatctggctacgtccggtcagccgcaatatgtcctgtgggcctcgaacatttctagccctgggtgtgaaaaggtgcctattaacacctcatgcaatccaactgctcatctcgtgaactctagctgtcccggtctgatgtgtgtgttccagggatacagctccaaagggctgatccaaaggtctgtattcaatctgcagatctatggagtcttgggacttttctggactttaaactgggtgctcgccctgggccagtgtgtgttggcaggtgctttcgctagcttctactgggcctttcacaaacctcaagatatccctacttttcccctcatctccgccttcattcggaccctccggtaccataccgggagccttgcatttggagctctcatcctgactctggtccaaatcgctagggtcattctcgagtatatcgaccacaagttacgctag

SEQ ID NO: 218673 - DNA, 1236 bp, Artificial Sequence
  derived and/or modified sequence
tgacgggacgaggacgacgaggcctacggcaagcccgtgaagtacgacccgtcattccgcggccccatcaagaataggagctgtacagacgttatatgctgcgtgctgtttctcctgttcattctcggatacatagtcgtgggcatcgtggcatggctgtatggggatcccagacaggtcctttacccccgtaatagcactggagcctactgtggtatgggagagaataaggacaagccatacctcttgtactttaacatattcagttgtatattgtcctctaatatcatatctgttgccgaaaatggattgcagtgcccgaccccccaggtgtgcgtgagctcctgtccagaggacccttggaccgtggggaagaacgaattctcacagactgtgggagaggttttttacactaaaaatagaaatttctgtttgccaggagtgccctggaacatgacagtcattacctctctgcagcaagagttgtgtccatcgtttctcctccctagcgcccctgctcttggacgctgtttcccctggactaacatcactcctcccgctctgcctggaattaccaacgacacaacaattcagcagggaatttcagggctcatcgatagtttgaacgccagggatatcagcgttaaaatcttcgaagacttcgcacaaagttggtactggattcttgtcgccgtgggccagatgatgtcgaccatgttttaccctcttgtgacatttgtgctactcctgatctgcattgcctattgggccatgacagcactgtacttggccacaagtggacagcctcagtacgtcctttgggccagtaatatttccagccctggatgcgagaaagtgcccattaatacttcttgtaatcccacagcccatctggtaaattcgtcttgtcccggcctgatgtgtgtcttccaagggtactcttctaagggactcatccagcgatctgtcttcaacctgcagatttacggagtgctggggctcttctggactctgaattgggtgctggctcttgggcaatgcgtcctagccggagcctttgcgagcttttactgggccttccacaaaccccaggacataccaactttcccactgatcagcgcattcatccggacactacgctatcacaccggttcgctggcttttggggccttgatcttgaccttggtgcaaattgccagagtgattctggaatatattgaccacaaacttagatag

SEQ ID NO: 218674 - DNA, 2133 bp, Artificial Sequence
  derived and/or modified sequence
atgggcggcaagcagcgggacgaggacgacgaggcctacggcaagccggtgaagtacgatccttcttttagggggcccattaagaaccgctcttgtaccgacgttatctgctgcgtgctgttcctacttttcatcctgggctatatagtggtcggcatcgttgcatggctctacggcgatccacggcaggtgctgtatccgagaaatagcacgggagcctattgtggcatgggcgagaacaaggataaaccttacctgctgtactttaatatcttttcttgcatcctgtctagtaatataatctctgtggcggagaatggcctccagtgccctacaccacaggtgtgtgtgtcaagttgccccgaggatccttggacggttggcaagaacgaattttctcagactgtgggagaggtgttctacactaagaatcgtaacttctgcctgcctggggtcccgtggaacatgacagtgataacaagtttgcagcaagagttgtgtccatctttcctgcttccaagtgcgcctgccttgggccgctgcttcccatggaccaatataactccccccgccctgccaggcatcaccaacgacaccactattcagcagggtataagtgggttaattgatagcttgaacgcccgcgatatctctgttaagatcttcgaggattttgcccagtcatggtattggattctcgtggcactgggtgtggctctggtcctctctctgctctttattctgctgctcaggctcgtggccggccccctggtgctcgtactgattttaggcgtgctgggggtgttggcttatggaatttactattgctgggaggagtaccgagtgctgcgcgacaagggcgccagtatcagccagcttggatttacgactaacctttccgcctaccaatcagttcaagaaacatggctcgccgccctcatcgtcctggctgtcttggaggctatcctgctgcttgttttaatttttctcagacagaggattcggattgccattgcactgctgaaagaagcatcaaaagccgtggggcagatgatgtctacaatgttttaccccctggtgacattcgtcctcttactgatctgtattgcttactgggccatgacggcattgtaccttgctactagtgggcaaccccagtatgtgctgtgggcttctaatatctcgagcccgggatgcgagaaagtcccaattaacaccagctgtaacccaaccgcccacctggttaacagttcttgccccgggcttatgtgcgtgtttcaggggtatagttctaaaggactcatccaacgctctgtttttaacctccagatatatggcgtgctggggctcttttggacactcaactgggtgttggccctggggcagtgcgtcctcgccggggcttttgcaagcttttactgggccttccataagccccaggacatacctactttccccttgatatctgcatttattcgaactttgcggtaccacacagggagcctagcctttggtgctttaattctgacgctggtgcagatcgcccgagtgattttggaatacatcgatcataaactcaggggggtacaaaatcctgtggccaggtgcatcatgtgttgctttaagtgctgtctgtggtgtctagagaagtttattaagttcttaaacagaaatgcttatataatgattgctatctatggcaaaaacttctgcgtaagcgcgaaaaacgcattcatgctgctcatgagaaacatcgtgcgcgtggtcgttctggataaggtgacagatttgctgttgtttttcggcaaactgcttgtggttgggggagtcggtgtgctgagcttctttttcttttctggtaggatacctggcttgggcaaagactttaagagcccccacctgaactattattggcttccaatcatgacttccattcttggggcctacgtgatcgcatccggtttcttctctgtgtttgggatgtgcgtggataccttatttctgtgttttctggaggatctggagagaaataacggaagcctcgaccgaccctactatatgagtaagtctttgctcaagattctgggaaaaaagaacgaagctccccccgataataaaaaaaggaagaagtag

SEQ ID NO: 218675 - DNA, 2133 bp, Artificial Sequence
  derived and/or modified sequence
atgggcggcaagcagcgggacgaggacgacgaggcctacggcaagccagtcaagtacgacccctccttccggggacccatcaaaaatagatcatgtacggatgtcatctgctgtgttctgtttttgttattcattctcggttatatagttgtcggaattgtcgcctggctctacggggatcctagacaagttctgtacccccgaaattcgaccggggcgtattgcggcatgggtgaaaacaaggacaaaccctaccttctctacttcaacatctttagctgtatactgtcctcgaatatcataagcgtagcagagaacggattgcaatgtcctaccccacaagtgtgtgtgtcttcttgtcctgaggacccatggacagtcggaaagaacgagttttcacaaactgtgggtgaggtattttatacaaagaacaggaacttctgcctacccggtgtcccttggaatatgactgtgataacgtctctgcagcaggagttgtgcccttcatttttgcttcccagtgcaccggctctggggcgatgcttcccttggaccaatattacaccacccgccctgccgggcatcaccaacgacaccacaatccagcagggtatctcaggcctgatcgattctctcaacgccagggacatatctgtcaagatattcgaagacttcgcacagtcctggtactggatcctcgtggccctaggagtggctctggttctctcccttcttttcatattgctgctacggctggtggcaggtcctctggtacttgttctcattctaggcgtgcttggcgtgttggcctatgggatttattactgctgggaggagtatcgcgtcctccgcgataagggcgcctcaatttctcaattgggattcacgacgaatttgagcgcataccagagcgtccaggagacttggctggctgctctcatagtccttgcagttcttgaggcaattctgctgttagtgctcattttcctgaggcagagaattaggatagctattgctttgttgaaagaggcaagcaaggccgtggggcaaatgatgtcaacaatgttctaccccctggtgacctttgtgttattgttaatctgcatcgcatattgggcaatgacagccctgtacctggctacttccggccagccccagtatgtgctctgggcaagcaacatcagttcgcccggatgcgagaaggttcctataaacacgtcatgtaatccgactgcacacttagttaattcctcttgtcccggtctcatgtgcgtgttccagggttacagctccaaaggtctgatccagagaagtgtgtttaacctgcagatatatggcgtgctcggactattctggaccctaaactgggttttagcgctgggacagtgtgtgctggccggtgcctttgcttcattttattgggcctttcataagccccaagacatcccaacttttcctctcatttcagctttcatccgcactttacggtaccatacaggcagcctcgcgttcggcgctctaattctcaccctggtacaaatagccagagtaatactagagtacatagatcacaagctgcgaggcgtgcagaatcccgtcgctcggtgtatcatgtgctgcttcaaatgttgcctctggtgtttggaaaagttcataaagttcctgaatcggaatgcctatatcatgattgctatctatggcaaaaacttttgcgtaagtgctaagaatgcgttcatgctgcttatgcggaatattgtccgcgttgtggtcttggacaaagtgacagacctcctgctcttctttggcaaacttttggtcgtcgggggagtcggcgtgctatcattttttttctttagtggcaggatacccggccttggtaaagatttcaagtctccacacttaaattattactggctgcctatcatgacctctatcctgggcgcatatgtgattgcctccggatttttttccgtgttcgggatgtgtgttgacaccctgttcctctgttttctcgaggatctcgagagaaataatggttctcttgaccggccatattacatgagtaaatccctattgaagatattggggaagaagaatgaagcaccaccagataataagaagagaaagaaatag

SEQ ID NO: 218676 - DNA, 2133 bp, Artificial Sequence
  derived and/or modified sequence
atgggcggcaagcagcgggacgaggacgacgaggcctacggcaagcccgttaagtacgacccctcgtttcgagggccaatcaaaaatagaagttgtaccgatgtaatatgctgcgttttgtttctgttgtttattctcggatatattgtggtgggaatagtggcatggctgtatggcgatccccgccaggttctttatccgcgcaattccacaggcgcttactgtggcatgggagaaaataaggataaaccctaccttttgtattttaacatcttttcttgcattctgtcctccaacattatttccgttgcagaaaacgggctgcagtgtcccaccccccaagtgtgtgtatcctcatgtcccgaggatccgtggacagtcggcaagaatgaattctcacaaaccgtcggagaggtattctacaccaagaatcggaacttctgtctacccggagtcccatggaacatgaccgtgatcacaagtctgcagcaagagctttgccctagtttccttctgcccagcgcccctgctctcggtaggtgcttcccttggaccaacgtgacccccccggccctgcctggtattactaacgataccacgatccaacagggtatttcgggcctgatagatagtttgaacgcccgtgacatttcagtgaagatcttcgaggactttgcccaatcctggtattggatcctggtggccctgggcgtggccctcgtactctcgcttttattcattcttttgttaagactggtcgcaggccctcttgttctcgtgctgatcctgggggttcttggtgttctggcttacggtatttattactgctgggaggaatacagggtattacgtgataagggcgcctcgatatcccagctcggatttacaacaaatctgtcagcatatcaatccgtgcaggagacttggctggcggctctcatagtgctggccgttctggaagcaatcttgttgttgatgttgatcttcttgcgccagcggatcagaatcgccattgcgctccttaaggaggcgtctaaggccgtggggcaaatgatgagtactatgttctatcctctggtgaccttcgtgctgctcctcatatgcattgcctactgggcaatgaccgccctatacctggccaccagcggccagcctcagtatgtgctatgggcatcaaatatctcgtccccgggctgtgaaaaagtgcccataaatacctcctgtaatcccacagcacaccttgtgaattctagctgtccgggcctgatgtgcgtcttccaggggtacagctctaagggactgatccagagatctgtgttcaacctgcagatctatggggtgctggggctgttctggacgctgaattgggtattggcgctgggccagtgtgtgcttgccggggctttcgccagcttctactgggccttccataagccgcaagacataccaaccttccctctgatctccgcattcatcagaactttacggtatcacaccggctcgctcgcttttggcgctttgatcctcactttagtacagattgcccgagtgatcttggaatacatcgatcacaaattgcgcggtgttcaaaatccagtggcaaggtgcatcatgtgttgtttcaaatgctgtctctggtgcctcgaaaagtttataaaattccttaatcggaatgcctacattatgatagcaatttatggcaagaatttttgtgtgtcagccaagaacgcattcatgttgctgatgcgcaatatcgttagggtcgtcgtcttggataaagtgacagacctgctgctgttcttcgggaagctgttggtcgttggcggcgtgggagtcctgtccttttttttcttcagtgggcggatccccggcttaggcaaggatttcaaaagcccccacctgaattactattggctcccaattatgacatccatcttaggagcatacgtgattgcttctggattcttttccgtgtttggcatgtgcgtggacactttgtttctgtgttttcttgaggacctggaacggaataacggcagcctcgaccggccgtactacatgtcgaaatcactcctcaaaatattgggtaaaaaaaatgaagctcccccagacaataagaaaaggaagaaatag

SEQ ID NO: 218677 - DNA, 1236 bp, Artificial Sequence
  derived and/or modified sequence
tgacgggacgaggacgacgaggcctacggcaagcccgtgaagtacgaccccagcttccgtgggccaattaagaacaggagctgtaccgacgtgatttgctgcgtcctgttcctgctgttcattctgggttacattgtggttgggatcgttgcatggctgtatggggatcccaggcaagtgttatatccccgtaacagcacgggagcttactgtggcatgggtgagaacaaggacaagccatacctcctctatttcaacattttcagctgtatcctgtctagcaacatcatatcagtcgcagagaatgggcttcagtgcccaactcctcaggtctgtgtgtcgtcttgtcctgaggacccgtggacggtgggaaagaacgagttctcacagacagttggcgaagttttttacacaaaaaatagaaacttctgcctgccaggcgtcccctggaacatgaccgtgattactagtcttcagcaggagctgtgtcccagtttcttgctgccgtccgcccccgcactcggacggtgcttcccttggacgaatgttacacccccggcgctgcccggtataactaacgatactacaatacagcagggtatcagcggacttattgactctctgaacgcccgggatattagtgtcaagatattcgaggactttgcgcaaagttggtactggatcttagtcgccgtaggacaaatgatgtctactatgttttaccccctagtgacatttgtgctactgttaatctgtatagcctattgggctatgacggccctgtacctggccacgagcgggcagccccagtacgtcctctgggcatctaatatatccagccctggctgtgaaaaggtgcctatcaatacttcttgtaatcctaccgctcatctggtgaattcttcctgccccggcctgatgtgtgtcttccagggctattcaagtaagggactgatccagcgaagtgtgtttaacttgcagatttatggagtgctaggcctgttctggaccctaaattgggtgctggctctcgggcagtgtgtgctcgctggggcttttgcttctttctactgggccttccataagccacaagatattcctaccttccctctcatctccgcatttattagaaccctgcgctatcatactgggtcactggccttcggggctttgattctgacactcgtacaaatcgcacgtgtgattctggaatacattgatcacaagctgaggtag

SEQ ID NO: 218678 - DNA, 1236 bp, Artificial Sequence
  derived and/or modified sequence
tgacgggacgaggacgacgaggcctacggcaagcccgtgaagtacgacccttcgtttcgggggcccataaagaatcgatcttgcacagatgtcatctgctgtgtgcttttcctgctcttcatcctaggctacatcgtcgtggggatcgtggcctggctgtatggcgacccgcgccaggtgctgtaccctagaaattctactggtgcctactgcgggatgggcgagaacaaagacaaaccttatctactgtacttcaacatctttagctgcattttgagtagtaatatcatatcagtggctgagaatggcctgcagtgccccaccccccaggtttgtgtgtctagttgccccgaggacccttggacagtgggtaagaacgaattctcccagacagtgggagaagtgttttatacaaagaaccggaacttctgcttgccgggggttccgtggaacatgactgtgattacttcattgcaacaggaattatgtcctagcttcttgctgccctcagcacccgctctgggacggtgtttcccctggacaaatgtcactcccccagcgctgccgggaatcacaaacgacactaccattcagcagggaatctctggcctcattgattccctgaacgctcgcgacatctccgtgaaaatctttgaagattttgctcagtcgtggtattggatcttagtggcagtcggacagatgatgtctaccatgttctacccactcgtcaccttcgtgctcctcctcatctgcatagcctactgggccatgactgctctctatctggctacgagcggacagcctcaatacgtgctgtgggccagtaatatcagctccccggggtgcgaaaaagtgccaatcaacacgtcgtgcaaccctaccgcccatctggtgaattcgtcatgtcctggactcatgtgcgtgttccaggggtatagtagcaaagggctcatacagaggtccgtctttaacttgcagatttacggcgtgcttggcctgttctggaccttgaactgggtgcttgcattgggccagtgtgtcttggcgggcgcatttgctagcttttattgggctttccacaagcctcaggatattcctactttccccttgattagtgccttcatccggactctccggtaccatacaggctcactcgcatttggagccctgatccttacactcgtacagattgcccgcgtgatcctggagtacattgaccacaagttgcggtag

SEQ ID NO: 218679 - DNA, 1236 bp, Artificial Sequence
  derived and/or modified sequence
tgacgggacgaggacgacgaggcctacggcaagcccgtgaagtacgatccatcctttcgcggaccaattaaaaatcggagttgtaccgatgtgatttgttgtgttctgtttcttctgtttatcctgggctacattgtagttggaatcgtcgcctggctgtatggcgatccccgtcaggtcttataccctagaaactccacaggggcctattgtgggatgggtgagaataaggataaaccctatctgctgtattttaacatattctcctgtatcctgtcctccaacattatcagcgtcgccgagaatggactacagtgtcctacaccccaggtttgtgtgtcctcctgtccggaagacccatggacagttggaaagaatgaattttctcagactgtcggagaagtgttctacactaagaatagaaatttctgcctccccggggtaccatggaacatgacagtgatcacatccctacaacaagagttgtgccctagctttttactgccttccgctcctgctctaggcaggtgttttccttggacaaatatcaccccacctgctcttccaggaatcactaatgataccactatccaacagggcataagcgggctgatagactccctgaatgcccgagatatctccgtgaagatctttgaggattttgcgcagtcttggtactggattttggtcgctgtggggcaaatgatgagtactatgttctacccactcgtgacatttgtcctcctcttgatctgtatcgcgtactgggccatgactgctctctatctggctacctcgggccagccccagtacgttctgtgggcctcaaacatatccagccctggctgtgagaaggtgcctattaatacatcgtgcaaccccacagcccacctggttaattcctcttgcccaggtctgatgtgtgtcttccagggatactcatccaaaggcttgatccaacggtcagtatttaacctccaaatctacggagtgctcgggcttttctggactctgaactgggtgctggcactgggacaatgtgttcttgccggagctttcgcgagtttctactgggcttttcacaaaccacaggacattcctaccttccctcttatttcggcctttatacggacactcagatatcataccggttccctggcctttggggcactaatattgacactagtacagattgcacgcgtgatcctggagtacatcgaccataaattacggtag

SEQ ID NO: 218680 - DNA, 2133 bp, Artificial Sequence
  derived and/or modified sequence
atgggcggcaagcagcgggacgaggacgacgaggcctacggcaagccagttaaatatgacccgagtttcagagggcccataaaaaaccgctcatgcacagacgtgatttgctgtgtcttgtttctcctgttcattctgggatacattgtcgtaggcattgttgcatggctgtatggggatccaagacaggttttatatccccgcaattccacgggtgcctactgcggaatgggcgagaataaggataagccgtacctcttatatttcaatatattttcttgtatcctgagcagcaacatcatttcagttgcggaaaacggcctgcagtgccccacccctcaagtgtgtgtatccagctgcccagaggatccttggacggttgggaagaatgagttttcccaaaccgtgggcgaggttttttatacaaaaaataggaatttctgtctaccaggtgtgccttggaacatgaccgtcatcacatcccttcagcaggagctatgccctagtttcctgctgccttcagcaccagccctcgggcgctgctttccatggactaacatcacccctcccgccttacccggcataacaaacgatactacaattcaacagggaatatcaggactgatagactccttaaatgccagagatatctcggtgaagatttttgaggacttcgcgcaaagctggtactggattctggtggccctgggggtggcactggttctttcactgctatttattctgttacttcgattggtggcgggtcctctagtgctcgtcctgattcttggagtcctgggagtgctggcctatggtatatactactgctgggaagagtaccgggtattgcgggacaagggcgcatcgattagccagcttggctttactaccaaccttagcgcttatcagtcagtgcaggaaacatggctggctgccctgatagttctcgcagtgctggaagcaatcttactgctagtgctcatattcctaaggcagagaatacggatcgcaatcgccctgttaaaagaggcaagcaaggccgtcgggcagatgatgagtaccatgttctaccccctggtgacgtttgtgctcttacttatctgcatcgcctactgggctatgacagctctgtatctggccaccagcgggcagccacagtatgtgctgtgggcgtcaaacatctcctcccccggctgcgaaaaggttccgattaataccagctgtaatccgacagcacatttggtaaattcttcctgcccaggcttgatgtgcgtcttccagggctattcctcaaaagggctgatccaacgctccgtttttaatctgcagatctatggcgtcctggggctgttctggaccctcaactgggttctggcgctaggccaatgcgtcctggcaggggcgtttgcttcgttctactgggcgtttcacaagccccaagatatccctacgttcccgttaatttctgctttcattcgcactctgaggtaccacaccggcagccttgcatttggcgcactcatactgactctggtccaaatcgcgagggttatcttggaatacatcgatcacaaattgcgtggagttcagaaccctgtggcccggtgcattatgtgttgcttcaaatgttgtctctggtgtcttgagaaatttataaagtttttaaataggaatgcctacataatgattgccatttatgggaagaacttctgcgtgagtgcaaaaaacgcgttcatgctgcttatgcggaatatagtccgggtcgtagtgcttgataaggtgactgacctcctcctgttctttggcaagctgctcgtggtaggcggtgttggcgtcctatcctttttttttttttctgggcgcattcccggcctcggcaaagattttaaatctcctcacctcaattactactggttacccatcatgaccagcatactgggtgcttacgtcattgcctccggcttcttcagtgtctttggcatgtgcgttgacactctgtttctttgtttcttggaagacctggagaggaataacggctcactcgatcgtccttactacatgtcgaagtctttgctcaaaatcttgggcaagaaaaacgaggctcctccagataataaaaaaaggaaaaagtag

SEQ ID NO: 218681 - DNA, 1236 bp, Artificial Sequence
  derived and/or modified sequence
tgacgggacgaggacgacgaggcctacggcaagcccgtgaagtacgatccttctttcaggggccccatcaagaaccggtcttgtaccgatgtgatctgttgcgtcctgtttctgttgtttatcctgggatatatagtggtgggaattgtcgcctggctttatggtgacccacggcaggtgttgtatccacggaacagtacaggtgcttactgtggaatgggagaaaataaagataaaccatatcttctctatttcaatatttttagctgcattttaagcagtaatatcatatccgtggccgagaacggcttgcaatgtcctactccccaggtctgtgtttcttcatgcccggaagacccatggaccgtgggaaagaacgaattcagtcagacagtcggagaggtcttctatacaaaaaaccggaatttctgtctgcccggcgtgccatggaacatgactgtgatcacttccctgcagcaggagttatgcccatcttttctattaccctccgcccccgcgctgggcaggtgctttccctggaccaatattactccaccagctctccccggcattacgaacgacacaactatccaacagggcatcagcgggctgattgactccctaaatgctcgggacatctcagtgaaaatctttgaggacttcgcccagtcctggtattggattcttgtcgcagtcgggcagatgatgtctacaatgttctaccctctggtgacattcgtgctgcttctcatatgtatcgcatactgggcaatgacagccttgtaccttgccacctcagggcagcctcaatatgttctttgggcctcaaacattagtagccccggatgcgagaaagtgccaataaatacatcttgcaatcccacagcccacctcgtgaattcctcctgtccgggtttaatgtgcgtgttccaagggtatagctccaagggcctgatccagcggtcagtgtttaaccttcagatttacggcgtgttgggcctgttttggaccctcaattgggtgctcgcactagggcaatgcgtgttagcgggagcctttgcctcgttttattgggcattccacaagccacaggatatacccactttccccctcatttcggcttttataaggactctccggtatcataccggcagcctcgcctttggagctctgatacttaccctggtacaaatcgcccgtgtgattcttgaatatattgaccataagctgcggtag

SEQ ID NO: 218682 - DNA, 2133 bp, Artificial Sequence
  derived and/or modified sequence
atgggcggcaagcagcgggacgaggacgacgaggcctacggcaagcctgtgaaatacgacccaagctttcgcggtcctattaaaaaccggtcttgcaccgatgtgatatgttgcgtactgttcctgttgtttattctgggctatatcgtggtaggcattgtggcctggctgtatggtgacccccgacaggtcctgtacccccgtaattctacaggcgcatactgcggcatgggggaaaacaaagacaaaccttatctcctgtactttaacattttctcatgcatactttcctctaacataatctccgtggctgagaatggactccagtgcccaacacctcaggtgtgtgtttcctcttgccctgaagatccttggaccgttggtaaaaacgaattctcccagacagtcggggaggtcttttacactaagaatcgaaatttctgcctcccaggcgtgccctggaacatgactgtcatcacttctctccagcaggagctctgtccgagcttccttctccccagcgcacctgcccttgggcgatgcttcccttggaccaatgtgaccccccccgcactgcctggaattactaacgacaccaccattcagcaaggcatcagcgggctcatcgatagtcttaacgcccgcgacattagtgtgaagattttcgaggattttgcccagtcttggtactggatactagtggcgctgggcgtcgcgcttgtcctgagtttactttttatcctgctgctgcgtctcgtggccgggcctcttgttctggtgttaattctgggcgtgcttggtgtcttggcctatgggatttactactgctgggaggagtatagggtacttagggacaagggcgcttccatttctcaacttggctttacaacaaacctgtctgcataccaatcagtccaggaaacctggctggccgccttgatcgtgctcgctgttctcgaagccattctgctactaatgcttatctttctcaggcagcggattcgtatcgccatagccttactgaaagaggcatctaaagctgtcgggcagatgatgagtaccatgttttatcccttggttacgttcgtcctcctgctaatatgcatagcctactgggccatgactgcactgtacttggctacaagtggccagccacagtacgtcctctgggcctccaatataagcagtcctggatgtgagaaggttcctataaatacttcctgtaatcctaccgcccatctggtaaatagcagctgtcctggactcatgtgtgtgttccagggctactcttccaaaggactgatacagcgttcagtattcaacctgcagatatatggagtgttaggcttgttttggacacttaactgggtgctggccctgggccagtgtgtcttggcgggcgccttcgcctctttctactgggcatttcataaaccccaagatatccctacctttcctctcatttctgcttttattagaacactgagatatcacacgggcagtctagccttcggtgctctcattctcacactggtacagattgcccgggtcatcctagaatacattgaccacaaactgagaggggtgcagaaccccgtagcacgttgcatcatgtgttgttttaaatgctgcttgtggtgcttggagaagtttataaaattccttaaccgcaacgcatacatcatgatcgctatctatggaaagaatttctgcgtcagtgccaagaacgctttcatgctgctcatgcgaaacattgtgcgcgtggtggtcctggataaggtcacggacttgctgctgtttttcgggaaactcctcgtggtggggggggtcggcgtgctcagttttttttttttcagcgggcggattccaggtcttggcaaggacttcaaaagtccccatctgaactactactggcttcccattatgacatctatcttgggagcctacgtgattgccagcggcttcttttctgtctttggaatgtgcgtcgacacattgttcttatgtttcctcgaggatctagaacggaacaatgggagcctggataggccctattatatgtctaagtccttgcttaagatcctcggcaagaagaatgaagcccctccagataataagaagcgaaagaagtag

SEQ ID NO: 218683 - DNA, 1236 bp, Artificial Sequence
  derived and/or modified sequence
tgacgggacgaggacgacgaggcctacggcaagcccgtgaagtacgacccatcattcagaggaccaatcaagaacagaagctgcacagacgtgatctgttgtgtgctgttcctgctcttcatcctagggtacattgtggtcggaatcgttgcgtggctttatggagacccccggcaggtgctctaccctcgcaattccactggcgcctactgtggcatgggcgaaaataaagataagccttatctcttatatttcaatatatttagctgcattctctcgtccaatatcatctctgtggctgagaacggactgcagtgcccaacgccccaggtgtgcgtgtctagctgtccagaggatccctggacagtgggcaagaatgaatttagccaaacagtcggagaagttttttacactaaaaatcggaacttctgtctgcctggggtaccctggaacatgacagttatcacttctttgcaacaggaactttgtcccagctttctcctgcccagtgcaccagcactggggcgctgtttcccatggacaaacgtgacaccacctgcactgccgggtataacaaatgatacaactatccagcagggtatatcgggtctgattgatagcttgaatgccagggacatcagtgtgaaaatcttcgaggattttgcccagtcatggtattggatcttggtggcagtggggcagatgatgagcaccatgttttatccgcttgtaacctttgttttgcttctgatctgtatagcatactgggcaatgactgcactgtatctcgctacatccggacaaccacagtacgttctctgggcttcaaacatcagcagccctggctgcgaaaaagtgcctattaatacctcttgcaatcccacagctcacctggtgaatagctcctgtcctggcctgatgtgcgtgttccaaggctactcgagtaaaggtttgattcaaaggagcgtgttcaatctacaaatctacggtgtgctgggcctattttggacactgaactgggtactggcactgggccagtgcgtgttagcaggtgcttttgccagtttttattgggcctttcacaaaccccaggacattcccaccttcccgctgatcagtgcattcattcgtacccttcggtaccatactggctcgctagccttcggtgcgctgatcctgacgctggtgcagatcgctcgcgtgattctggagtatattgaccataagctgcgatag

SEQ ID NO: 218684 - DNA, 2133 bp, Artificial Sequence
  derived and/or modified sequence
atggggggaaagcagagagatgaggatgatgaggcctatggcaagcctgtaaaatacgatccatccttcagagggccaattaagaatagatcttgcaccgacgtgatatgttgtgtgctttttctgctctttatcttaggctatatcgtggtggggattgtggcatggctgtatggagatcccagacaggtgctctatcctcgaaacagtactggagcatactgcggaatgggcgagaataaagataaaccctacttgctgtatttcaatatattcagctgtattctctcctcgaacatcataagcgttgctgagaatgggctgcaatgccctacaccacaggtttgcgtatcctcctgtccagaggatccatggacagtcgggaagaacgaatttagccaaactgttggcgaagtcttctacaccaagaatcggaatttttgtctgccaggtgtcccctggaacatgaccgttatcacctcactccagcaggaactgtgcccatccttcctcctgccttcagcacctgccctgggaaggtgcttcccctggacaaatgttacccctcctgccctgcccggtattaccaacgacaccactatccagcagggcatatctgggctgattgactctctgaatgccagggacatctcagtcaaaatttttgaagactttgcccagagttggtattggatactggtcgcattgggggtggcacttgttttgtccctgttgttcattctcctgctccgactggtggccggtcccctagtccttgtacttatcctcggagtgctcggagtgctagcctacgggatttattactgctgggaggagtaccgagtgttaagagataaaggggcatccatctctcagctgggctttaccacaaatctttctgcctaccaatctgttcaggaaacctggttggcggcactaattgtgttagccgttctcgaggcaattctgctgctaatgctgattttcttgaggcagagaattcggattgccatagccttgctcaaggaggcctctaaggccgtggggcaaatgatgtccactatgttctatcccctggttaccttcgtgttgttactgatatgcatcgcctattgggcgatgacagccctgtacttggcaacctctggccagccccagtacgtcctgtgggcatcaaacatatcgtctcctggctgcgaaaaggttccaatcaacaccagttgcaaccctactgctcatctcgtcaatagcagctgccccggtctcatgtgcgtgtttcagggatatagctccaaagggttgattcagcggtcggtgttcaatctgcagatatatggggtcctggggcttttttggacgctgaattgggtgttagccctgggccagtgcgtgctggcgggtgctttcgccagcttttactgggctttccataagccacaggatattccaacgtttcccctaattagcgctttcatcagaaccttgagataccatactggctccctggcgttcggcgcattgatcctgaccctcgtacagatcgcccgtgtgatactggagtacatcgaccataagctgaggggcgtgcagaatcccgtcgccaggtgtatcatgtgctgctttaagtgttgtttatggtgtcttgagaaatttataaagttcctgaacaggaacgcctatattatgatcgccatttacggaaagaacttctgtgttagtgcgaaaaacgccttcatgcttctcatgaggaacattgtaagggtcgtggtcctggacaaggtgactgacttgttgctcttctttggaaaacttctggtggtgggcggtgttggtgtgcttagctttttttttttttctggtagaataccaggcctgggcaaggatttcaagagtcctcacttaaactactattggctgcccataatgacctccatccttggagcctacgtgatcgcctcaggtttcttttccgtgttcggcatgtgcgtggatactctgttcttatgttttctcgaagatttggaacggaacaatgggagcctggaccggccatattatatgtctaaatcccttctgaagatcctggggaagaaaaacgaagctccccctgataacaagaagcggaagaagtag

SEQ ID NO: 218685 - DNA, 2133 bp, Artificial Sequence
  derived and/or modified sequence
atgggcggaaaacagcgggacgaggacgatgaggcttacgggaagccagtgaaatatgaccctagcttcaggggacctatcaagaataggtcctgcaccgatgtgatctgttgtgtcttgttcctcttattcatactgggttatattgtggtcggcattgtggcttggctctacggcgatcccagacaggtgctctatccacgaaacagtaccggagcctattgcggaatgggcgagaacaaggataagccgtacctcctgtacttcaacatcttcagctgcatcctgagcagcaatataattagcgtggccgagaatggacttcagtgccctacaccccaggtgtgtgtgtcaagttgtcccgaagacccttggactgtgggaaagaacgagtttagtcagactgtgggtgaggtattttacactaagaacaggaacttctgcctccctggcgtgccctggaatatgacagtaatcactagtctacaacaggagctttgcccctcctttctcctgccatcggctcctgcccttggacgttgtttcccttggacaaatgtgacacctcctgctcttcctggaattacaaatgacacaactattcaacagggaatttctgggctgattgactctctgaatgccagagatatctctgttaagattttcgaagattttgcccaatcttggtattggatcttggtggccttgggcgtagccctcgtcctgtctcttctctttattctgcttttgcgcctcgtagctggacctctggtattggtactaatcctgggggtgctaggcgtgcttgcctatggcatatactactgttgggaagagtacagggtgttacgtgacaagggagccagcatctctcaattggggttcaccactaacctgagcgcttaccagagcgtccaggagacctggctagcagcgctgatcgtactggctgtgctggaggcaatcctgttgttaatgttgatattccttcgtcagcgaatacggatcgccattgccctgctaaaagaggcatccaaagccgtcgggcagatgatgtcaacaatgttttaccctttggtgacatttgtgttattgcttatctgcattgcatactgggctatgaccgccctctatctggccacaagcggacagcctcaatacgtgttgtgggcctccaatatcagcagccccggttgcgagaaggtgcccattaacacttcgtgcaaccccacagcccacctcgttaactcctcttgccctggcctgatgtgcgtttttcaagggtactcttctaaagggttgatccagcggtctgtctttaacctccagatatatggcgtcctcggtctgttttggactctcaattgggtgttagccctcggacagtgtgttctagccggagcgtttgcgtcgttctactgggcattccataagcctcaggatatacccacattcccgttgatttccgccttcatcagaacccttcgctatcacacagggtccctggcattcggtgctctaatcctgacgctggtgcagatcgctagagttatactggaatacatagaccacaaactccggggagtgcagaatcccgtcgcgaggtgtatcatgtgctgttttaagtgctgtctctggtgcctcgaaaagttcataaaatttctgaacagaaatgcctacatcatgattgccatatatggtaagaatttctgtgtgagcgctaagaacgctttcatgttgctgatgcgaaacattgtgagggtcgttgtactagacaaggtcactgatctgctgctgtttttcggcaagctcctggttgtcggaggcgtcggggtgttgagctttttcttcttctctgggagaataccaggtctgggcaaggactttaaatctccccatctcaactactattggctgcctattatgacttccatcctgggagcttacgttattgcctccggattcttttcggttttcgggatgtgcgttgatacactgtttctgtgttttctggaggacttggagagaaacaacgggagcctggacagaccgtactatatgagtaagagcttgttaaagatcctgggcaagaagaatgaagccccaccagataacaagaagcgaaagaagtag

SEQ ID NO: 218686 - DNA, 1236 bp, Artificial Sequence
  derived and/or modified sequence
taacgggacgaggacgatgaagcttacggcaagccagtgaaatacgacccatccttccgcggtcccattaaaaatagaagctgtaccgacgtcatctgttgcgtcttgttcctcttatttattttggggtacattgtagtaggcattgtggcctggttgtatggcgatcccaggcaagtattataccctagaaattccacaggagcttactgcgggatgggagagaacaaggacaagccctatctcttgtattttaatatattttcctgcattctatcgagcaacataatctccgtggccgagaacggcttacagtgtccaacccctcaggtgtgcgtgagttcatgtccggaggatccatggaccgtaggaaaaaatgagttttcccagacagtgggtgaggtgttctacacaaagaacaggaacttctgtctgcccggagtgccttggaatatgaccgtgatcacttccttgcagcaggagctttgccctagcttcctattaccctctgcccctgccctaggacgatgctttccttggacaaatgtcacaccacccgctctaccgggaatcaccaatgacaccaccattcagcagggaatctccggtcttatcgactccctgaacgcacgagacatttccgttaagattttcgaagactttgcccagtcttggtactggatcctggttgccgtgggacagatgatgagtactatgttctatcccctggttaccttcgtgctgctgctgatctgtattgcctactgggccatgacggctctttatctagccacctccggccaaccgcagtacgtcttgtgggcttcgaatatttcatcccctgggtgtgaaaaggttccgattaacaccagttgtaaccccaccgcacatttggtgaattcatcatgccctggtttgatgtgcgtgttccaagggtattcaagtaaaggactaattcagcgctctgttttcaacctccagatatacggagtcctgggcctgttttggaccctgaattgggtgctcgcgctcggtcaatgcgtgctggcgggagccttcgccagcttctattgggcttttcataagccccaggatatcccgacttttcccctgatcagtgcgtttatccgaacgctgcgatatcacactggcagtttggcctttggagcactgatacttactctcgttcaaatagcccgagtgatcctcgaatacatcgaccacaagctgagatag

SEQ ID NO: 218687 - DNA, 1236 bp, Artificial Sequence
  derived and/or modified sequence
tgacgggacgaagatgacgaggcttatggtaaacctgtcaagtacgatccctcttttcgtggacccataaagaaccgatcttgtacagacgtgatctgctgtgtcctgtttcttctatttatcctcgggtatattgtggtagggattgtggcttggctgtacggtgaccccagacaggtgctctaccctcgcaatagtaccggtgcctactgcggtatgggcgagaacaaagacaagccttacctcctctatttcaacatcttttcgtgtattttatccagtaacatcatatcagtggcggagaacggcctacagtgccccacaccacaggtatgcgtgtcttcatgccctgaagatccctggacggtgggaaaaaatgagtttagtcagactgtgggtgaagtcttttacacaaagaatcgcaacttttgtctccccggagtaccctggaacatgacagtgattacctccctccagcaggagctttgcccatcttttcttctcccatcggcgcctgcgctgggcaggtgctttccctggactaatattaccccacccgcacttcctgggatcacaaatgacactaccatccaacaaggaatcagcggcctgatcgacagtctaaatgcccgtgacataagcgttaagatcttcgaggattttgcccagtcatggtattggattctggttgccgtgggacagatgatgtccaccatgttttaccctcttgtgacgttcgtgctgctattgatctgtattgcgtactgggccatgacagccctgtaccttgccacaagcgggcagccccagtacgtcctctgggccagcaatatctcttctccaggttgtgagaaagtcccaatcaacacgagctgcaatcccactgctcacctggtaaactcctcctgtccagggttgatgtgcgtgttccaggggtatagttctaaggggctcatccagcgcagcgtcttcaatctccagatttacggagtgctgggactgttctggactctgaactgggttctcgcattaggccagtgcgtcctggccggtgcctttgccagcttttactgggccttccataagcctcaagatatcccaacatttcccctcatttctgcttttatccgcacactgcgatatcacaccggttctctggccttcggcgctctgatccttacactggtgcagatcgccagggtgatccttgaatacattgatcataagttgcgttag

SEQ ID NO: 218688 - DNA, 2133 bp, Artificial Sequence
  derived and/or modified sequence
atgggtggaaagcaaagggacgaggacgatgaggcctatggaaagccagtgaaatatgacccaagcttcagagggccaatcaaaaaccgtagttgtaccgatgtcatttgctgtgtcctcttcttgttgttcatcctaggctatatcgtcgtcggcatcgtggcctggctctatggcgatcctcggcaggttctctatcccagaaacagtaccggggcatattgtggaatgggcgagaacaaggacaaaccctatctgctgtatttcaatatcttcagctgcatcctctcctctaacatcataagtgtggccgagaacggcctccagtgcccgacccctcaggtctgtgtgagcagctgcccggaggatccttggaccgtagggaagaatgagttctcccaaacggttggcgaggttttctataccaaaaaccgaaatttttgcctccctggagtcccttggaatatgaccgtgatcacctccttgcaacaggagctgtgcccgtcatttctgctgccatccgcaccagctctgggtaggtgcttcccttggaccaatattaccccccctgctctgcctggaataacgaacgatactactatccagcagggaatttcagggctgattgattctctcaacgccagagatatttcagtgaagattttcgaggattttgcccaaagttggtattggatccttgttgccctaggagttgccttagttctatcgctgctgttcattttgctcttgcgtcttgtggccggtcccctagtcttggtgctgattttgggtgttttaggagtcctggcttacgggatatactattgctgggaggaatacagggtgctgcgagataaaggcgcatctatttcccagcttggattcaccactaacctgtcagcataccaaagcgtgcaagaaacctggctcgccgctctgatcgttctagccgtgctggaggcaatactcctgctcgtcctcatttttttacggcaaaggattagaattgcaattgcactgctcaaagaagcctcaaaagcagttggccaaatgatgtccaccatgttctatcctctggtgaccttcgttctgctgctaatatgcatagcttactgggccatgaccgcattataccttgcgacgtccggccaaccccaatacgtcctttgggcgtccaacatctcaagtcccggttgtgaaaaggttcctatcaacacgtcttgcaatccgactgcgcatctggttaactccagttgccccggtctcatgtgcgttttccaggggtatagctccaaggggctgatccaacgttcagtgtttaacttacagatctatggagtcctcggactgttttggaccctgaattgggtgctagccctgggacagtgtgtgctcgcaggcgcttttgccagcttttactgggcattccacaaaccgcaggatataccgactttcccgcttattagtgctttcatccggacactgagataccatactggctccttagcctttggtgctttgatactgacccttgttcagatcgcacgagtgatattggaatacattgatcacaaattaaggggcgtccagaaccccgttgccaggtgcatcatgtgttgtttcaaatgctgtctttggtgcctggagaagttcatcaagttcctgaataggaatgcgtacataatgattgcgatatacggcaaaaacttctgtgtgtctgccaagaacgcctttatgcttctgatgaggaacatcgtccgagtggtggtgcttgataaggttacggacctgctgttattcttcggtaagcttctggttgtgggtggcgtgggcgtgctttcatttttcttcttctcgggcaggatcccaggactcggaaaggacttcaagagcccccacctgaactattactggttgccaatcatgacctccatcctcggggcatacgtgattgcttccggatttttctcagttttcggaatgtgcgtggataccctttttctttgcttcttggaagatctcgaacgaaataatgggtccctggacagaccttattacatgagcaagtccctcctgaaaattctgggcaaaaagaatgaggcaccccctgataataaaaagaggaagaaatag

SEQ ID NO: 218689 - DNA, 2133 bp, Artificial Sequence
  derived and/or modified sequence
atggggggaaaacagcgagatgaggacgacgaagcctacgggaagccagttaaatatgaccccagcttccggggacccatcaaaaataggtcctgcaccgacgtcatctgctgcgtgctgtttcttctgtttatcctcggttacatcgtcgtgggcatcgttgcttggctttatggtgaccctcgccaggtgctctatcctagaaactccacgggggcatactgcgggatgggggagaataaggacaaaccatacctcctctattttaacatcttctcatgcatactgagcagcaatattatctcagtggccgagaacggcctgcagtgtccaaccccccaggtgtgcgtctcctcctgccctgaagacccttggaccgtcggaaagaatgagtttagtcagaccgtcggggaggtgttttatacaaagaaccgaaacttttgcttacccggagtcccgtggaacatgactgttatcaccagcctgcagcaggagctgtgcccaagcttccttctccccagcgctcccgctttgggtaggtgtttcccttggaccaatataacaccacctgccctcccgggtatcacaaatgacactaccatccagcaaggcatttccggtctgattgattccctcaacgccagggacatctcagtaaagatcttcgaggacttcgcacagagttggtactggatcctggtggcccttggtgtggctctggtgttgtcactactctttatcctgttgctgcgcctggtggccggacctctcgtgcttgtgcttattctgggcgtgcttggtgtgctcgcatacggcatatactattgctgggaggagtacagagtactcagagacaaaggcgcatcaatctctcaattggggtttaccacaaatctctccgcgtatcagtcagtgcaggaaacatggctggcggcactgattgtcctggccgtgcttgaggcaattttgcttcttgtgcttatcttcctccggcagcgaatccggatcgcaatcgctctattaaaggaggccagcaaggccgttgggcaaatgatgagtactatgttttatccccttgtgaccttcgtgctgctgctgatttgcattgcctactgggccatgactgccctgtacttagccacttccggccaaccccagtacgtcctatgggctagtaacatttcctcgccgggatgtgaaaaggtaccaataaacacgtcgtgcaatcctacagctcaccttgtgaattccagttgcccaggtctcatgtgcgtgttccagggctacagcagtaaaggtttgattcagagaagcgtctttaacttgcagatctatggcgtactgggcctgttttggaccctcaactgggtattggcactcggacagtgtgttctagccggagcgttcgcgtccttctactgggcgttccacaagcctcaggatatacctacattcccgttaattagcgccttcatcagaacgctgaggtaccatactgggagcctggctttcggggcactgatactcactcttgtgcagattgcccgagtcatcttggagtacatcgaccacaagctgcgcggtgtgcagaatcccgtcgccagatgtatcatgtgctgtttcaagtgctgcctgtggtgtctcgagaaatttattaaatttcttaaccgcaacgcatacatcatgattgcaatctatggcaaaaatttttgtgttagtgcaaagaatgcctttatgctgctcatgaggaatattgtgcgggtggtcgtgctcgacaaggtgactgatctcctcctctttttcggcaaattactcgttgtagggggagtgggggtgctctcctttttcttctttagtgggcgtatccctgggctaggtaaggattttaagtccccgcacttgaactattattggctgccaattatgacatccattctgggggcttacgttattgcatccggcttcttctccgttttcggtatgtgcgttgacaccctgttcctgtgttttctggaggacctggaacggaataacggttctctggatcggccatactatatgtctaaatccctgctcaagattcttggaaaaaaaaacgaagcccctccagacaacaaaaaacgtaagaagtag

SEQ ID NO: 218690 - DNA, 2133 bp, Artificial Sequence
  derived and/or modified sequence
atgggagggaagcaacgtgatgaagacgatgaagcatacggaaaaccggtcaagtatgatcctagctttcgcggacccatcaaaaataggagctgcactgatgtgatatgctgcgtgttgttcctgttatttattttagggtacatagtggtcggcatcgtcgcgtggctttacggggaccctagacaggtgctctacccacgcaactctactggcgcttactgcggcatgggagaaaacaaagataaaccttatcttctctattttaacatcttctcttgcatactgagtagcaatatcattagcgtcgcagagaacggcctccaatgtcctaccccacaggtgtgtgtctccagttgtccggaggatccttggacagtgggtaagaacgaattctcccagaccgtgggagaagtattctatactaagaatcggaatttctgcctccctggcgtgccatggaacatgacagtgattacatctctccagcaggaactttgtccatcatttttgctcccatccgccccagccttgggaagatgcttcccttggacaaacgtcactcctcctgccctcccgggaatcacgaatgacactaccatacagcagggcataagcggacttatcgattctcttaatgctcgggacataagcgtcaaaattttcgaagacttcgcacaaagctggtactggatactggtcgctttgggtgttgcattagtgcttagtcttttgtttattctcttactccgcttggttgccggaccactggtactggtcctgattctcggcgtgctcggagtcttagcttatggcatttattattgctgggaggagtatcgcgtcctgcgagacaagggtgccagtatatcccagctgggctttaccaccaatctctcagcatatcagtccgtgcaagagacctggctggccgcattaatcgtactggccgtgctcgaggcgatccttctgctcatgcttatttttcttaggcaaaggatccgaatcgccattgccctcctcaaagaggctagtaaagcagtggggcaaatgatgtctaccatgttttatcctctggtcacattcgtccttttacttatctgtatcgcgtactgggcaatgaccgctttatacctggccacttccgggcagccccagtacgtcttgtgggccagtaacatctcaagccctggctgcgaaaaggtcccaatcaataccagttgtaatcccacggcccatctggtgaactcctcatgccccggacttatgtgcgtgtttcaggggtactcctccaagggattgatccagagaagcgtgtttaacctgcaaatctatggcgtgctcgggctattctggactctgaattgggtactcgccttaggacaatgtgtgctggccggagcttttgcttccttctactgggcctttcacaagccacaagacatacccacctttcccctgatttcagccttcatccgaactctgcggtatcacactggtagtctcgctttcggtgcactgatcctcacactggtgcaaatagcacgggtgatcctggagtacatagatcacaaactccgcggagtccaaaatcctgtggcacgctgcatcatgtgctgcttcaaatgttgtctctggtgcctggaaaagtttatcaagttcctgaacaggaacgcatacattatgatcgctatatacggaaagaatttctgtgtgagcgcaaagaatgccttcatgctgctcatgagaaacattgtccgcgtagtggtcctggataaggttaccgatctgcttttgttctttgggaagctgctggtcgtggggggtgtgggtgttctcagcttttttttcttctcaggccgtatcccagggctgggaaaagacttcaaatccccacacctaaactactattggctgcccatcatgactagtatcctgggggcttatgtgatagccagcggcttcttcagcgtctttggtatgtgcgtggacacactgtttctatgcttccttgaagacctcgagaggaacaacggaagtctcgacagaccatactacatgtcaaagtccctactgaagatattggggaagaagaacgaggcacccccagataataagaagaggaaaaagtag

SEQ ID NO: 218691 - DNA, 1236 bp, Artificial Sequence
  derived and/or modified sequence
tgaagagacgaagatgatgaggcctatgggaagcctgtgaagtacgatccgagctttaggggacccatcaagaacaggtcatgcacagatgtcatatgctgtgttttatttctgctgtttatacttggttatattgtcgtcggcattgtggcttggctgtacggcgatccgagacaggtgctgtacccccgtaactctaccggcgcttattgcggtatgggcgagaacaaggataaaccttatcttttgtattttaacattttctcatgtatcctatcctctaacattatatctgtcgctgagaacggcctgcagtgcccaaccccgcaggtgtgtgtgagcagctgtcctgaagatccatggactgtcggaaagaatgaattttcacaaaccgttggagaggtgttttataccaagaataggaatttttgcctcccaggcgtaccttggaacatgacagtaattacaagccttcagcaggagctctgtccctcattcctcctgccctccgccccagccttgggacgctgcttcccttggactaacgtgacacctcccgctctgcccggaatcacaaatgacaccaccatccagcaggggatctctggtctgatcgatagcctaaatgctcgcgacatctccgtgaaaatatttgaagacttcgctcagagttggtactggattcttgttgctgttggacagatgatgagcactatgttttaccctctggtgaccttcgtcctgctgctcatttgtattgcctattgggcaatgaccgctctgtaccttgcgactagcggacagccgcagtacgtgttatgggcatctaacattagctctcctggttgcgagaaggtgcctatcaatacgagctgcaatcccacggctcacctcgtcaacagcagctgtcccggactcatgtgcgtcttccaggggtatagctcaaaaggacttattcagagatctgtctttaatctgcaaatttacggtgtgctgggactgttttggaccctgaactgggttctggcccttggacagtgtgtactcgcaggcgctttcgcttctttttattgggcctttcacaagccacaggacattcctacctttcccttgatttccgccttcatccgcacattgagataccatacaggtagcttagcctttggtgccctcatcctgaccctcgttcaaattgcaagagtaatcttagagtacattgaccataaactaagatag

SEQ ID NO: 218692 - DNA, 1236 bp, Artificial Sequence
  derived and/or modified sequence
taaagggatgaggatgacgaagcgtacggcaaacctgtaaaatatgatccatcattccgcggtccgatcaaaaatcgcagttgcactgacgttatctgctgtgtcctgttcctgcttttcatattgggctatatcgtggtggggatcgtggcctggctgtacggagatcctcggcaggtgctttacccaagaaattccacaggcgcatattgtggtatgggggaaaataaggataagccatacctgctgtatttcaatatcttcagctgcattctcagcagtaatatcatatccgtggcagagaacgggctccagtgcccaacaccacaggtgtgcgtgagttcctgtcccgaagacccttggactgtgggaaagaatgaatttagccaaacagtgggagaagtgttttataccaagaatcggaacttttgtcttccaggcgttccttggaacatgaccgtgataacaagcctacagcaggaattgtgcccatcctttcttttgccctctgctcccgctctgggaagatgtttcccctggaccaacgtcacccccccagccttgccgggaattactaacgataccacgattcagcaaggaatttctggactaatcgacagtttgaatgccagagacatcagcgtgaagatatttgaggattttgctcagagctggtactggattctggtcgccgtggggcagatgatgagcacaatgttctatccactcgtgacgttcgtgctgctgctaatttgtatcgcatactgggcgatgaccgccctgtacctggcaacaagcggccagcctcagtacgtgctgtgggccagcaacatatctagccctggctgcgagaaggtgccgattaacacctcatgcaatcccaccgcccatttggtgaacagtagttgccccggactcatgtgtgtgtttcaggggtacagcagcaaaggcctcattcagagaagtgtgttcaacctgcaaatatatggtgtactcggcttgttttggacactcaactgggtgctggctttgggtcagtgtgtcctagctggagccttcgcgtctttttactgggcttttcacaaacctcaggacatccccaccttccccctcatctctgcctttatcaggactctcaggtaccacaccgggagtcttgctttcggcgctctgatccttactctagtgcagatcgctagagtcattcttgaatacatcgatcataagcttcggtag

SEQ ID NO: 218693 - DNA, 1236 bp, Artificial Sequence
  derived and/or modified sequence
tagagggatgaagatgacgaggcatatggaaaaccagtgaagtatgatccctccttccgcggtccaatcaaaaaccgttcttgtacggacgtgatttgctgcgtcctttttctgctatttatcctgggttacatagtggttggtattgtggcttggctctacggcgaccccaggcaggtactctaccccaggaattctaccggagcctattgtgggatgggtgaaaacaaggacaagccctacctactgtacttcaacatcttttcatgtatcctgtctagcaacatcatctccgtcgctgagaacgggttacaatgtcccaccccacaagtatgtgtgtcatcttgtccagaagatccatggaccgtcggcaaaaacgaattctctcagaccgtgggtgaagtgttctatactaagaatagaaatttctgcctgcccggagtgccctggaatatgacagtgatcacgtcactgcaacaggaactgtgccctagctttttgttaccatctgccccagctctgggacggtgctttccatggacaaatatcacccctccagctcttcccggaattacgaatgacacgactattcaacaagggatctcaggactaattgattcactcaatgcacgagatatttccgtcaagatcttcgaggacttcgctcagtcgtggtactggatcctggtggctgtggggcaaatgatgtctaccatgttttatcctctcgtgacgttcgttcttctcctgatctgtatagcatactgggcaatgaccgcactatatctggctacctcagggcagcctcagtacgtgttgtgggcaagtaacattagttctccgggatgcgagaaagtgcccatcaatacaagctgcaatccgacagcccatctggtcaactcttcctgccctgggctgatgtgcgtctttcaaggatattcaagtaaagggttaatccagaggtcggttttcaacctccagatctacggggtgttggggctgttttggaccctcaactgggtcctcgccttagggcagtgtgtcctcgctggggcatttgcctcgttctattgggcctttcacaagccacaggacattccaaccttccctctaatctcagccttcatccgcaccctgagatatcacactggaagcctcgcctttggggctctcattctgactctagtgcaaatcgccagagtgatcctggaatatatagaccacaaactgaggtag

SEQ ID NO: 218694 - DNA, 2133 bp, Artificial Sequence
  derived and/or modified sequence
atggggggaaagcagagagatgaggacgacgaagcctatgggaagccagtcaaatacgatccatcctttagggggcctattaagaaccgatcttgcacggatgtgatttgctgcgtgctgttccttctcttcattctaggatacatcgtggtcggcatcgtggcctggctgtatggggacccgaggcaggtactttaccctagaaatagcactggcgcatactgcggtatgggcgaaaacaaagataagccttacttgttatatttcaacatattctcttgcattcttagttctaatataatctctgtggccgaaaatggtctgcagtgccccacacctcaggtctgcgtgtcaagttgccccgaggatccctggactgtagggaagaatgaattctcccagacagtgggcgaggtattttacaccaaaaatcgcaacttttgcctgccaggggtcccatggaatatgaccgtgattacttcactgcagcaagagttgtgtcctagcttcctgctcccctcagctcccgctctgggtaggtgcttcccttggactaacattaccccaccagccttgcccggaatcaccaacgacacgactatccagcagggtatttctgggctgatagacagtctgaatgctcgcgatatttcagtgaagatttttgaagacttcgcacagagctggtattggatactggttgccctgggcgtggccctggttcttagtctcctgttcatcttgttgttgagattggttgctggcccactggtactggtgcttattttgggagtccttggagtgctggcctatgggatttactattgttgggaggaataccgggtgctgagggacaagggagcatccatctcccagctgggcttcaccacaaatcttagcgcttatcagagcgtgcaagaaacttggctggcggctttgattgtcctggccgtcttagaggccattcttctattagtcctgatattcctgcgccagcgtattcggattgctatcgctctcctgaaggaggcgagcaaggcagtggggcagatgatgtcgaccatgttctatccgcttgtcaccttcgtgttattactcatttgcattgcttattgggcgatgacggcactatatctggcgaccagcgggcaaccgcagtacgttctgtgggctagtaacatctcctcccccggttgcgagaaggtgcctataaacacttcatgcaaccccaccgctcaccttgtcaacagcagctgccctggactcatgtgtgtgttccaaggttacagttcgaaaggactgattcaacggagcgtatttaatctacaaatctacggcgttctcggactgttctggaccttgaactgggtcctcgcacttgggcaatgtgtgctggctggcgctttcgcgtcattctactgggcattccacaaacctcaggacattccaaccttcccacttattagcgcgtttataaggaccttgcgctatcacactggaagcctcgcttttggggcattgattctcaccttggtgcagatcgcacgcgtgatcctcgagtacatcgatcacaagcttcgaggtgttcagaacccggttgccagatgcatcatgtgttgctttaagtgttgtctctggtgtctggaaaaatttatcaaattcctgaatcgaaacgcgtatatcatgatcgccatctatggaaagaacttttgcgtttcagctaaaaatgcctttatgctgttaatgcgcaatatcgtgcgcgtcgtcgtgctggataaagtcacagatttgttgctgttcttcggtaagttgcttgtggtggggggagtgggagtacttagcttctttttcttttctggacgcatccccggtctgggtaaggatttcaaaagcccgcacctgaactattactggctccccatcatgactagtatccttggcgcatacgtgattgcgtcgggcttttttagtgtgtttggcatgtgcgtggacacccttttcctgtgcttccttgaagacctggaaaggaataacgggagcctggaccgaccctactacatgtcaaagtcactgctgaagattttggggaagaaaaacgaagccccaccagacaataaaaaacggaagaaatag

SEQ ID NO: 218695 - DNA, 1236 bp, Artificial Sequence
  derived and/or modified sequence
tgacgcgatgaagatgatgaagcatatgggaagcccgtgaagtacgatccttcttttagaggacccattaaaaaccggtcctgtactgatgtcatatgctgtgtactgtttctgctgttcattctgggatacattgttgtcggcattgttgcatggctgtatggcgacccaaggcaggtactatatcctcgcaactcaacaggtgcctactgtggaatgggagagaacaaggacaaaccctacctcctgtacttcaacattttttcttgcattcttagcagtaatatcattagcgtggcagaaaacggtttgcaatgtcctacaccgcaagtctgtgtttctagctgccccgaggacccgtggacggttggcaagaatgaattctcccagactgttggtgaggtcttttataccaaaaacaggaacttctgcttgcctggagtaccctggaatatgaccgtgataacaagtctgcagcaggaattgtgccctagtttcttgctgccaagtgccccagctctcggacgctgttttccatggaccaacatcactcccccagctctgcccggaattacaaatgacacgacgattcagcaggggatcagcggattgatcgatagtctcaatgccagagacatttcagtaaagatattcgaagactttgctcaatcctggtactggattctcgttgcagtggggcagatgatgtcgactatgttctaccccctggtgacctttgtcctgcttttgatctgtatcgcgtattgggcgatgacggccctctacctggccaccagtggccagccacagtacgtactttgggccagtaacatatcatctcctggatgcgagaaggtccctatcaacacctcctgtaatccaaccgcccatcttgttaatagcagctgtccgggactgatgtgcgtgttccaaggctattcttctaaaggcctcatccagcgttctgtttttaatctccagatttacggtgtcttgggcctcttctggacactaaactgggtgctagcacttggccaatgtgtgttggccggagccttcgcgtcgttttattgggccttccataagccccaggacatcccgacattccccctcattagtgcctttattcggactctccgctaccataccgggtctctggcctttggggcactgatcctgactctggtgcagatagctagagtcattctggagtacatcgaccataagctacgttag

SEQ ID NO: 218696 - DNA, 2133 bp, Artificial Sequence
  derived and/or modified sequence
atgggcggaaaacagcgagatgaggacgatgaggcttatggcaagccggtgaagtacgatccgagctttcgcggacccatcaagaatcggtcctgtacagatgtgatttgttgcgtattattcttgctgtttatcctgggatacatagttgttgggatcgttgcttggttgtacggcgacccacgacaggtactttatcccaggaattccaccggagcctattgcggcatgggagaaaataaagataaaccgtatcttttgtacttcaacatcttttcttgcattcttagcagcaacattatctcagtcgctgaaaacggattgcagtgtccaactccgcaagtgtgtgttagtagttgccctgaggatccctggaccgttggaaagaacgagttttcccaaaccgtcggggaagtattctatacaaagaaccggaacttctgtcttcctggcgttccctggaacatgactgtcatcacctccctgcaacaggagctgtgcccctccttcttacttccctcagctcctgccctgggccgttgtttcccttggacgaacgtgaccccccctgcactgcccggtattaccaacgatacaactatccagcaaggcatctcaggcctgatcgacagccttaacgcgcgagacatctcagtgaaaatcttcgaagactttgcccagagctggtattggatactcgtggcccttggggtcgccttggtgctgagcctactctttatactgctgctgcggttagttgccggtcccctcgtgctcgtgctgatactgggggtgctgggagttctggcctatggaatttactactgttgggaggagtaccgcgtgctaagagacaaaggcgcatccattagccagctgggattcaccactaatctgtccgcctaccagtctgtgcaagagacctggctagcagccctgattgttttggctgtacttgaggcaatcctattattgatgcttatttttttgcggcagaggatacgcatagccatcgccctcctaaaagaagcaagtaaggccgtaggtcagatgatgtccactatgttttatcccttagtcacgtttgtcctcctgttgatctgtattgcttattgggcgatgactgccctctacctggcaaccagcgggcagccccagtatgttctgtgggctagtaatatcagctcgccaggctgtgagaaggttccaattaatacgtcatgcaatcctacagcccacctagtaaattccagctgtccaggtttgatgtgcgtcttccaaggctacagtagcaagggcctgatccagcgcagtgtctttaacttgcaaatctacggtgtactcggcctcttttggactctcaattgggtcctcgctttgggccagtgtgtgctcgccggagcattcgcctctttctactgggcattccacaaacctcaggatataccaaccttcccccttatctcagcgtttatcaggacactgagatatcacacaggtagtctggcctttggggctcttatcctgactttggtacagattgccagggtcattctcgagtacatcgaccacaagctgaggggggtgcaaaaccccgtagcccgatgcataatgtgctgtttcaagtgctgcctctggtgcctggagaagttcattaagttcctgaacagaaacgcttacatcatgatcgcgatctacggtaagaacttctgtgtatcagccaaaaatgcattcatgctcctcatgagaaacatcgtgagggtggtcgtgcttgacaaggtgaccgatctgctgctgttcttcgggaaattgctggtagttgggggtgtgggtgttctgtctttttttttcttttcgggtagaatccccggactcggaaaagacttcaagagccctcatttgaattattattggctgccaatcatgactagcattctgggagcttacgtgattgcgtcaggctttttctccgtgttcggcatgtgtgtggacacccttttcctctgcttccttgaggacctcgagagaaacaatgggtctctggaccgaccatattacatgtccaagtccctgctcaagattctcggtaaaaagaatgaggcccctcccgacaataagaagcgcaagaaatag

SEQ ID NO: 218697 - DNA, 1236 bp, Artificial Sequence
  derived and/or modified sequence
tgacgagatgaggacgacgaagcatacggcaaacccgtgaagtatgatccttcctttcgcggtccaataaagaatcgttcctgcaccgatgtaatttgctgcgtcctgtttctcctcttcatccttggatacatagttgtgggaatcgtcgcctggctttacggcgatccccgacaggtcttgtacccaagaaattctactggcgcatattgcggaatgggtgagaacaaagataaaccctatctgctatacttcaatattttctcttgtatcttgagttccaacattatctcggtggcagagaacgggctccagtgtcctaccccccaggtctgtgtttcctcctgccccgaggacccatggacagttggaaagaatgagttcagtcagacagtgggtgaggtcttctacacaaaaaacaggaacttttgtctccctggagtgccctggaacatgaccgtcattacgtccttacaacaggaactgtgcccttcatttctactgccatctgcaccggctcttggaaggtgcttcccttggaccaacgtgacaccacctgccctcccaggcattactaacgacaccactatccagcaaggcataagtgggctgatcgactcactcaatgctagggacatttccgtgaagatcttcgaggactttgcgcagtcttggtattggatccttgtcgctgtgggtcaaatgatgtcgacaatgttttatcccctggtgacatttgtgctgttgctgatttgtatcgcttactgggcaatgaccgccctgtaccttgccacatcaggtcagccccagtatgtactgtgggccagtaatatcagttcaccaggctgcgagaaagtgccaatcaacacctcctgcaaccccacagcccacctggttaactcatcttgcccagggctaatgtgcgtgtttcaaggctactcctcaaagggtctgatccagcggtcagtgtttaaccttcagatctatggggtgctgggcctattttggaccctcaactgggtgttggcactggggcagtgcgtactagcaggcgctttcgccagcttttactgggcattccacaagccacaggacattcctacattccccctgattagtgcttttattcgcacactgagataccacactggtagcctcgcctttggcgcactcattctgacactggtccaaatcgctcgtgtgattctggaatatatcgaccacaagcttaggtag

SEQ ID NO: 218698 - DNA, 2589 bp, Artificial Sequence
  derived and/or modified sequence
aatcactccggagactgagccatggggggaaagcagcgggacgaggatgacgaggcctacgggaagccagtcaaatacgacccctcctttcgaggccccatcaagaacagaagctgcacagatgtcatctgctgcgtcctcttcctgctcttcattctaggttacatcgtggtggggattgtggcctggttgtatggagacccccggcaagtcctctaccccaggaactctactggggcctactgtggcatgggggagaacaaagataagccgtatctcctgtacttcaacatcttcagctgcatcctgtccagcaacatcatctcagttgctgagaacggcctacagtgccccacaccccaggtgtgtgtgtcctcctgcccggaggacccatggactgtgggaaaaaacgagttctcacagactgttggggaagtcttctatacaaaaaacaggaacttttgtctgccaggggtaccctggaatatgacggtgatcacaagcctgcaacaggaactctgccccagtttcctcctcccctctgctccagctctggggcgctgctttccatggaccaacgttactccaccggcgctcccagggatcaccaatgacaccaccatacagcaggggatcagcggtcttattgacagcctcaatgcccgagacatcagtgttaagatctttgaagattttgcccagtcctggtattggattcttgttgccctgggggtggctctggtcttgagcctactgtttatcttgcttctgcgcctggtggctgggcccctggtgctggtgctgatcctgggagtgctgggcgtgctggcatacggcatctactactgctgggaggagtaccgagtgctgcgggacaagggcgcctccatctcccagctgggtttcaccaccaacctcagtgcctaccagagcgtgcaggagacctggctggccgccctgatcgtgttggcggtgcttgaagccatcctgctgctgatgctcatcttcctgcggcagcggattcgtattgccatcgccctcctgaaggaggccagcaaggctgtgggacagatgatgtctaccatgttctacccactggtcacctttgtcctcctcctcatctgcattgcctactgggccatgactgctctgtacctggctacatcggggcaaccccagtatgtgctctgggcatccaacatcagctcccccggctgtgagaaagtgccaataaatacatcatgcaaccccacggcccaccttgtgaactcctcgtgcccagggctgatgtgcgtcttccagggctactcatccaaaggcctaatccaacgttctgtcttcaatctgcaaatctatggggtcctggggctcttctggacccttaactgggtactggccctgggccaatgcgtcctcgctggagcctttgcctccttctactgggccttccacaagccccaggacatccctaccttccccttaatctctgccttcatccgcacactccgttaccacactgggtcattggcatttggagccctcatcctgacccttgtgcagatagcccgggtcatcttggagtatattgaccacaagctcagaggagtgcagaaccctgtagcccgctgcatcatgtgctgtttcaagtgctgcctctggtgtctggaaaaatttatcaagttcctaaaccgcaatgcatacatcatgatcgccatctacgggaagaatttctgtgtctcagccaaaaatgcgttcatgctactcatgcgaaacattgtcagggtggtcgtcctggacaaagtcacagacctgctgctgttctttgggaagctgctggtggtcggaggcgtgggggtcctgtccttcttttttttctccggtcgcatcccggggctgggtaaagactttaagagcccccacctcaactattactggctgcccatcatgacctccatcctgggggcctatgtcatcgccagcggcttcttcagcgttttcggcatgtgtgtggacacgctcttcctctgcttcctggaagacctggagcggaacaacggctccctggaccggccctactacatgtccaagagccttctaaagattctgggcaagaagaacgaggcgcccccggacaacaagaagaggaagaagtgacagctccggccctgatccaggactgcaccccacccccaccgtccagccatccaacctcacttcgccttacaggtctccattttgtggtaaaaaaaggttttaggccaggcgccgtggctcacgcctgtaatccaacactttgagaggctgaggcgggcggatcacctgagtcaggagttcgagaccagcctggccaacatggtgaaacctccgtctctattaaaaatacaaaaattagccgagagtggtggcatgcacctgtcatcccagctactcgggaggctgaggcaggagaatcgcttgaacccgggaggcagaggttgcagtgagccgagatcgcgccactgcactccaacctgggtgacagactctgtctccaaaacaaaacaaacaaacaaaaagattttattaaagatattttgttaactcagtaaa

SEQ ID NO: 218699 - DNA, 1233 bp, Artificial Sequence
  derived and/or modified sequence
agcgggacgaggatgacgaggcctacgggaagccagtcaaatacgacccctcctttcgaggccccatcaagaacagaagctgcacagatgtcatctgctgcgtcctcttcctgctcttcattctaggttacatcgtggtggggattgtggcctggttgtatggagacccccggcaagtcctctaccccaggaactctactggggcctactgtggcatgggggagaacaaagataagccgtatctcctgtacttcaacatcttcagctgcatcctgtccagcaacatcatctcagttgctgagaacggcctacagtgccccacaccccaggtgtgtgtgtcctcctgcccggaggacccatggactgtgggaaaaaacgagttctcacagactgttggggaagtcttctatacaaaaaacaggaacttttgtctgccaggggtaccctggaatatgacggtgatcacaagcctgcaacaggaactctgccccagtttcctcctcccctctgctccagctctggggcgctgctttccatggaccaacgttactccaccggcgctcccagggatcaccaatgacaccaccatacagcaggggatcagcggtcttattgacagcctcaatgcccgagacatcagtgttaagatctttgaagattttgcccagtcctggtattggattcttgtggctgtgggacagatgatgtctaccatgttctacccactggtcacctttgtcctcctcctcatctgcattgcctactgggccatgactgctctgtacctggctacatcggggcaaccccagtatgtgctctgggcatccaacatcagctcccccggctgtgagaaagtgccaataaatacatcatgcaaccccacggcccaccttgtgaactcctcgtgcccagggctgatgtgcgtcttccagggctactcatccaaaggcctaatccaacgttctgtcttcaatctgcaaatctatggggtcctggggctcttctggacccttaactgggtactggccctgggccaatgcgtcctcgctggagcctttgcctccttctactgggccttccacaagccccaggacatccctaccttccccttaatctctgccttcatccgcacactccgttaccacactgggtcattggcatttggagccctcatcctgacccttgtgcagatagcccgggtcatcttggagtatattgaccacaagctcagag

SEQ ID NO: 218700 - DNA, 1233 bp, Artificial Sequence
  derived and/or modified sequence
agcgggacgaggatgacgaggcctacgggaagccagtcaaatacgacccctcctttcgaggccccatcaagaacagaagctgcacagatgtcatctgctgcgtcctcttcctgctcttcattctaggttacatcgtggtggggattgtggcctggttgtatggagacccccggcaagtcctctaccccaggaactctactggggcctactgtggcatgggggagaacaaagataagccgtatctcctgtacttcaacatcttcagctgcatcctgtccagcaacatcatctcagttgctgagaacggcctacagtgccccacaccccaggtgtgtgtgtcctcctgcccggaggacccatggactgtgggaaaaaacgagttctcacagactgttggggaagtcttctatacaaaaaacaggaacttttgtctgccaggggtaccctggaatatgacggtgatcacaagcctgcaacaggaactctgccccagtttcctcctcccctctgctccagctctgggacgctgctttccatggaccaacattactccaccggcgctcccagggatcaccaatgacaccaccatacagcaggggatcagcggtcttattgacagcctcaatgcccgagacatcagtgttaagatctttgaagattttgcccagtcctggtattggattcttgtggctgtgggacagatgatgtctaccatgttctacccactggtcacctttgtcctcctcctcatctgcattgcctactgggccatgactgctctgtacctggctacatcggggcaaccccagtatgtgctctgggcatccaacatcagctcccccggctgtgagaaagtgccaataaatacatcatgcaaccccacggcccaccttgtgaactcctcgtgcccagggctgatgtgcgtcttccagggctactcatccaaaggcctaatccaacgttctgtcttcaatctgcaaatctatggggtcctggggctcttctggacccttaactgggtactggccctgggccaatgcgtcctcgctggagcctttgcctccttctactgggccttccacaagccccaggacatccctaccttccccttaatctctgccttcatccgcacactccgttaccacactgggtcattggcatttggagccctcatcctgacccttgtgcagatagcccgggtcatcttggagtatattgaccacaagctcagag

SEQ ID NO: 218701 - DNA, 2589 bp, Artificial Sequence
  derived and/or modified sequence
aatcactccggagactgagccatggggggaaagcagcgggacgaggatgacgaggcctacgggaagccagtcaaatacgacccctcctttcgaggccccatcaagaacagaagctgcacagatgtcatctgctgcgtcctcttcctgctcttcattctaggttacatcgtggtggggattgtggcctggttgtatggagacccccggcaagtcctctaccccaggaactctactggggcctactgtggcatgggggagaacaaagataagccgtatctcctgtacttcaacatcttcagctgcatcctgtccagcaacatcatctcagttgctgagaacggcctacagtgccccacaccccaggtgtgtgtgtcctcctgcccggaggacccatggactgtgggaaaaaacgagttctcacagactgttggggaagtcttctatacaaaaaacaggaacttttgtctgccaggggtaccctggaatatgacggtgatcacaagcctgcaacaggaactctgccccagtttcctcctcccctctgctccagctctgggacgctgctttccatggaccaacattactccaccggcgctcccagggatcaccaatgacaccaccatacagcaggggatcagcggtcttattgacagcctcaatgcccgagacatcagtgttaagatctttgaagattttgcccagtcctggtattggattcttgttgccctgggggtggctctggtcttgagcctactgtttatcttgcttctgcgcctggtggctgggcccctggtgctggtgctgatcctgggagtgctgggcgtgctggcatatggcatctactactgctgggaggagtaccgagtgctgcgggacaagggcgcctccatctcccagctgggtttcaccaccaacctcagtgcctaccagagcgtgcaggagacctggctggccgccctgatcgtgttggcggtgcttgaagccatcctgctgctggtgctcatcttcctgcggcagcggattcgtattgccatcgccctcctgaaggaggccagcaaggctgtgggacagatgatgtctaccatgttctacccactggtcacctttgtcctcctcctcatctgcattgcctactgggccatgactgctctgtacctggctacatcggggcaaccccagtatgtgctctgggcatccaacatcagctcccccggctgtgagaaagtgccaataaatacatcatgcaaccccacggcccaccttgtgaactcctcgtgcccagggctgatgtgcgtcttccagggctactcatccaaaggcctaatccaacgttctgtcttcaatctgcaaatctatggggtcctggggctcttctggacccttaactgggtactggccctgggccaatgcgtcctcgctggagcctttgcctccttctactgggccttccacaagccccaggacatccctaccttccccttaatctctgccttcatccgcacactccgttaccacactgggtcattggcatttggagccctcatcctgacccttgtgcagatagcccgggtcatcttggagtatattgaccacaagctcagaggagtgcagaaccctgtagcccgctgcatcatgtgctgtttcaagtgctgcctctggtgtctggaaaaatttatcaagttcctaaaccgcaatgcatacatcatgatcgccatctacgggaagaatttctgtgtctcagccaaaaatgcgttcatgctactcatgcgaaacattgtcagggtggtcgtcctggacaaagtcacagacctgctgctgttctttgggaagctgctggtggtcggaggcgtgggggtcctgtccttcttttttttctccggtcgcatcccggggctgggtaaagactttaagagcccccacctcaactattactggctgcccatcatgacctccatcctgggggcctatgtcatcgccagcggcttcttcagcgttttcggcatgtgtgtggacacgctcttcctctgcttcctggaagacctggagcggaacaacggctccctggaccggccctactacatgtccaagagccttctaaagattctgggcaagaagaacgaggcgcccccggacaacaagaagaggaagaagtgacagctccggccctgatccaggactgcaccccacccccaccgtccagccatccaacctcacttcgccttacaggtctccattttgtggtaaaaaaaggttttaggccaggcgccgtggctcacgcctgtaatccaacactttgagaggctgaggcgggcggatcacctgagtcaggagttcgagaccagcctggccaacatggtgaaacctccgtctctattaaaaatacaaaaattagccgagagtggtggcatgcacctgtcatcccagctactcgggaggctgaggcaggagaatcgcttgaacccgggaggcagaggttgcagtgagccgagatcgcgccactgcactccaacctgggtgacagactctgtctccaaaacaaaacaaacaaacaaaaagattttattaaagatattttgttaactcagtaaa

SEQ ID NO: 218702 - DNA, 2634 bp, Artificial Sequence
  derived and/or modified sequence
actgaggtcccaccagagtgaggatgtacagggccgcttccctccccaggccctgctggggttgacacctttgtctccagtttctttccccatagccttgaaccagaggggaagccagtcaaatacgacccctcctttcgaggccccatcaagaacagaagctgcacagatgtcatctgctgcgtcctcttcctgctcttcattctaggttacatcgtggtggggattgtggcctggttgtatggagacccccggcaagtcctctaccccaggaactctactggggcctactgtggcatgggggagaacaaagataagccgtatctcctgtacttcaacatcttcagctgcatcctgtccagcaacatcatctcagttgctgagaacggcctacagtgccccacaccccaggtgtgtgtgtcctcctgcccggaggacccatggactgtgggaaaaaacgagttctcacagactgttggggaagtcttctatacaaaaaacaggaacttttgtctgccaggggtaccctggaatatgacggtgatcacaagcctgcaacaggaactctgccccagtttcctcctcccctctgctccagctctggggcgctgctttccatggaccaacgttactccaccggcgctcccagggatcaccaatgacaccaccatacagcaggggatcagcggtcttattgacagcctcaatgcccgagacatcagtgttaagatctttgaagattttgcccagtcctggtattggattcttgttgccctgggggtggctctggtcttgagcctactgtttatcttgcttctgcgcctggtggctgggcccctggtgctggtgctgatcctgggagtgctgggcgtgctggcatacggcatctactactgctgggaggagtaccgagtgctgcgggacaagggcgcctccatctcccagctgggtttcaccaccaacctcagtgcctaccagagcgtgcaggagacctggctggccgccctgatcgtgttggcggtgcttgaagccatcctgctgctgatgctcatcttcctgcggcagcggattcgtattgccatcgccctcctgaaggaggccagcaaggctgtgggacagatgatgtctaccatgttctacccactggtcacctttgtcctcctcctcatctgcattgcctactgggccatgactgctctgtacctggctacatcggggcaaccccagtatgtgctctgggcatccaacatcagctcccccggctgtgagaaagtgccaataaatacatcatgcaaccccacggcccaccttgtgaactcctcgtgcccagggctgatgtgcgtcttccagggctactcatccaaaggcctaatccaacgttctgtcttcaatctgcaaatctatggggtcctggggctcttctggacccttaactgggtactggccctgggccaatgcgtcctcgctggagcctttgcctccttctactgggccttccacaagccccaggacatccctaccttccccttaatctctgccttcatccgcacactccgttaccacactgggtcattggcatttggagccctcatcctgacccttgtgcagatagcccgggtcatcttggagtatattgaccacaagctcagaggagtgcagaaccctgtagcccgctgcatcatgtgctgtttcaagtgctgcctctggtgtctggaaaaatttatcaagttcctaaaccgcaatgcatacatcatgatcgccatctacgggaagaatttctgtgtctcagccaaaaatgcgttcatgctactcatgcgaaacattgtcagggtggtcgtcctggacaaagtcacagacctgctgctgttctttgggaagctgctggtggtcggaggcgtgggggtcctgtccttcttttttttctccggtcgcatcccggggctgggtaaagactttaagagcccccacctcaactattactggctgcccatcatgacctccatcctgggggcctatgtcatcgccagcggcttcttcagcgttttcggcatgtgtgtggacacgctcttcctctgcttcctggaagacctggagcggaacaacggctccctggaccggccctactacatgtccaagagccttctaaagattctgggcaagaagaacgaggcgcccccggacaacaagaagaggaagaagtgacagctccggccctgatccaggactgcaccccacccccaccgtccagccatccaacctcacttcgccttacaggtctccattttgtggtaaaaaaaggttttaggccaggcgccgtggctcacgcctgtaatccaacactttgagaggctgaggcgggcggatcacctgagtcaggagttcgagaccagcctggccaacatggtgaaacctccgtctctattaaaaatacaaaaattagccgagagtggtggcatgcacctgtcatcccagctactcgggaggctgaggcaggagaatcgcttgaacccgggaggcagaggttgcagtgagccgagatcgcgccactgcactccaacctgggtgacagactctgtctccaaaacaaaacaaacaaacaaaaagattttattaaagatattttgttaactcagt

SEQ ID NO: 218703 - DNA, 2634 bp, Artificial Sequence
  derived and/or modified sequence
actgaggtcccaccagagtgaggatgtacagggccgcttccctccccaggccctgctggggttgacacctttgtctccagtttctttccccatagccttgaaccagaggggaagccagtcaaatacgacccctcctttcgaggccccatcaagaacagaagctgcacagatgtcatctgctgcgtcctcttcctgctcttcattctaggttacatcgtggtggggattgtggcctggttgtatggagacccccggcaagtcctctaccccaggaactctactggggcctactgtggcatgggggagaacaaagataagccgtatctcctgtacttcaacatcttcagctgcatcctgtccagcaacatcatctcagttgctgagaacggcctacagtgccccacaccccaggtgtgtgtgtcctcctgcccggaggacccatggactgtgggaaaaaacgagttctcacagactgttggggaagtcttctatacaaaaaacaggaacttttgtctgccaggggtaccctggaatatgacggtgatcacaagcctgcaacaggaactctgccccagtttcctcctcccctctgctccagctctgggacgctgctttccatggaccaacattactccaccggcgctcccagggatcaccaatgacaccaccatacagcaggggatcagcggtcttattgacagcctcaatgcccgagacatcagtgttaagatctttgaagattttgcccagtcctggtattggattcttgttgccctgggggtggctctggtcttgagcctactgtttatcttgcttctgcgcctggtggctgggcccctggtgctggtgctgatcctgggagtgctgggcgtgctggcatatggcatctactactgctgggaggagtaccgagtgctgcgggacaagggcgcctccatctcccagctgggtttcaccaccaacctcagtgcctaccagagcgtgcaggagacctggctggccgccctgatcgtgttggcggtgcttgaagccatcctgctgctggtgctcatcttcctgcggcagcggattcgtattgccatcgccctcctgaaggaggccagcaaggctgtgggacagatgatgtctaccatgttctacccactggtcacctttgtcctcctcctcatctgcattgcctactgggccatgactgctctgtacctggctacatcggggcaaccccagtatgtgctctgggcatccaacatcagctcccccggctgtgagaaagtgccaataaatacatcatgcaaccccacggcccaccttgtgaactcctcgtgcccagggctgatgtgcgtcttccagggctactcatccaaaggcctaatccaacgttctgtcttcaatctgcaaatctatggggtcctggggctcttctggacccttaactgggtactggccctgggccaatgcgtcctcgctggagcctttgcctccttctactgggccttccacaagccccaggacatccctaccttccccttaatctctgccttcatccgcacactccgttaccacactgggtcattggcatttggagccctcatcctgacccttgtgcagatagcccgggtcatcttggagtatattgaccacaagctcagaggagtgcagaaccctgtagcccgctgcatcatgtgctgtttcaagtgctgcctctggtgtctggaaaaatttatcaagttcctaaaccgcaatgcatacatcatgatcgccatctacgggaagaatttctgtgtctcagccaaaaatgcgttcatgctactcatgcgaaacattgtcagggtggtcgtcctggacaaagtcacagacctgctgctgttctttgggaagctgctggtggtcggaggcgtgggggtcctgtccttcttttttttctccggtcgcatcccggggctgggtaaagactttaagagcccccacctcaactattactggctgcccatcatgacctccatcctgggggcctatgtcatcgccagcggcttcttcagcgttttcggcatgtgtgtggacacgctcttcctctgcttcctggaagacctggagcggaacaacggctccctggaccggccctactacatgtccaagagccttctaaagattctgggcaagaagaacgaggcgcccccggacaacaagaagaggaagaagtgacagctccggccctgatccaggactgcaccccacccccaccgtccagccatccaacctcacttcgccttacaggtctccattttgtggtaaaaaaaggttttaggccaggcgccgtggctcacgcctgtaatccaacactttgagaggctgaggcgggcggatcacctgagtcaggagttcgagaccagcctggccaacatggtgaaacctccgtctctattaaaaatacaaaaattagccgagagtggtggcatgcacctgtcatcccagctactcgggaggctgaggcaggagaatcgcttgaacccgggaggcagaggttgcagtgagccgagatcgcgccactgcactccaacctgggtgacagactctgtctccaaaacaaaacaaacaaacaaaaagattttattaaagatattttgttaactcagt

SEQ ID NO: 218704 - DNA, 2133 bp, Artificial Sequence
  derived and/or modified sequence
atgggcggcaagcagagagacgaggacgacgaggcctacggcaagcccgtgaagtacgaccccagcttcagaggccccatcaagaacagaagctgcaccgacgtgatctgctgcgtgctgttcctgctgttcatcctgggctacatcgtggtgggcatcgtggcctggctgtacggcgaccccagacaggtgctgtaccccagaaacagcaccggcgcctactgcggcatgggcgagaacaaggacaagccctacctgctgtacttcaacatcttcagctgcatcctgagcagcaacatcatcagcgtggccgagaacggcctgcagtgccccaccccccaggtgtgcgtgagcagctgccccgaggacccctggaccgtgggcaagaacgagttcagccagaccgtgggcgaggtgttctacaccaagaacagaaacttctgcctgcccggcgtgccctggaacatgaccgtgatcaccagcctgcagcaggagctgtgccccagcttcctgctgcccagcgcccccgccctgggcagatgcttcccctggaccaacgtgaccccccccgccctgcccggcatcaccaacgacaccaccatccagcagggcatcagcggcctgatcgacagcctgaacgccagagacatcagcgtgaagatcttcgaggacttcgcccagagctggtactggatcctggtggccctgggcgtggccctggtgctgagcctgctgttcatcctgctgctgagactggtggccggccccctggtgctggtgctgatcctgggcgtgctgggcgtgctggcctacggcatctactactgctgggaggagtacagagtgctgagagacaagggcgccagcatcagccagctgggcttcaccaccaacctgagcgcctaccagagcgtgcaggagacctggctggccgccctgatcgtgctggccgtgctggaggccatcctgctgctgatgctgatcttcctgagacagagaatcagaatcgccatcgccctgctgaaggaggccagcaaggccgtgggccagatgatgagcaccatgttctaccccctggtgaccttcgtgctgctgctgatctgcatcgcctactgggccatgaccgccctgtacctggccaccagcggccagccccagtacgtgctgtgggccagcaacatcagcagccccggctgcgagaaggtgcccatcaacaccagctgcaaccccaccgcccacctggtgaacagcagctgccccggcctgatgtgcgtgttccagggctacagcagcaagggcctgatccagagaagcgtgttcaacctgcagatctacggcgtgctgggcctgttctggaccctgaactgggtgctggccctgggccagtgcgtgctggccggcgccttcgccagcttctactgggccttccacaagccccaggacatccccaccttccccctgatcagcgccttcatcagaaccctgagataccacaccggcagcctggccttcggcgccctgatcctgaccctggtgcagatcgccagagtgatcctggagtacatcgaccacaagctgagaggcgtgcagaaccccgtggccagatgcatcatgtgctgcttcaagtgctgcctgtggtgcctggagaagttcatcaagttcctgaacagaaacgcctacatcatgatcgccatctacggcaagaacttctgcgtgagcgccaagaacgccttcatgctgctgatgagaaacatcgtgagagtggtggtgctggacaaggtgaccgacctgctgctgttcttcggcaagctgctggtggtgggcggcgtgggcgtgctgagcttcttcttcttcagcggcagaatccccggcctgggcaaggacttcaagagcccccacctgaactactactggctgcccatcatgaccagcatcctgggcgcctacgtgatcgccagcggcttcttcagcgtgttcggcatgtgcgtggacaccctgttcctgtgcttcctggaggacctggagagaaacaacggcagcctggacagaccctactacatgagcaagagcctgctgaagatcctgggcaagaagaacgaggccccccccgacaacaagaagagaaagaagtag

SEQ ID NO: 218705 - protein, 852 aa, Artificial Sequence
  derived and/or modified sequence
MLPTEVPQSHPGPSALLLLQLLLPPTSAFFPNIWSLLAAPGSITHQDLTEEAALNVTLQLFLEQPPPGRPPLRLEDFLGRTLLADDLFAAYFGPGSSRRFRAALGEVSRANAAQDFLPTSRNDPDLHFDAERLGQGRARLVGALRETVVAARALDHTLARQRLGAALHALQDFYSHSNWVELGEQQPHPHLLWPRQELQNLAQVADPTCSDCEELSCPRNWLGFTLLTSGYFGTHPPKPPGKCSHGGHFDRSSSQPPRGGINKDSTSPGFSPHHMLHLQAAKLALLASIQAFSLLRSRLGDRDFSRLLDITPASSLSFVLDTTGSMGEEINAAKIQARHLVEQRRGSPMEPVHYVLVPFHDPGFGPVFTTSDPDSFWQQLNEIHALGGGDEPEMCLSALQLALLHTPPLSDIFVFTDASPKDAFLTNQVESLTQERRCRVTFLVTEDTSRVQGRARREILSPLRFEPYKAVALASGGEVIFTKDQHIRDVAAIVGESMAALVTLPLDPPVVVPGQPLVFSVDGLLQKITVRIHGDISSFWIKNPAGVSQGQEEGGGPLGHTRRFGQFWMVTMDDPPQTGTWEIQVTAEDTPGVRVQAQTSLDFLFHFGIPMEDGPHPGLYPLTQPVAGLQTQLLVEVTGLGSRANPGDPQPHFSHVILRGVPEGAELGQVPLEPVGPPERGLLAASLSPTLLSTPRPFSLELIGQDAAGRRLHRAAPQPSTVVPVLLELSGPSGFLAPGSKVPLSLRIASFSGPQDLDLRTFVNPSFSLTSNLSRAHLELNESAWGRLWLEVPDSAAPDSVVMVTVTAGGREANPVPPTHAFLRLLVSAPAPQVRNHYFPSQGPAHHPYRLI

SEQ ID NO: 218706 - protein, 891 aa, Artificial Sequence
  derived and/or modified sequence
MLPTEVPQSHPGPSALLLLQLLLPPTSAFFPNIWSLLAAPGSITHQDLTEEAALNVTLQLFLEQPPPGRPPLRLEDFLGRTLLADDLFAAYFGPGSSRRFRAALGEVSRANAAQDFLPTSRNDPDLHFDAERLGQGRARLVGALRETVVAARALDHTLARQRLGAALHALQDFYSHSNWVELGEQQPHPHLLWPRQELQNLAQVADPTCSDCEELSCPRNWLGFTLLTSGYFGTHPPKPPGKCSHGGHFDRSSSQPPRGGINKDSTSPGFSPHHMLHLQAAKLALLASIQAFSLLRSRLGDRDFSRLLDITPASSLSFVLDTTGSMGEEINAAKIQARHLVEQRRGSPMEPVHYVLVPFHDPGFGPVFTTSDPDSFWQQLNEIHALGGGDEPEMCLSALQLALLHTPPLSDIFVFTDASPKDAFLTNQVESLTQERRCRVTFLVTEDTSRVQGRARREILSPLRFEPYKAVALASGGEVIFTKDQHIRDVAAIVGESMAALVTLPLDPPVVVPGQPLVFSVDGLLQKITVRIHGDISSFWIKNPAGVSQGQEEGGGPLGHTRRFGQFWMVTMDDPPQTGTWEIQVTAEDTPGVRVQAQTSLDFLFHFGIPMEDGPHPGLYPLTQPVAGLQTQLLVEVTGLGSRANPGDPQPHFSHVILRGVPEGAELGQVPLEPVGPPERGLLAASLSPTLLSTPRPFSLELIGQDAAGRRLHRAAPQPSTVVPVLLELSGPSGFLAPGSKVPLSLRIASFSGPQDLDLRTFVNPSFSLTSNLSRAHLELNESAWGRLWLEVPDSAAPDSVVMVTVTAGGREANPVPPTHAFLRLLVSAPAPQDRHTTPTGSSDPILTTATPAFSPFTLVTQGRAGAGLAAGSPWWGTVGGVLLLLGLASW

SEQ ID NO: 218707 - protein, 891 aa, Artificial Sequence
  derived and/or modified sequence
MLPTEVPQSHPGPSALLLLQLLLPPTSAFFPNIWSLLAAPGSITHQDLTEEAALNVTLQLFLEQPPPGRPPLRLEDFLGRTLLADDLFAAYFGPGSSRRFRAALGEVSRANAAQDFLPTSRNDPDLHFDAERLGQGRARLVGALRETVVAARALDHTLARQRLGAALHALQDFYSHSNWVELGEQQPHPHLLWPRQELQNLAQVADPTCSDCEELSCPRNWLGFTLLTSGYFGTHPPKPPGKCSHGGHFDRSSSQPPRGGINKDSTSPGFSPHHMLHLQAAKLALLASIQAFSLLRSRLGDRDFSRLLDITPASSLSFVLDTTGSMGEEINAAKIQARHLVEQRRGSPMEPVHYVLVPFHDPGFGPVFTTSDPDSFWQQLNEIHALGGGDEPEMCLSALQLALLHTPPLSDIFVFTDASPKDAFLTNQVESLTQERRCRVTFLVTEDTSRVQGRARREILSPLRFEPYKAVALASGGEVIFTKDQHIRDVAAIVGESMAALVTLPLDPPVVVPGQPLVFSVDGLLQKITVRIHGDISSFWIKNPAGVSQGQEEGGGPLGHTRRFGQFWMVTMDDPPQTGTWEIQVTAEDTPGVRVQAQTSLDFLFHFGIPMEDGPHPGLYPLTQPVAGLQTQLLVEVTGLGSRANPGDPQPHFSHVILRGVPEGAELGQVPLEPVGPPERGLLAASLSPTLLSTPRPFSLELIGQDAAGRRLHRAAPQPSTVVPVLLELSGPSGFLAPGSKVPLSLRIASFSGPQDLDLRTFVNPSFSLTSNLSRAHLELNESAWGRLWLEVPDSAAPDSVVMVTVTAGGREANPVPPTHAFLRLLVSAPAPQDRHTTPTGSSDPILTTATPAFSPFTLVAQGRAGAGLAAGSPWWGTVGGVLLLLGLASW

SEQ ID NO: 218708 - DNA, 2559 bp, Artificial Sequence
  derived and/or modified sequence
atgctgcccaccgaggtgccccagagccaccccggccccagcgccttgctcctgctgcaactgctcctgccgcctacttctgccttttttccaaacatctggtccctcctggccgctccaggctccatcactcaccaggacttaacagaagaggctgcacttaatgtgacacttcaactgttcctggaacagcccccacctggccgaccaccactgcgcctggaagactttctaggcaggactcttcttgctgacgacctttttgccgcatacttcggacccggctcctctcgccggttccgggccgcgctgggggaggtgtctcgggcgaacgcggcccaggactttttgccaacaagccggaatgatcctgatctccatttcgatgctgagcggctgggccaggggagagcccggctggtgggcgcgctgcgggagactgttgttgccgccagagcgttggatcacactctcgcccgccagcgcttgggagcggccttacacgcgttgcaggatttttattcacacagtaactgggtcgagctgggcgagcagcagcctcacccccatctcctttggcctagacaggagctacagaatctggctcaagtggccgatcccacatgtagcgactgcgaagagttatcctgtccgcgtaactggctcgggtttacactcttgacatcaggatattttggcactcaccccccaaagccaccaggcaagtgctcacacggcggacacttcgataggtcctcaagtcagccccctcggggagggatcaacaaagactctaccagtcctggattctccccacaccatatgctgcacctccaagctgccaaactggcactactggccagcatccaggctttttcactgctgagatcacgtctgggggatagagacttcagcagactcctggatattaccccagcctccagtctcagctttgtactagacaccacaggtagtatgggcgaggaaataaatgctgccaagatccaagcgcgccacttagtggagcagagacgcggcagcccgatggagcctgtccattacgtactggttcctttccacgatccaggatttggtcccgtctttactacctctgaccctgactccttctggcagcaactgaacgagatacacgccctgggggggggcgacgagcctgaaatgtgcctcagtgcgctgcagctcgccctcctgcacacaccacccctgtccgacatctttgtcttcaccgacgcctcaccaaaagacgcctttctgacgaatcaggttgagagcctgacgcaggagcggcgttgtcgagtgacctttcttgtgactgaggatacctcacgggttcagggacgggcaaggagagagatcttgagtcctctccgcttcgagccctataaagccgtggcgctcgcctctggcggagaagtcatcttcaccaaggaccaacatattcgcgacgtggctgctattgtcggcgagagcatggcagcattggtcaccctgcctctagatccccctgttgtggttcccggacagcctttagtcttcagtgtggatggactcttgcagaaaatcaccgttcgaatccatggtgacatttcctccttctggatcaaaaatcccgccggcgtttcgcagggacaggaggaggggggtggccctcttgggcacacacggcgctttggccagttttggatggttaccatggatgatcccccccagactgggacctgggaaatccaagtgaccgcagaggatacacctggtgtgcgggttcaggctcagacgtcactagacttcctgttccatttcggcatccccatggaagacggccctcacccggggctctatcccctgacacagccagtggccggactgcagacgcagctgctcgtggaggttactggactcgggtcaagagcaaaccccggtgatccccagccccactttagtcacgtgatactgcgcggagtcccagagggcgccgaattagggcaggttccactagagccggtgggccctccggaaagaggcctgctagctgccagcttgtcaccgactctattatcaactcctcgaccattctcactggaactcataggccaggacgccgctggtcgacggcttcatcgagctgcacctcaaccaagcactgtcgtccccgtcctgttagaactgagcgggcccagtggattcttagcgcccggatccaaagtccccctcagcctaaggatcgccagcttttcagggccccaagacctcgacctgagaaccttcgtgaacccgagtttttcacttacttctaacctttcacgagcccatcttgaactaaacgagtcagcctggggtcgactgtggctggaggtccccgactccgcggcccctgacagcgtagtgatggtgactgttactgccggaggtagggaagccaaccccgtgccgccaactcacgcttttctgagactgctggtgagtgcacctgcaccgcaggtgcggaatcattatttcccaagccaggggcccgcccaccacccttaccgtcttatatag

SEQ ID NO: 218709 - DNA, 2559 bp, Artificial Sequence
  derived and/or modified sequence
atgctgcccaccgaggtgccccagagccaccccggccccagcgccttgttactgctgcagcttttgctcccgccaacctccgcctttttccctaatatctggagtctgctggcggcaccggggagcattacccatcaggacctgaccgaagaggctgctctcaatgtgacactgcaactgtttctggagcagcctccacctggccgcccacccttgcgattagaggacttcctgggccggactttgctggctgacgatcttttcgccgcctactttgggcctggaagttcacggcggttccgcgctgcgctgggcgaggtgagccgggctaatgccgcccaggattttctgccaacctctcggaatgatccagatctccatttcgatgccgagagactgggtcagggaagggctagactagtgggggccctgcgggaaaccgtcgtggctgctcgggctctagatcataccctggccaggcagaggctcggtgcagctctacacgccttacaggacttttactctcatagcaactgggtggaactgggggaacaacagccccacccccacctactgtggccgcgccaagagcttcaaaatctggcccaagtggcggacccaacttgctccgattgcgaggaactgtcctgcccccggaactggcttggcttcacactactgacatctggctacttcggtactcatcctcctaaacccccaggcaagtgctctcacggaggccattttgaccgcagctcctcccagccacctcggggtggcatcaataaggacagtacttcacccgggttctcccctcaccatatgctgcaccttcaggccgcgaaactggccttacttgccagtattcaggctttcagtcttttgagatctcggctgggggaccgcgatttctctaggttgctggacatcacccctgcatcatccctttctttcgtgctggatacaacgggatcaatgggagaagaaattaacgctgccaaaatccaggcaagacacctggtggaacaacgtcgtggttcccccatggaacccgtacattacgtgttagtgccatttcatgaccccgggtttgggcctgtcttcacaaccagcgatccagacagcttctggcagcagctgaacgaaattcacgctttgggaggcggggatgagcctgaaatgtgcctctcggctttgcaattggcattgcttcacaccccaccattgtccgatatttttgtctttacagatgcatcacccaaagatgccttcctgacaaaccaggtggagtccctaacccaagaaagaaggtgccgcgtgacattccttgtgaccgaggatactagtcgtgtacaaggccgagccaggcgcgaaatcctgagtccactcagattcgagccttataaggccgtggctctggcctcagggggcgaagttatctttacaaaagatcaacacatccgtgacgtggctgcgatcgtcggcgagtcaatggccgcacttgttacattgccattagacccccctgtcgtcgtccccggacaacctttggttttcagtgtcgatgggctgctgcagaaaatcaccgttcgcatccatggagacatctccagcttctggattaagaatcccgcgggagtgtcgcagggtcaggaggagggaggaggccccctgggtcacacgcgccggttcggccagttttggatggtaacaatggacgatccaccacagacaggaacatgggagattcaagtcaccgccgaggatacgcccggggtcagggtgcaggcacagacatcgctcgatttcctgtttcacttcggcattccaatggaggatggtcctcatccaggtttgtatcccctgactcaacctgtggccggacttcagacgcagcttttggtagaggtgacaggcctaggatcacgagccaaccccggtgaccctcaaccccacttcagccatgtgatactgcgcggcgtcccggaaggagccgaactcggccaggtgcccctcgagcctgttggcccgccagaaagaggtctgttagctgcaagcctgtcacccacactgctgagcactccacggccttttagccttgagctgatcggccaggatgccgccggccgccgcttgcaccgagcagcccctcagcctagcaccgttgtgccggtacttctagagttgagcggcccgagtggcttcctggcacctggcagtaaagtccctctgagcctgcgtatagccagtttctccgggcctcaagatctcgacctgaggactttcgtaaatccatcatttagtctcactagcaatctcagccgagctcaccttgaacttaacgaatccgcatggggtagactctggcttgaagtgcctgattcagccgccccagactctgtggtcatggtgacggttactgctggcggacgagaagctaaccctgtccctccaactcatgctttcctgcgactcctggtttcagcccccgcacctcaggttaggaatcattacttccccagtcaaggccctgcacatcacccttaccggttaatctag

SEQ ID NO: 218710 - DNA, 2559 bp, Artificial Sequence
  derived and/or modified sequence
atgctgcccaccgaggtgccccagagccaccccggccccagcgccttactgctgttgcaacttttactgcctccaacaagcgcattcttcccaaacatctggtctcttcttgcggcccctggctccattacacatcaagacctcaccgaggaagccgctctcaacgtaacgctccagctttttctggagcagccccctcctgggcggcctcccctgcggctagaagatttcctcgggcgaacgctgctggccgacgatctcttcgccgcttattttgggccggggtcttcccggcgcttccgcgcggccctcggagaggtcagtcgggcaaatgcagcacaggacttcctccccacctccaggaatgaccccgacttgcacttcgacgccgaaagactaggacagggccgcgctaggctcgtcggggccctaagggagacagtagttgccgctagggctctggatcataccctagcaaggcagcggctgggcgccgcactccatgctctgcaggatttctattcacactcaaattgggtggaattgggggagcagcagcctcacccacaccttctctggccccggcaggagctacaaaatcttgcacaggtggccgatcctacatgctccgactgtgaggaactgagctgcccacggaactggcttggtttcactctgctcacatcgggttacttcggaacccacccccccaagcctccgggcaaatgcagtcatggggggcacttcgaccggtctagttcacagccgccaagaggcgggatcaataaagactccacgtccccgggattctccccccatcatatgcttcacttgcaagctgccaagctggccctgctggcttcaatccaggccttctccttactgaggagtcgactgggcgaccgcgacttcagtcgtctcctagatatcacaccggcgagctcactctccttcgtccttgacaccaccgggtctatgggagaagaaattaatgctgcaaagatccaggcccggcacctggtagaacagcggcgaggatcaccgatggaaccggtacattacgtgctggtcccctttcatgacccaggcttcggaccagtgtttacaactagcgacccagactcattttggcagcagctaaatgagattcacgccttgggcggtggcgatgaaccagagatgtgcctgtctgctctgcagctggctcttctgcacacgccaccattaagcgatatctttgtgtttactgatgcctctccgaaggatgcctttttaacaaatcaggtggaatcactcacccaggagagaaggtgtcgtgttacttttctggttacagaagacacctctcgggtacaggggagggcgagaagggagattttatcaccgctcagatttgagccgtacaaagcagtggctctggccagcgggggagaggtgatcttcacaaaagatcagcacatcagagacgtcgcagcaatcgtgggtgaatccatggccgccttagtaaccctccccttggacccccccgtggtggtccccggccagcccctcgtgttcagcgttgacggcctcctgcagaagattacggtgaggattcacggagacattagctcattttggataaagaatccagccggggtgagccagggtcaagaagagggtggagggcccctagggcatacccggcgatttggacaattctggatggtcacaatggatgaccccccacaaactggaacttgggaaatacaggtaaccgctgaagacacacccggcgtccgcgtgcaagcccagacaagcttagacttcctgtttcattttggcattcccatggaagacggccctcatcctgggttgtaccctctgacacagccagtagcgggccttcaaacacagctccttgtggaagttacggggctcggttcccgggcaaaccccggagacccacagcctcatttttcccatgtgattctgagaggagtccctgagggagccgaactgggacaagtgcccctggaacctgtgggaccaccagaacgagggcttctcgctgcttcgctgagccccacccttctgagtacacctcgaccattcagtctggagcttatcggtcaggatgccgcaggcagacgcctgcacagggcagcaccccaaccgagtactgtggtaccggtgcttctggaactgtccggaccgtccggttttctcgctccagggagcaaagtcccactttctttacgcatcgcttccttctctggacctcaggacttggacctgcgcacatttgttaacccttccttctccctgacttctaatcttagtcgggctcacctggagctgaacgagagtgcgtggggtcggttgtggcttgaggtgccagatagcgctgcacccgattcagtggtaatggtgacagtaacggcaggtggtagagaggccaaccccgttcccccaacccacgctttcctcagattattagtctccgctccggcgccccaggtgcgcaatcattatttcccatcacaaggtccagctcaccacccttaccgcttgatctag

SEQ ID NO: 218711 - DNA, 2559 bp, Artificial Sequence
  derived and/or modified sequence
atgctgcccaccgaggtgccccagagccaccccggccccagcgccctcttattgctgcagctccttctcccacccacaagcgccttctttcctaatatctggagcctcctggccgccccaggcagcattactcaccaggacttgacagaggaggccgctcttaacgttactctccagttgttcctggaacagcccccccctggccgcccgccattaaggctagaagattttctcggtcgcaccctcctggcagatgacctctttgctgcctactttggccccggatcgtcacgccgtttccgtgcggcactgggcgaagtaagcagagcaaatgcagcacaagattttttacccactagtaggaacgacccggatctgcacttcgatgccgaaagattaggacaaggacgggcaagactagtgggggcattacgggagactgtcgtggccgcccgtgctctggaccacaccctggcccgacagcgactgggcgccgccctgcacgcgttacaggatttctattcccatagcaattgggtggagttaggagaacagcagccccacccgcatctgctgtggccaagacaggagctccaaaatctggctcaagtggccgaccccacttgttctgactgtgaagaactttcttgcccaaggaactggttaggcttcacactcctgacttccgggtattttggcactcatcctccgaagccgccaggcaaatgcagccacggcgggcactttgacaggagctctagtcaaccccctagagggggaattaacaaagacagcacaagccctgggttctcccctcaccacatgctgcatctccaggctgctaagctcgctttgctggccagcatccaggccttcagcctgctgagatctcgcctgggagacagagatttctctagactcctcgatataacacccgcgagttccctgtctttcgtattggacaccacaggttctatgggggaagagatcaacgccgcaaagatccaagcaagacatctcgtggagcagcgacgagggtcacccatggaacccgtgcattatgtgctggtaccgttccatgaccctggttttgggcccgtgtttaccactagtgatccggactccttttggcagcagttgaacgaaattcacgctttgggggggggggacgagccggagatgtgtctcagcgctctccagctggcactgttacacacacctcctctctccgacatcttcgtgttcacagacgcctcccctaaggatgccttcctgaccaatcaggttgaatcgctgacccaagagagaagatgtcgcgtgaccttcctggtcaccgaggatacctccagggtccagggtagagcccgtcgcgagatcctttcacctctccgctttgagccttataaggcagttgctcttgcaagcggtggcgaggtgatctttactaaagatcagcatatccgggatgtggctgcgatcgtcggcgagtctatggccgcgttagtcaccctaccactcgatccgcccgtcgtggtccctggtcagccccttgtgtttagtgtggatggattattacaaaagatcacagtgcggatacacggtgacatctcaagcttttggatcaagaacccagctggtgtctcacagggccaggaagaaggcgggggtccattagggcatactcgacgttttgggcagttctggatggtcactatggacgatcctccccagactggcacatgggagattcaggtgacagcagaggatacacctggggtgagagtccaggctcagacatcactcgatttcttatttcattttgggatccccatggaggacgggccacacccaggcctatatcccttgacccaaccagtcgctggactgcagacccagttactcgtcgaggttactgggctcggcagcagggctaatccaggcgatcctcagccacacttttcacacgtcatactgagaggagtgccagagggcgcagaattaggacaagtacccttggagccagtgggacctccagagcgcgggctgttagcggccagtttaagtcctacactgctctcaactccccgccccttctctttggagctaatcggacaggatgccgctggtaggcggctccatcgtgctgctcctcagccatctaccgtcgtccccgtcctccttgagttgtctgggcccagcggttttctggcaccaggctcaaaagtgccactcagtctgcggatcgcaagcttttccggaccccaggatcttgacctgcgcacctttgttaatcccagcttcagtctaacgagtaacttatcccgtgcccatctggagctgaatgagagcgcttggggaaggctgtggctcgaagtcccagatagcgccgcgccagattctgttgtcatggtaactgtgaccgccggcggcagagaagccaatcctgtgccacctacacatgcattcctgcgtttgctggtgtcagccccggctccacaggtgcgcaatcactatttccccagtcaaggacccgctcaccacccgtaccggctgatttag

SEQ ID NO: 218712 - DNA, 2559 bp, Artificial Sequence
  derived and/or modified sequence
atgctgcctaccgaggtgcctcagtcccaccctggacctagtgctctccttctgctgcagctccttctgccgcctacgtctgcttttttccccaatatttggtcactactggcagcccctggttccatcacacatcaggatctcaccgaagaggcagcgctcaatgtgaccctgcaattgttcctcgagcagccccctcccggtaggccccctctaaggttggaggacttcctcggaaggaccttacttgcagacgacttgttcgcagcctatttcgggccaggatcatccagaagattccgagcagctctcggtgaggtgtcccgcgctaacgcagcccaggacttcttgcctaccagtcggaacgatcccgatctgcattttgacgccgagcggctcggacagggacgagcccgactcgtcggagccctgagagagactgttgttgcagcgagagcgcttgatcatactttagcccgacagagactaggagccgctctgcatgcgttgcaggacttttactctcactcaaactgggtcgagctgggagagcagcaaccccacccccacctgctgtggccacgtcaggagctgcagaatctggcccaggtagcagatcccacttgcagcgactgcgaagagttgtcttgtccacgtaattggctcgggtttacccttttaaccagtgggtactttgggacccaccctcctaagccaccgggaaagtgtagccacggagggcattttgataggagctcctcacagcccccaagaggcggaattaataaggacagcacatcccctgggttctccccacatcacatgctgcatttgcaagctgcaaagctggcgctgctcgcctccattcaggcctttagccttctgcgcagcaggctgggagatcgcgatttcagccgcctgctggatattacccccgcaagtagcctctcattcgtgctcgatactactgggtcaatgggcgaagaaatcaacgcggctaagattcaagctagacacctggtagagcagagacggggatcccctatggaaccagtgcattatgtgctcgtcccatttcacgatccgggatttggcccagtgtttactacaagtgatcctgactctttctggcagcagcttaatgagattcatgcactggggggtggcgatgagcctgagatgtgtcttagcgctctgcagctcgcgctgctccacaccccaccactcagcgatatcttcgtgttcaccgatgcctccccaaaagatgcgttcctcacaaaccaggttgagagcctgacacaagaacggagatgtcgtgtgacattcctagtaaccgaggatacttcacgtgttcaggggagagcccgtagggagatcctctcccctctgagattcgaaccctataaggcagttgccttagcttcagggggagaagtgattttcacgaaggatcaacacatccgcgacgtcgcggctatcgtcggagagtccatggccgcacttgtgacattgcctctagacccaccagtcgtggtgcccggtcagccgttggttttttcagttgacggcttgctccagaaaatcactgttcgcatccatggtgacatctcctccttctggatcaagaaccctgctggagtgtcacagggacaggaggagggaggaggcccactaggccacacccgccgttttgggcaattctggatggtgaccatggacgaccctcctcaaactgggacttgggagattcaagttacagccgaagacacccccggagtaagagtccaagctcaaactagcttagacttcctgtttcacttcgggatccccatggaagacggaccccatcccggactgtacccactcacacagccagtggccggactccagacccaactgctcgttgaggtaaccggcctggggtctagggcgaatcccggagaccctcagccccacttttctcacgtgatactccggggagtccccgagggagctgaactgggacaagtccctctcgagcctgttggaccccctgagcgtgggctcttggccgctagcctgagccccacgttactgtcgaccccacgacccttcagtttggaactgataggccaggacgccgcaggcagaagactgcatcgcgcagccccacaaccgtccaccgtggtgccagtgttgcttgaactgtccggacccagcggtttcctcgccccaggcagcaaagtcccactcagtctccgcattgccagcttctctgggcctcaagacctggacctgcgcacatttgtgaatccaagcttttctttgacaagcaatctgtccagggcccatcttgagttaaacgaaagcgcttggggtcggctgtggctggaggtgccagacagcgctgccccagatagcgttgtcatggtcacagttaccgcaggagggcgtgaggctaacccagtaccaccaactcacgcctttttaaggttactagtgtcggctcctgcacctcaagtgcgtaatcactatttcccatcccaaggaccagcccaccacccctatcggcttatttag

SEQ ID NO: 218713 - DNA, 2676 bp, Artificial Sequence
  derived and/or modified sequence
atgctcccaaccgaggtgccgcagtcccatcctggacccagcgctctcttattactgcaactcctactcccacccacatccgctttcttcccgaatatttggagcctattggccgcaccgggatccatcacccaccaggacctgaccgaagaagcggcactgaacgttaccctgcagctgttcttagagcaacctccacccggtagaccccctttgaggcttgaagattttctcggccgaactctccttgccgacgatctgttcgctgcctatttcgggccaggatcaagtcgtaggtttcgagcagccctgggtgaagtcagtcgggctaacgccgctcaggactttctccccacctctcgaaatgaccctgatttgcattttgatgccgaaagactaggtcaggggagggcaaggctcgtgggtgccttaagagagaccgtggttgcagcccgtgccctggatcatacactagccaggcagaggctcggagctgccttgcacgcgttacaagacttttattcacactctaactgggtagagctaggagaacaacagcctcaccctcacctgctctggcccaggcaggagctgcagaatctggcgcaggtggccgaccccacatgctcagactgcgaagagttatcctgccctcgcaattggttgggatttaccctgctgacttccggctacttcggcacacatcctccaaaacctcccggaaagtgttcacacggaggacacttcgatagaagttccagccaacccccacggggaggaattaataaggattcaacttctccgggtttctctccacatcacatgctccacttgcaggctgccaagctggctctcctcgcctctatccaagcgttctccctccttcgctctcgcctcggggatcgcgatttcagtaggctattggacatcaccccggcttctagcctaagcttcgtcctggatacaacaggttccatgggcgaggaaattaacgccgcaaaaatacaagccaggcatcttgttgaacagcgacgtggatctccaatggaacccgttcattacgtgttggtgccgtttcacgaccccggattcgggcctgtgttcaccacctccgacccagattctttctggcagcagttgaacgaaatccatgcattgggcggaggtgacgaaccggagatgtgcctgtcggctctgcagctagcgcttctgcatacgccaccactgagcgatatttttgtatttactgatgcgtcaccgaaggatgcttttttaaccaaccaggtggaaagtctgactcaagagaggcgatgtcgggtgacctttctggtcaccgaggatacctctagggtgcagggcagagctagaagagaaatcctgtcaccactgcgcttcgaaccttacaaagccgtcgccctagcttctggaggcgaggtgatttttactaaagatcaacatatcagagacgtagccgctattgttggagagagcatggctgcactcgtcaccttacctcttgacccgccagtggtcgtccctgggcaacctctggtcttttcggtggatggcctgctgcagaagatcaccgtgaggatccatggcgatatttctagtttttggatcaagaaccccgctggagtgagccaaggccaagaggaagggggtgggcctctggggcatactagaagatttgggcagttttggatggtgacaatggacgatccgcctcagacaggcacctgggaaatacaggtcaccgcagaggacactcctggcgtgagggtccaggcccagactagcttagacttcctctttcatttcggcatccctatggaggacggtccccacccaggcctgtatcccttgacccagcccgtagccggactgcagacgcaactcctggtggaagtgacaggacttggctcccgcgcaaatccaggtgacccacagccccactttagtcacgtaatccttagaggcgtgcccgaaggggcagaactggggcaggtccctcttgaacctgtgggacctcctgagcgcggtttactggctgcatccctgagcccaactctgctgagcacaccgcgaccgttttccttggaactgattggacaggatgctgccggacgacgcctacacagggccgctccccagccttccaccgttgtgcccgtgctcctagaactgagcggaccttctggcttcttggctcctggctcaaaagtgccgctgtctctgcgcatcgcctctttctctggaccacaggatttggatctgaggacctttgttaaccctagtttttcactgacgtccaacctgagcagagctcatctggaacttaacgagtccgcatggggcaggctgtggctggaagttccagatagcgctgcacctgactctgtggtaatggttaccgtgacagctggtgggcgtgaggcgaacccagtaccccctacgcacgcattcctgagattgctggtctctgccccagcaccgcaggaccgtcacaccaccccaactggtagcagcgaccccatccttaccactgccactccagccttttcaccctttaccctggtgacacagggaagagctggtgcaggtctggctgcaggcagtccgtggtggggcacagtgggtggagtactcctgttgttgggcctggcaagttggtag

SEQ ID NO: 218714 - DNA, 2676 bp, Artificial Sequence
  derived and/or modified sequence
atgctgcccacagaggtgccccagtcacacccaggcccatcggctcttcttcttttacaactgctcctgcctcctacaagcgcattcttccctaatatatggagtttgctggccgctccaggctcaattacacaccaggacctcaccgaagaagctgcccttaatgtgaccttacagctgtttctggaacagccgcctccaggcagaccccctctgaggctagaggatttccttggccgaactttgctagccgatgatctgtttgcggcttactttgggcctgggtcttctcgccgatttcgtgccgctcttggtgaggttagtcgagccaatgccgcacaggatttcctccccacctccagaaatgatcctgaccttcatttcgacgccgagagattgggccaagggagggctcgcctggtaggcgcactgagggaaacagtagttgcggcacgggcacttgaccacacccttgctcgacagaggttgggggctgcccttcatgctctgcaagacttttattcacactctaattgggtagagctcggagagcagcagccccacccacacctgctttggccgagacaagagctacagaacctggcccaagtggcagacccaacttgttcggattgtgaggagttgagttgcccacgtaattggttaggcttcacgctgctgaccagtggttatttcggtacacaccctcccaagccgccaggcaaatgctcacatggaggccattttgatagaagctcttcccaacctcccagagggggaattaataaagattcaacatctcccggattcagcccacatcatatgctgcacctgcaagctgcaaaactggccctgctggcgagtatccaagcattcagccttttacgcagccgtctgggagacagggatttctcacgcctgctggacattactccagctagctccttgtccttcgtcttggatacaaccgggtcaatgggggaagagatcaatgctgccaaaatacaggcgaggcatctggtcgagcaaaggcggggatcgccaatggagcccgttcactacgtcttggttccattccacgaccccggttttggccctgtattcaccacgtctgaccctgattctttctggcaacagctgaacgagatccatgcactgggaggaggcgatgaacctgagatgtgtctgtcagcgcttcagctcgccctgctgcatacaccacccctgagcgacattttcgtgtttacagacgcatcccccaaagacgcctttctgacgaaccaagtcgagtcactgacccaggagcgcaggtgtcgagtcacattcctcgttacagaggacacgagccgcgttcaaggccgtgctcggcgtgaaattttgtcccccctgaggtttgagccctacaaagccgtggctcttgcctccggaggtgaggttatcttcacaaaagaccagcacatcagggatgtggctgctatcgtcggagagagcatggcagccctggttactctgcccctcgaccctcccgttgtggtgccaggccagccgctggtgttttccgtggatggtctccttcaaaaaattacagtacgtatccacggagatatcagctcattttggattaagaatcctgctggggtaagtcagggccaggaagagggtggtggccctctcgggcacacccgaagatttggccagttctggatggtgaccatggacgaccccccacaaacgggaacctgggaaatacaagtcaccgcagaggatacacccggtgtacgagtccaagcccagacgtctttggatttcttattccacttcggaattcctatggaggacggcccacaccctggcctgtatcctttaacgcagccggttgccggtctacagactcagctgttggtggaggttacaggccttggaagccgcgctaaccccggtgatccccagccacacttctcccatgtgatcctgcggggagttcctgagggagcggagcttggacaagtgcctttagaacctgttggccctcctgaacgaggcctcctcgcagcctcactctctccaacactgctaagcacacccagacctttcagtctggaactgattggacaggatgctgccggtaggcggcttcatagggccgctcctcagccttcaacagtcgtgccggtgctgctcgagctatccggtccctctggctttctcgctcccggatctaaagtgcccctgagcctccgtatagcatccttctcaggaccccaggatctcgatctccggacgttcgttaaccccagcttctcactgaccagcaatttgtctcgagcccacctggagctgaatgagtcggcctggggtaggctgtggctggaggtgcccgactccgctgctcccgactcagtggtaatggtgactgtgacggcagggggacgggaagctaatccggttcctcctacccatgcattcttgaggctgctagtgagtgccccagcccctcaggaccgccacactacgcctacaggttcctctgatcccattcttacaaccgctactcctgcattcagtcccttcactctggtaactcagggacgcgcaggtgctggtctggcagcaggatccccctggtgggggaccgtcggcggtgtcctgctgctactgggcttagccagctggtag

SEQ ID NO: 218715 - DNA, 2676 bp, Artificial Sequence
  derived and/or modified sequence
atgttgcccacggaagtgccacagtcccacccagggccaagcgcactcctccttctgcagttgcttttgcccccaacatcagcattcttccctaacatctggagtcttctggcagcccctggcagtataacgcatcaggatctcacagaggaagccgctctgaatgtaacactgcagctcttccttgagcagccacccccaggcaggccacctcttaggttggaggatttcctgggaagaactctcctcgccgatgatctattcgctgcctattttgggcctgggtccagccggagatttagggcggctcttggggaggtctcccgagcgaatgctgcccaggattttttacctacctcgagaaatgaccccgatctgcattttgatgccgaacgactcggacaaggccgagcccgattggtgggtgctctgagggagaccgttgtggccgctcgcgctctagatcatacactcgccagacagagactcggggctgctctccacgctctgcaagatttttacagccacagtaactgggtggaactgggtgaacagcagccccatcctcatctgctgtggcctcgacaggagctccagaacctggcccaagttgcagatcctacgtgctctgactgtgaagaactctcctgcccacgtaactggctgggctttaccctcctcactagcggctattttggtacacaccccccaaaacctcccggaaagtgctctcatggagggcactttgacaggtctagctcacagccacctagaggcggtattaataaagactcaacctcacccggtttctcaccacaccatatgctgcatctgcaagctgccaaactggcacttctcgcatccatacaggccttctctcttctccgctctcggcttggcgatcgcgactttagtagactgctggacatcacgcccgcatctagtctgagttttgtgctggataccacaggaagcatgggtgaggagatcaatgctgctaagattcaggcgagacatttggtggagcaacgacgaggcagccctatggaaccagtccattacgtcctcgtaccgttccacgatcctgggtttgggcctgtcttcaccacaagcgaccctgacagcttctggcaacagctgaatgagatacacgccctaggtgggggagatgagcctgaaatgtgcctgtccgcactgcagttggctctgctgcacacccctcccttgtccgacatcttcgtctttactgatgccagccctaaagatgcctttctgacaaatcaagtggaatccctcactcaggaaagacgatgtcgcgttacgttcctggtcactgaagatactagccgggtccaaggtcgtgctagaagagagatccttagccccctccgctttgaaccatataaagcagtagcgttggcaagtggcggagaagtcatctttacgaaggatcagcacataagggatgttgcggctatagttggcgagagcatggcagcgcttgtcactctgccccttgatccacccgtggtggtccctggccagccactcgtgttcagcgtggacgggctactgcaaaagatcaccgttcggatccacggcgatatctcctctttctggatcaagaatccagctggagtaagccaagggcaggaagaaggaggtggtcctctggggcatacgaggcgatttggccagttctggatggtgacgatggatgaccctccccagaccgggacatgggagattcaggtgaccgctgaggacaccccaggtgtgagggtccaggctcagacgagcctcgattttctttttcacttcggtattccaatggaggacggccctcaccccggtctgtaccctttaacgcagccggtagctggtctccagacgcagctgctggtggaggtgactggcttgggttcacgagctaatccgggtgaccctcagccacatttcagtcatgttatcctgagaggggtgccagaaggcgctgagctgggtcaggtaccattggaacctgtggggcctcccgagagagggctgctggctgcttccctgtcaccaacccttctatccacaccaaggcctttcagcctggagctgattggacaggatgcagcaggacggcgattacatagggcggcaccacagccaagcacggtcgtgcccgtactacttgaactatcgggtccctctgggttcctcgctccgggaagcaaggtgcctttgtcacttcgaatcgcctctttttctgggcctcaggaccttgacctccgtacatttgtgaatcctagtttttctctgacatctaaccttagtagagctcatttggagctcaatgagagcgcgtggggcagactttggcttgaggtgcctgactccgcagcccctgacagcgtggttatggtcactgttactgccggagggcgtgaagccaacccagttcccccaacacacgctttcttgagactgcttgtgtccgctcctgcacctcaggaccgacacaccacacctactggctcaagcgatcccatactgaccacagccacccctgctttttcaccctttaccttggtcacacagggaagggcaggcgcaggcctagctgcgggaagtccatggtgggggacagtcgggggagtgttactgctgttagggctagcttcttggtag

SEQ ID NO: 218716 - DNA, 2676 bp, Artificial Sequence
  derived and/or modified sequence
atgctgcccaccgaagttcctcagtcccaccccggtccaagcgctctgctgctgcttcagctcctgctgccccctacttccgctttcttcccgaatatctggtccctgctggctgctcccggttccatcacccaccaggatctcactgaagaagccgcactcaatgtcactctgcagctgttccttgagcagcccccacctggtcggcctccactgaggttggaggattttctaggccgaaccctgctcgctgacgacctgtttgccgcttacttcgggcctggctcgtctcgcaggtttagagccgcactgggagaggtgtcacgggctaatgcagcccaggactttcttcctacatccagaaatgatcctgatctgcactttgacgccgaaaggcttggtcaaggccgagcaagactcgtcggcgcactgagagagacagtggtggcagcaagagctctagatcacactctagccagacagcgtctcggagcagctctgcacgctcttcaggacttttattcacattccaattgggtggagctgggcgaacagcagccgcatccacaccttctctggccccgacaggaacttcaaaaccttgctcaggtggcggatcctacatgttcggattgcgaggagctaagttgcccgaggaattggctaggatttactctcctcaccagtgggtacttcggcacccaccccccaaagccacccggaaaatgcagccatgggggtcacttcgatagatcttcatcacagccccctaggggaggcatcaacaaggactccactagtccagggttctcccctcatcatatgctacacttgcaggcggcaaagctggctctcctcgccagcattcaggcgttctccctactccggagtcgtttaggtgatagggacttttctcggctactagatattaccccagccagctcactgtctttcgttctggatacaaccggatctatgggtgaagaaattaacgccgcaaaaattcaggcgagacacctggttgaacagcggagggggagcccaatggaaccagttcactatgtccttgtgcctttccatgaccctgggttcgggccagtgtttacaacaagcgacccagattccttttggcagcagctgaacgagatccatgccctaggtggcggagatgagcctgagatgtgtctgtccgcactgcaattggccttactgcacaccccgcctctgagcgatattttcgtgttcacggacgcatcacctaaggatgcctttctgacaaaccaagttgaatctctgactcaggagcgccgatgcagagtgacttttttggtcaccgaggatacctcgcgggtgcaagggcgtgcacgtcgcgagattctgtctcctctgcgcttcgaaccctataaagccgttgccctggcatccgggggtgaggtcatattcacaaaggatcagcatatccgagacgtggcagcgatcgtgggggaaagcatggcggcactggttactctgcctctggaccctcctgtcgttgtaccaggacaacccctggttttctcagttgacgggctgctccagaagatcacagtccgcatccacggcgatatctcatccttttggatcaaaaatccggcaggggtcagccaaggacaggaggaggggggaggacccctgggccacacaagaaggttcggccagttttggatggtgaccatggacgaccctccgcagacaggcacatgggagattcaggtgacagccgaggacaccccaggcgttcgggttcaggcccagacctcactggacttcttatttcattttggcatacccatggaggacggtcctcaccccggtctttaccccctaacccagcccgttgccggattgcagacacaactactagtggaagttaccggcttgggtagcagggctaaccctggcgatccacaacctcatttttcccacgtcatcctccggggagtgcctgagggggctgagctcgggcaagtacctctggaacccgtgggccctcccgaacgtggactccttgcagcctcactgtcgcccaccctgctatccacccctcgaccattctcactggaactcatcgggcaggacgccgcagggaggcgcctgcacagggcagcacctcagccatccacggtcgtccccgtcctgttggaactgagcggtccctccggcttcctggcccctgggtctaaggttcccctgtcgctgcgcattgcctcgttcagtggccctcaagatctggacctgaggacttttgtaaacccttctttctcactgacaagtaatctctccagagcccacctcgagctgaacgagtctgcctggggaagactctggctcgaggtccccgactctgccgcacccgacagcgtggttatggtgactgttactgccggtggtcgggaagccaaccccgttcctcccacacacgcattccttcggctactcgtgtccgcccctgcccctcaggacaggcacaccacccccactgggagttctgacccgatccttactacagccacacctgccttctccccatttactttggtgacgcaggggagagccggtgcaggtctcgcagcaggcagcccctggtggggcaccgtcggtggggtgctgctgctactgggtttggcgtcctggtag

SEQ ID NO: 218717 - DNA, 2676 bp, Artificial Sequence
  derived and/or modified sequence
atgctccctaccgaagtcccgcaatctcatcccggaccctctgcgcttcttctacttcaactgctgctgcccccaacgtccgccttctttcctaatatttggtctctcctggctgctcccggttcaatcacccatcaggacctgaccgaggaggccgcactgaacgtgaccctacagcttttcctggagcagcctccgccaggaagaccccctctgaggctggaagactttctcgggagaactctgctggcagatgatcttttcgccgcttacttcggcccagggagctctcgtagatttcgggctgcactcggtgaggtttctagggctaatgctgcccaagatttcctccctacctctagaaacgatcccgaccttcactttgatgccgaacgactggggcaaggccgtgctagactagtgggagcattgcgggagacggtcgtggcggctagagccttagaccacactctcgcacgccagcgactgggggcagcgcttcacgctctgcaggatttctattcccactccaattgggtggagttgggcgagcagcagccacacccccatctcctctggcccaggcaggaattacaaaacttggctcaggtcgccgaccccacctgttccgactgcgaagagttatcctgcccacggaattggcttgggttcacactgctgacatccggttattttggcactcacccccctaagcctccgggaaaatgctcccatggaggtcacttcgataggtccagcagtcagccacctagaggagggattaacaaggactctaccagcccagggtttagcccacaccacatgctacatctccaggccgcaaaattggcactgctggcctccattcaggccttttctctgctcagaagtaggctgggagatcgcgatttttcgaggttgctggatattacacctgcttcctctttatcatttgtgctcgacaccactggtagtatgggagaagagatcaacgcagcaaaaattcaagctcgccatctggtcgagcagagacgagggagtcccatggagccagtgcattacgttcttgtgccctttcacgatccaggattcggacccgtgtttactacaagcgaccctgattcgttctggcagcagctgaatgagattcacgcactgggaggaggagacgagcccgaaatgtgtctttccgcccttcaactcgcacttctgcatactccccctctcagtgacatcttcgtcttcacagacgcctcgcctaaggacgccttcctgaccaaccaagtggagagcttaactcaggaacggcgatgcagagttacctttctggtcaccgaagatacttcacgggtccagggaagagcccgtcgggagatcctgtcacccctacgttttgaaccctacaaagctgtggccttagcctctggaggcgaggtcatttttactaaggaccagcatatcagggacgtggctgccatcgttggcgaaagtatggcagcacttgtaactctgccactagatcctccggtggtggtgcctggccagcctctggtattctccgtagatgggctcctgcagaagatcactgtgagaatccatggtgatattagctcattctggataaaaaatcctgccggagtgagccaaggccaagaggagggtggtggaccccttgggcatacccgtcgatttgggcagttttggatggtcactatggatgatcctccacaaacaggcacatgggagatccaggtcactgctgaggacacacccggagtgcgtgtgcaagctcagacttccctcgactttctctttcatttcggtatcccgatggaagatggacctcaccccggactgtatcccctgacccaaccagtcgctggactacagacacaactgttggtcgaggtgaccggcttggggtcgcgggctaatcctggcgatccgcagcctcacttttcacacgtaattctccgcggagtgccagagggcgctgaactcggtcaggtgcccctggagcccgttggcccaccggagcgagggttgcttgccgctagcctgtcacctactctcctctcaacaccccgacctttcagcctggaactgataggccaggatgctgcgggacggaggctccatcgcgcagctcctcagccatctacagtagtgcccgtcctcctagagctctctggtcctagtggctttctggcgccagggtcaaaggtgcctttgagcctgcgtattgcctccttttcaggaccacaggaccttgatctgcgcacttttgtgaatcccagtttttcactcacgagtaacctgtctcgcgctcacctagagttgaacgagagtgcttggggaaggctctggctggaggtgccagacagtgctgcacctgacagcgtggtaatggtcaccgtcacagcgggaggtagggaggctaacccagtgcctccaacccatgctttcctgcgtctgctggtttccgccccagcccctcaggatagacacactacaccgaccggttcctcagaccccatcctgaccacagccacccctgcgttttccccttttacactggtgacccaggggagagccggagccggactagcggctgggtctccatggtggggaacagtgggaggcgtgcttcttctgctgggcttggcctcctggtag

SEQ ID NO: 218718 - DNA, 2559 bp, Artificial Sequence
  derived and/or modified sequence
atgttgcccacggaggttccacagagccacccaggcccaagcgcccttctgttgttgcagttgctgctccccccaacaagcgccttcttccccaatatctggtctctgttggccgcaccaggttcaataacccatcaggatctgaccgaagaggcagccttaaacgtgaccctgcagctctttctggaacagccaccaccaggacgccctcccctcagactcgaagacttcttagggcgtacactgcttgcggacgatctcttcgcagcttatttcggtccaggatcttctaggagattccgtgcagcacttggagaagtgagcagagccaacgcagcacaggactttctgcccaccagtaggaacgatcccgaccttcacttcgacgcagaacgcctgggacagggcagggccaggttagtgggcgctctgagagagaccgtggtggctgctcgagctctcgaccacaccttagcaaggcaacgcctgggagcagccctccatgctctccaagatttttattcacactccaactgggttgagctgggcgagcagcaaccccatccccatctgttatggcccagacaggagcttcaaaaccttgcccaggttgcagaccctacttgtagcgattgtgaagagttgtcgtgcccgcgaaactggctggggttcacactcctcacctctggatactttgggacacatcctccaaaaccccctgggaaatgcagtcatgggggacacttcgatcgctccagttcacagccccctagagggggtatcaacaaagattcaacatctcccggttttagcccccaccacatgctccacctccaagcagcgaagctcgcactcctggcatctatccaagccttttctctgctcaggagccgtctcggggacagggacttctcacgactgctagacatcacacccgcttcttccttaagctttgttctggacaccaccgggagcatgggcgaggagatcaacgcagccaaaattcaggcccgtcatcttgtcgagcaacgtaggggaagtcccatggagcccgtccattatgtgttggtcccattccatgacccgggattcgggcctgtgttcaccacatctgatcctgactccttttggcagcagcttaatgagatccatgctcttggcggtggagacgaaccagagatgtgtctcagcgcactacagttagctctgctgcacaccccacccctgagcgatatattcgtgttcacagacgcttcgccaaaggatgcgtttctgaccaaccaggtggagagcctgacccaggagcgtcggtgtcgggttactttcctggtgacggaagatacctcccgggtgcagggcagagcaagaagagagatcctttcacccctccgcttcgagccatataaggccgtggctctggctagcggcggtgaggtaatttttaccaaagaccagcacataagggatgtcgccgctatagtaggagagtcaatggccgcactggtaacactgcctctcgacccacccgtggttgtccccggacagccactggtattcagtgtggatggattgttacaaaagataacagtgcgcattcatggtgatatatccagcttctggatcaaaaatccggcaggagtctcacagggccaagaggaaggtggcggaccactggggcatacacggagattcggccaattctggatggttactatggatgatccaccccaaaccgggacatgggaaatacaggtgacagccgaagataccccaggtgtcagagtgcaagcccagactagtctggatttcttgtttcacttcgggatacccatggaagacggaccgcatcccggtctgtaccctcttactcagccagttgccggactgcagacccagctcttagttgaggtcacggggttgggctcgagggccaacccaggagacccacagccccatttctctcatgtgatcctgagaggggtccccgagggagctgagctcggccaggttcctctggagcctgtggggcctcctgaacgtggcctcttagcggcatctcttagccctactctgcttagtacgccacgcccattttctttggagctgattggccaagacgccgctggacgtcggctccacagggccgcacctcagccctccacagtagtccctgtactcctggagctttctggtccttccggcttcctcgccccaggatccaaagttcccctttccctgaggattgcaagcttttctgggccacaggacctcgatctgaggaccttcgtcaatccaagcttcagtctgaccagcaacctgagccgcgctcaccttgaactcaacgagtctgcttggggtaggctgtggttggaggttcctgattccgccgctcccgatagcgtagtcatggtcacagtgacagccggaggtcgggaggctaacccagtccctccaacacacgcctttctccgcttgctcgtgtctgcccctgcacctcaggtgcgaaaccattattttccaagtcaggggccagcacatcatccgtacagactcatctag

SEQ ID NO: 218719 - DNA, 2559 bp, Artificial Sequence
  derived and/or modified sequence
atgctacccacggaagtgccgcaaagccatcctggacccagtgccttactcctgctgcagttattactcccacctacatcagccttttttcccaatatctggtccctgcttgccgctccaggttcaattacgcaccaggatctgaccgaagaagctgccttaaatgtgaccttgcagctctttcttgaacagccaccaccaggcaggcctccgctgcgactcgaagacttcttagggagaacccttttggccgatgacctgttcgccgcttacttcggaccaggcagctctagaaggttccgagctgccctcggggaggtcagcagagccaacgccgctcaggattttttgcctacttctagaaacgatcctgatctccacttcgacgcagagcggctgggccagggccgagccagactggtgggagcccttcgtgagacagtggtcgccgcaagagccctggaccacacactagcacgccagaggctgggtgcagctctgcacgcactccaggatttctattctcactcaaattgggtcgaactgggcgaacagcagccccatcctcacctcttatggccaagacaagaactccaaaatcttgcacaggtagctgaccctacttgctcagactgtgaagagctgtcatgtccaaggaactggctggggttcactctattgacaagcggttacttcgggacccaccccccaaaaccacccggaaaatgtagccacggcggtcatttcgataggagctccagccagccaccccgtggcggaatcaacaaggatagtacctcccccggattcagccctcatcacatgctccatttacaggcagctaagcttgctttgctcgcctctatccaggcattttccctattacgcagcagactcggggatcgggacttcagtcggcttctggatataactccagcttccagcttgtctttcgtgctggatacaacaggaagcatgggagaagaaattaacgctgccaaaatccaggccaggcaccttgtggagcagcgccgaggttcccccatggagcccgtgcattacgtgctcgtgcctttccatgatcccggatttggccctgtattcactacttctgaccccgattctttctggcagcagttaaacgagatccatgctttaggcggtggggacgaacccgagatgtgtttgagcgcacttcagctggcactgctccacaccccccctctgtctgacatctttgtgtttacagatgcctctcccaaggacgccttccttaccaaccaggtggagtccctgacgcaagaacgaaggtgccgggtgacattcctggttaccgaggacacctctcgggttcaagggagagccaggcgggagattcttagtccattacgtttcgagccgtacaaagctgtggccctggcctccgggggtgaagtgatcttcactaaagatcaacacatcagagacgttgccgcaatcgttggagaatctatggcagctcttgttactctgcccttggatcctcctgtcgtggtgccaggacaaccattggtgttcagcgtagacggtcttctgcaaaagattacagtgcgcatccacggcgatatatcttccttctggataaagaacccagccggagtctcacagggtcaggaagagggcggaggtcccctgggccatacccgtaggttcggacagttctggatggttacaatggacgacccaccccaaacaggcacctgggaaattcaggtgacagcagaagatacgccaggtgttcgggttcaagcccagactagtttggacttcctttttcactttggaataccaatggaagacggcccacatcccggattatatcctctgacgcagcctgtggccggactgcagacccaactcctggtggaggttactgggctgggtagccgagcgaatccaggggacccccaaccacattttagccatgtgatactcaggggtgtgccggagggtgccgagctcggccaagtgccgttggagcccgtcggccctcccgaacgtggactgcttgcggcaagcctctcacctacccttttatctacaccccgacccttttctctggagctgatcggacaagacgccgcagggagacgcttacacagggccgctcctcagccctctacagttgtgcctgtgctgctcgagctgtcagggccaagcggctttttggcccctggttctaaggtgccactcagcctacgaatcgcatccttcagtggtccacaggatctcgaccttcgcactttcgtgaacccctctttcagcctgacaagcaacctgagtagagcccatctcgagctgaacgaaagtgcatggggcaggctgtggctggaagtgccagacagcgccgctccggactcagtagtgatggtcacagtgacagccggaggacgcgaagctaaccccgtacctcctacacacgcctttctgcgcctgctagtttctgccccagctcctcaggtgcggaaccactacttcccatcccagggacctgctcaccatccctacagacttatttag

SEQ ID NO: 218720 - DNA, 2559 bp, Artificial Sequence
  derived and/or modified sequence
atgctgcccaccgaggtacctcagagccatccagggccttctgccttgctgctgctgcaactcctgctgccacccacctccgctttctttccgaacatctggagtctcctagccgctccaggcagcatcacccatcaggaccttacggaagaagcagcgttgaacgtgactctccaactctttttagagcagcctcccccaggcaggcctccactgcggcttgaagacttccttgggaggactctcttagccgacgacttgtttgcagcatactttgggccaggaagctcccggagattccgtgccgctctcggagaagtctctagagcaaacgcagctcaagactttctgcctacctcaagaaacgaccccgatttgcacttcgatgccgagaggctggggcaggggagggcgcgtctggtgggcgctctgagagagaccgtggtcgcggctcgggcacttgatcataccttagccagacagaggttgggtgccgctctgcacgcactgcaggacttctatagtcacagtaactgggttgaactgggtgagcagcagccccatccacatcttctgtggcctcggcaagagctccagaatctcgcccaggtggccgatcccacatgctctgattgcgaagagctttcctgcccacgtaactggctgggtttcacattactcacctctggctactttgggactcatcccccaaagcctccaggaaagtgctcacatggagggcactttgaccgcagcagtagccaacctccacgtggcggtataaataaggactccaccagtcccggattctccccccatcatatgttgcatctgcaggctgccaaattggcactcctcgcctccatacaggcgttttctctcttacggagtaggctcggagacagggacttcagccgcctcttagacatcacgccagccagtagcctatccttcgtcctggatacaacggggtccatgggagaagagatcaatgctgcaaagattcaggcccgtcacctggtggagcagagaagggggagccccatggaaccggtacactatgtactggtcccatttcatgacccgggtttcggccctgtgtttaccacatccgacccggattcgttctggcagcagctgaacgaaattcatgctttggggggaggtgacgagcctgagatgtgcctgagtgcattgcagttagccttgctgcacaccccaccattatctgatatattcgtatttaccgatgcgtcgccgaaggacgcttttctgacaaaccaggtggaatctctcacccaggagcgcaggtgtcgcgtgacatttctcgttaccgaagatacatcacgcgtccaaggtagggccagacgcgagattctgtcaccccttagattcgagccttataaggccgtggcgctggcgtcaggaggcgaagtaattttcacaaaggatcagcacattagggatgtggctgctatcgtcggggaaagcatggcggcactggtaaccttgcctctcgaccctccagtggtggtgccaggacagcctctggtattctcagtagatggtcttctccagaaaataacggttcggatccacggagatatatcaagcttttggataaagaacccagctggtgtgtcccagggacaggaagagggaggtgggccacttgggcacaccagacgctttggccagttctggatggtgaccatggacgatcccccacagactggcacttgggagatccaggtgaccgctgaagacacacccggagttagagttcaggcccagacgtcattagacttcctctttcactttggcattcccatggaagatgggcctcatccgggtctatatcctttgactcagcctgtcgcgggactgcagacacagctcttagtcgaggttaccggactgggctcacgagcaaaccccggagacccacagccccatttcagccatgtcattttacgtggggttcctgagggcgcagagctgggacaggttcctctcgagccagtgggaccccctgagcgtggcctccttgctgcctccctgtccccaaccctcctctccacaccacggcctttcagcctggagctgattggacaggatgctgccggacgcagactgcatagagctgccccacaaccatcaacggtggtacctgtgctgctcgagctgtctggcccttcgggctttctggcgcctggctctaaggtgccactgtccctccgtatagctagtttctcgggcccacaggatttggacctgcgtaccttcgtgaatccttccttttcactcacttcaaatctgtctcgcgctcatttggaacttaatgaatctgcttggggaaggctctggctcgaggtgccagactctgccgcaccagactctgtcgttatggtgacggtgaccgccggagggcgagaggccaaccctgtcccaccaacccatgccttcctgagattgctagtctccgctcctgctccacaggttcgcaaccactattttccgtcccaaggacccgcacatcacccatataggttaatatag

SEQ ID NO: 218721 - DNA, 2559 bp, Artificial Sequence
  derived and/or modified sequence
atgctgccaacggaggttcctcagtctcacccaggaccatcagctttgctgttgttgcaattgctactccccccaaccagtgccttcttcccaaatatttggagtctgctggctgccccaggaagcattacgcaccaggatctgacagaggaagcagccctcaacgtcacccttcagctatttctcgagcaacctcccccaggccgtcctccactgaggctagaagactttcttggaagaacattactggccgacgacctgttcgccgcttactttggccctggttcgtccaggagattcagagctgctttgggagaagtctctcgtgccaacgcagcacaagacttcttacccaccagtcgcaacgatcctgatctgcactttgacgccgaaaggttgggccaggggagagccaggttggttggagcgctgcgggaaacggtcgttgctgctcgagctctcgatcacacactggcacggcagagactaggagctgctctgcacgctcttcaggatttttactcccatagcaactgggtggagctcggggaacaacagcctcacccgcacttgctgtggcctcgacaggaattacagaacctggcccaggtggctgacccaacgtgctcagactgtgaggaattgtcttgtcctcgaaactggctcgggttcactctccttacatcaggatacttcggaacccatccaccgaagcctcctggaaaatgctcacacgggggtcactttgatcgaagttcttcacagcccccacgagggggaattaataaagacagcacgtccccgggatttagcccccatcacatgcttcacttacaggcagccaagcttgccctccttgcttcaattcaggctttttctcttttgcgtagtcgccttggggatcgcgatttcagtcgacttctggacatcacacctgcctcctctttgagctttgtgctggataccacgggctcgatgggggaagagattaatgctgccaaaatacaggcccgacatctcgtggagcagcgacgtggcagcccaatggaacccgtacactatgtccttgtgcctttccatgatcctggcttcgggcctgtcttcactacctccgaccctgacagcttctggcaacagctcaacgaaatccacgccttggggggaggggatgaacctgaaatgtgcctgtccgccttgcagctagcacttttgcacacacccccactgtcagacatttttgtgtttacagacgcctctcccaaggacgccttcctcacaaatcaggtggagagcctcacccaggaaagaaggtgcagagtaacgttcctggtcaccgaagacacttctagagtgcagggacgggctcgtagggagattctgtcacccctgcgatttgaaccatataaagcggtcgcgcttgcctctggaggagaagtcatctttaccaaagatcagcatatccgggatgtggctgccattgttggtgaatctatggctgccctggttaccctgcccctggatccaccagttgtagtgccagggcagcccttggtcttctctgtggacggtttattacagaagatcacagtcagaatccatggtgacatctccagcttttggatcaaaaaccctgctggtgtatcacaggggcaggaagaaggcggaggcccattagggcacactagacggttcgggcagttctggatggtgactatggacgaccctcctcagactgggacatgggagatccaggtgactgccgaggacacgccaggcgtgcgggttcaggcacagactagtttggacttcctgtttcattttggcatacccatggaagacgggccacatcccggtctgtaccccctgactcagccagtggccggtctgcaaacacagctgctggtggaagtgactgggttaggttctagggctaatccgggagacccacagccacacttctcacatgtaattctacggggtgttcccgagggagctgagctcggccaggttcctttagagccagtgggccctcccgaacggggactgctggccgcttccctttcccctaccctcctgtctacgcctcgtcccttctctcttgaattgattggccaggacgcagccggtagacgactgcatagggcggctccacagccctctacagttgtgccagtcctgctggaactcagtgggcctagcgggtttcttgctccgggttctaaggtacccctgtcactgagaattgcctcgttttccgggccacaggatttggacttaagaactttcgtaaatccctccttctctctgacttccaatctatcccgagcccacctagaactcaatgagagcgcctggggccgattgtggctggaggtgcccgattctgcggcacctgactcagtggtgatggtgaccgttacggctggcggaagggaggctaatccggtcccaccaacacacgccttcctccgcctgctcgtatccgctcctgctccccaggtgcggaaccattatttcccctcacagggtcccgctcaccatccttacaggctcatttag

SEQ ID NO: 218722 - DNA, 2559 bp, Artificial Sequence
  derived and/or modified sequence
atgctgcctactgaggtaccacaaagtcacccagggccaagcgcccttcttttgctgcaacttctgctccctccgacaagcgcgttcttccctaacatctggagcctcctggccgcccctggatcgattacacaccaagatctcacagaggaagccgcactgaatgtaacgcttcagctgttcctggagcagccaccaccaggcagaccacccttgcgcttagaagacttcttagggcgcacactgctggcagacgacctctttgcggcctactttgggcctggcagcagcagaagattcagagctgctttaggtgaggtatcccgcgccaatgccgcacaggattttctcccaacaagccgtaacgacccagatctgcattttgacgccgagagattggggcaaggcagagctaggctagtgggagctttaagagagactgtcgtcgcggcccgcgcccttgaccacaccctggctagacaaagacttggagctgcattgcatgctttgcaggatttttattctcatagtaactgggtggagctgggagaacagcagccacatccccatctcctttggccaaggcaggagctgcaaaatctggcccaagtagcagacccaacttgtagcgactgcgaggaattaagttgtcccagaaactggctgggctttactctgctgacctctgggtacttcggcactcatcctccaaaaccccccggaaagtgttcccacggaggccacttcgacagaagctcttcacagccccctcgcggcgggatcaataaagatagcaccagccccggattctcccctcaccacatgctgcacctgcaggcagcgaaactagctcttcttgccagtatacaagccttctctttactccggtcaaggctgggcgaccgggacttttcgagattgctggatatcacccccgcttcaagcctaagcttcgttcttgatacaaccgggtcaatgggagaagagattaatgctgccaagatccaggcgcgtcacctggtggagcaacgccgcgggagtcctatggaaccagtgcactacgtcctcgtgccatttcacgaccccgggtttggccccgtttttacaacctctgatccggattcgttttggcagcaactcaacgagatccacgcacttggaggaggggacgagccagagatgtgtctgtctgccttacagctagccttgcttcataccccaccactgtcagatatcttcgtcttcactgatgcgagccccaaggatgccttccttactaaccaggtagaatcgctgacgcaggagcggagatgtcgcgttacatttttggttacggaggacacctcacgcgtgcaaggtcgggctaggcgggagatcctcagccctctacggtttgaaccctacaaggctgtggctttagcttccggaggcgaggtgatctttaccaaagaccagcatattagggatgtggctgcaattgtcggtgagtctatggcggctttagtaacccttccgctcgacccacccgttgtggtacctggacagccccttgtcttcagtgttgatggcttgctccagaaaataactgtcagaatccatggggatatctcttcgttttggatcaagaatccagctggcgtgtcccaaggccaggaagagggcggcggacccttggggcacacccgtcgctttgggcaattttggatggtgactatggatgatcctccccaaacagggacctgggagatccaggtgactgctgaggacacaccgggggtccgtgtccaggcacagacctctctcgatttcctattccatttcggcatacccatggaggacggtccccacccagggctttaccctctgacccaacctgtggccggcctccagacccagcttctagtggaagttactggcctgggctcccgcgccaacccaggggaccctcagccacatttctctcatgtgatcttgagaggagtgcccgaaggcgccgagctgggacaggttccactcgaacccgtggggcctcctgaacgagggctgctggctgcatctctgagccccactttactgtccacccctagacccttctcactcgagctcatcgggcaagatgctgccggccggaggcttcacagagccgccccacagcctagtaccgtggtgcccgtcctgctggagctgtctgggccctcaggatttctggctcctggctctaaggtgcccctcagcctacggattgcttctttctctgggcctcaggatcttgatctgagaacattcgtaaatccatcattcagtttaacttccaatctatcccgagctcacttggagctgaacgagtcggcatggggccggctttggctcgaggtacccgattcagcggcacccgatagcgtcgtcatggttactgtcacagcagggggacgggaagcaaatcccgtccccccgacccacgcattcctgcgcctcctggtgtcggccccggcaccacaggtcagaaaccactattttccatcccagggacccgcccatcacccataccggttgatctag

SEQ ID NO: 218723 - DNA, 2676 bp, Artificial Sequence
  derived and/or modified sequence
atgttacctacagaagttccacagtcccaccccgggccttcagcacttttgctcctgcagctactgctcccacccacatcggcattctttccaaacatatggagtttattagccgcgccagggtccatcacccatcaggatcttaccgaagaggccgctttaaatgtaacactccagttatttttagaacagccgcctcctggacggccgccccttagattggaggatttcctcggacgcacactgcttgctgatgatttgtttgccgcgtactttggacctggttctagcaggcggttccgcgctgccctgggggaggtgtcccgtgcaaatgctgcccaagattttctgcccaccagtcgcaatgatcccgacctacattttgatgcagaaaggctcggacaaggccgcgcaagactcgttggggcattacgagaaacagtcgtggcagctcgggctctggatcacaccctggcaaggcagcgtctgggtgcggctcttcacgcactacaagatttctattcacactccaattgggttgaactcggggaacagcagccacacccccatctgctgtggccccgacaagagctgcagaatttggctcaggtggccgacccaacatgctccgattgcgaagaactgtcctgccctcgcaactggctggggttcactttgctcactagcgggtatttcgggactcatccccccaaaccccccgggaaatgctcacatggggggcacttcgacaggtcctcatcccagcctccacgcggagggatcaataaagacagcactagtccaggcttttcaccacaccatatgcttcatttgcaagctgcgaaattagccctcctggcgtccatacaggcattctcactcctccgctccagacttggcgaccgggactttagtagactgctcgatattacccctgcatcatcactgagttttgtgctcgatacaaccggctctatgggggaggaaatcaacgcggccaagatccaggccaggcaccttgtagagcaacgccgcggaagcccaatggaacctgtgcactatgtgcttgtgccattccacgatcccggcttcggaccagtctttacaacctctgaccccgactcattttggcaacagcttaacgagatccacgctctcggcggtggtgacgagcccgagatgtgcttatctgcgttgcagcttgcactgttgcataccccacccctgagcgacatctttgtgttcaccgatgcctctccaaaggacgcctttttaaccaatcaggtcgagagccttacacaggagaggcgttgcagagtgacttttcttgttaccgaagatacaagccgagtgcagggccgggcccggcgcgagattctgagtcctctgcgctttgaaccttacaaggccgtcgcgctggcctctggaggcgaggtgatctttacaaaggaccaacacattagggatgttgccgcgatcgttggcgagagcatggctgcactcgtgaccttacctctcgacccacccgtggtggtcccaggacaacctttggtgttctcagttgacggattattacagaaaattacggttcggattcatggcgacatttctagcttttggattaagaatcctgccggcgtcagtcagggccaagaggagggcggggggccccttggtcacacccggagattcggccaattttggatggtgacaatggatgatcctcctcaaaccggcacgtgggagattcaggtgacggcagaggacactccaggtgtgcgtgtgcaagcacagaccagcttagacttcctgtttcatttcggaattcctatggaggacggacctcaccccggtctgtaccctctgacacagccagtggcaggattacagactcagctcctggttgaagttacggggctagggagccgagctaatccaggcgacccccagcctcatttttcacatgttatcctgcgcggagtgcctgaaggcgctgagttaggacaagtgcccctcgagcccgtggggccccccgagcgcggtctgctggctgcctcattgagtccaaccctgctttctacaccacgccctttctccctggagttaatcggccaggatgccgccggcaggaggctgcacagggctgcccctcagcctagcactgtggtacccgtactcctcgagctgtcagggccatcaggattcctcgctcctggctcaaaagttcctctgtccctcagaattgcctcattttccggccctcaggacttggacctacgcaccttcgtcaatccatcattttccttgactagtaatctgtccagggcccacttggagctgaatgagtccgcgtgggggcggctttggctggaggtccctgattcagccgctcctgactctgtggtcatggtaactgttacagcaggggggcgtgaagcaaatcctgtcccgcccactcatgctttccttaggctgctggtctctgctccagccccacaggaccggcacacaacccccaccggaagctctgacccaatcctgaccacagcaactcctgccttctcccccttcaccctcgtgactcagggaagggccggagccggacttgctgctggaagcccatggtggggtaccgtgggcggggtgctcttactgctgggccttgcaagttggtag

SEQ ID NO: 218724 - DNA, 2676 bp, Artificial Sequence
  derived and/or modified sequence
atgttaccaaccgaggtgccacagtcgcaccccggaccatccgctttgctattgctacagctgttgctcccacccacatctgcttttttcccaaacatctggtctctcctcgcagcccccggcagcatcacccatcaagatttaaccgaggaagcagccctgaacgtgaccctacagctgtttctagagcaacccccacctggtcgacctcctttgcgcctggaggattttctgggcaggacattgcttgctgatgatctgttcgcagcttactttgggccgggctcttcacgccggttccgggccgcgttgggagaggtgtcacgcgcaaacgctgcacaggactttttaccgacgtcaagaaatgacccagacctgcacttcgatgctgagcgcctgggacagggaagggcgcggctcgtcggggctctgagggagaccgttgtcgcggccagagccctggatcatactctggctagacaaagactgggagccgcactgcatgccttacaggacttttactcacactcaaattgggtggaactgggcgagcagcagcctcatccacacctgttatggccgaggcaggaattgcagaaccttgcacaggtagctgatcccacatgcagcgactgtgaagagctgagctgtccccgcaattggctcgggtttacccttcttacaagcggctactttggcacccaccccccgaaacctcctggcaagtgctcgcatggcgggcattttgataggagtagctctcaaccgccgcgaggtggtatcaataaagactctacatccccaggattctccccccatcatatgctgcacctccaagccgccaagctggctctcttggcctctatccaggcgttctccctactaaggtcccgcctgggcgacagagatttttcaaggttgttggacattacaccagcaagttccctgagctttgtactggatacaactgggagcatgggagaggaaatcaatgccgcaaagattcaggcacggcatttggtagaacagcgccgcggctcccctatggaacccgtgcactacgtcctggtccctttccacgatcccggctttggaccagtgtttactacctccgatcctgatagcttctggcaacagctgaatgagatccacgccctgggaggcggcgacgagcccgagatgtgcctgagtgccttacagctggctctactgcacacaccgcctctgtccgacatatttgttttcaccgacgccagccccaaggatgcattcctgactaaccaagtagaaagcctgacacaggagcgtcgttgccgcgtgacctttcttgttaccgaagacacgagcagagtccaggggagagcacggcgggagattctgtcaccattaagatttgaaccatacaaggccgtggccctggcttcagggggggaagtgattttcacaaaggatcagcacattagagatgtggccgcaatagtaggagagtctatggccgccttggtgactctgcccctggaccctcccgtggtagttcctgggcagccattggtgttctctgtggatgggctcctccagaaaatcactgtccgcatacatggcgacatcagctccttttggataaagaatcctgctggggttagccagggacaggaggaagggggaggaccactcggccacacgcgacgctttggccagttctggatggtcactatggacgacccaccacagaccggaacgtgggaaatccaggtgaccgccgaagatacccccggcgtccgggtgcaggcccaaacatctctcgatttcctcttccactttggcattcccatggaagatggtccacatccaggactgtatcctcttacccaacccgtcgctggattacagactcagctgctggtagaagtcaccggtctcgggtctcgcgccaatcccggcgatccccagccacatttttcacacgtcattctacggggagtccctgagggcgccgagctggggcaggtgcctcttgaacccgtaggaccccccgagaggggtcttctggctgcttctctaagccctacgttactgtcaacgccccgcccctttagtctggaactgatcggccaggatgccgctgggagacggctgcatcgcgctgcccctcaacctagcacagtggtcccagttctgctggaactctcaggcccttccggctttctcgccccaggttcgaaggtgccactgtccctacggattgcctcctttagcggtccccaagatctcgacttgaggacatttgtgaacccatcgttctctctgacctcaaacctctctagagcacatctcgagctgaatgagtccgcatggggcaggttgtggctggaggtgcccgacagtgccgcccctgattccgttgtgatggtaactgttacggcgggcggtagagaggctaaccccgtcccccctacacacgcgttcctgcgcctgctggtgtccgctcccgcgcctcaggatcgccacactacacccacaggatccagcgatccaatcttaacaacagctacacctgccttttctccctttacgttggtgactcagggaagggctggggcaggactggcagcggggtccccctggtggggcaccgtgggtggagtgcttctactactcgggcttgcatcatggtag

SEQ ID NO: 218725 - DNA, 2676 bp, Artificial Sequence
  derived and/or modified sequence
atgctcccgacggaagtaccgcagtctcaccctggacctagcgccctgctcttactgcagctgttgctgccccctaccagcgctttttttcctaatatctggtccctgctggccgccccagggagtatcactcatcaggacttaactgaggaggcagcgctcaatgtcacgctgcagttatttctggaacagccgccgccaggtaggcctccgctgcgacttgaagactttctgggacgcacactgctcgctgatgacctgttcgcggcttacttcgggcctggcagctctagacggttcagagctgcgttaggggaagtcagtagagctaatgcagcccaagacttcctgcctacctcaagaaacgacccggacctacactttgatgcagaaaggctcggacagggcagggcccgactagttggagctcttagagagactgtggtggccgcgcgtgccctagaccatacgttggcccgccaaagactcggtgccgccctacacgctctgcaagatttttattctcacagtaactgggtggagctgggtgaacagcagcctcatccacatttgctctggcccaggcaggagctgcagaatcttgcacaggtcgctgaccccacatgctcggactgcgaagaactgagctgcccgcgtaactggcttgggtttactctgcttacatcaggttattttgggactcaccccccaaagcctcctggaaagtgtagtcacggtggccacttcgatagatctagctcccagcccccacgcggtgggattaacaaagacagcacctcccccggctttagcccacaccacatgttgcatctgcaggcagccaagctcgcgctcctcgccagcattcaggctttcagtctgcttagatctagattaggagacagggacttcagtcgcctgttggacattacacccgccagcagcctaagttttgtgttggataccaccggatcaatgggggaggaaatcaatgccgcaaagatccaggctcgccatctggtggaacagcgcaggggttctcccatggaacccgtgcattatgtcctggtgccctttcatgacccaggcttcgggcccgtattcacgacttccgatcccgatagcttttggcagcagttgaatgaaatccacgctcttggcggaggagacgagcccgaaatgtgtctgtcagccctccaactggctctccttcacactcctccactctctgatattttcgtgtttactgacgcttccccgaaagacgcctttttgaccaaccaggtagagagtctaacccaggaacgtcgatgtcgggtcactttccttgttaccgaggacaccagccgcgttcagggcagagccaggcgcgaaattctctccccacttagattcgagccctacaaggccgttgcactcgcatctggcggcgaggttatcttcactaaggaccagcacattagggatgtcgccgctatcgttggcgagtccatggcagcgctcgtcacactccccctggatcccccagtagttgttcctgggcagccactagttttcagtgtggacgggctgctgcagaaaatcaccgtacgcatccacggtgacatttcctcattctggatcaaaaaccccgcaggagtctcgcagggacaggaagagggtggcggacccctaggacatacacgccgttttgggcagttttggatggtcaccatggacgatcctccccagactggtacctgggagatccaggtcacagcagaagacacgcccggcgtccgggttcaggctcagacttctctggacttcctcttccatttcggaattccaatggaggatggtccccaccccggcctttacccgctcacccaaccagttgcaggtctccagacccagctcttggtggaagttacagggctgggctctcgggcgaatcccggggacccacagccacactttagtcatgttattctgagaggtgtccctgagggtgccgagcttggccaggtcccactcgaacctgttggtcctcctgagcgtggtctccttgctgcctccctttcaccgactttgctctccactccccggccattttctttggagctaatcggtcaggacgcagccgggcgacggttgcacagggctgccccccagccctctaccgtggtgcccgtactactggagctcagcggcccttcaggtttcctagccccgggtagtaaagttcccttaagcctccgcattgccagcttcagtggcccacaggatctggaccttcgcacttttgttaaccctagttttagccttacgtctaacctaagtcgagctcacctcgaactcaacgagtccgcatggggccgcctgtggcttgaggtgcccgacagtgccgcacccgacagcgtcgtcatggtgacagttactgccggcggtcgcgaagctaatccggtgccgccaactcatgcttttttgaggctgcttgtctccgctccagctccccaggatagacataccacaccaaccggctcctctgatcctattttgaccacagctactccagctttctcaccttttaccctggtgactcagggcagggcaggcgcaggcctcgctgctggaagtccctggtggggaaccgtcggcggagtgttactcctcctcggccttgcttcctggtag

SEQ ID NO: 218726 - DNA, 2676 bp, Artificial Sequence
  derived and/or modified sequence
atgctgcctactgaagtaccacaaagtcatcccggaccaagtgctctcctcctgttacagctcctcctgccaccaacctcggcgttcttccccaacatttggtccttacttgcagcacccgggtccatcacacatcaggatctgaccgaggaagccgccctcaatgttacactacaactttttttggagcagcccccacccggccgtccccccttacgtctggaggacttcttgggccggactttattggccgatgatctctttgccgcatattttggaccaggtagctccaggcggttcagggcggcactaggcgaagtttctcgcgccaatgcagcccaggatttcctacccacttcaagaaacgatccggacctccattttgacgctgaacgcttaggccagggcagagcacgattagtcggcgctctgagagaaaccgtggtggctgccagggctttagaccacacgctggcacggcagcggctgggcgccgccctgcacgctttgcaagacttctatagccactccaattgggtggagctcggagagcagcaaccccaccctcatctgttatggccgaggcaagagctacaaaacctggcccaggtagccgacccgacatgcagcgattgtgaggagctgtcctgtccgagaaactggctaggattcacccttctgacttccggatacttcggaacccaccctcccaagccccccgggaaatgttcccatgggggtcacttcgacagatcatcctcacaaccaccgcggggtggaatcaacaaggactcaacttctcccgggtttagcccgcatcatatgctccatctccaagccgctaagttagcactgctagcatcaatacaagccttctcactgcttaggagccgactgggcgatcgggacttttccaggcttctcgatatcacaccagcatcatccctgagtttcgtcctggatacaaccgggagtatgggcgaggaaatcaacgcagccaaaattcaggcaaggcatttagtagaacagaggaggggatccccaatggagccggtgcactatgttctggtgccatttcatgaccccggatttggtcccgtttttaccacttctgaccccgacagcttctggcagcaactgaacgaaatacatgcgcttggcggtggagacgaaccagagatgtgtctgtcagcactgcaactggccctcctccacacacctccactatccgatatttttgtcttcacagacgcctcacccaaagatgcctttctgacaaaccaggtcgagagcttaacccaggagagaaggtgtcgcgtcacattcctggttaccgaggacacctccagagtgcagggccgtgcccgccgggagatcctctcaccactgcgatttgaaccctacaaagccgtggcactggcatcaggcggagaagtaatttttactaaagatcaacacatccgggatgtcgcagcaattgtgggtgaaagcatggcagcactagtgaccttgccgcttgacccaccagtggtggtgcccgggcagcccctcgtcttctctgtggatggactcctgcaaaagattaccgttcgaatacatggcgatatatcttccttttggatcaagaatccggcaggcgtatctcagggacaggaggaaggtggtggccctcttggccacacaagacgctttggccagttctggatggtcaccatggatgacccaccccagaccgggacatgggagatacaagttacagccgaagacactccaggggtgcgggtgcaggcccagacctccctcgacttcctattccattttggcatccctatggaggatggaccccatcccggactgtacccactcactcagcccgtagctggcctgcagacgcagcttctcgtcgaagtaaccggcttagggtcccgcgctaacccaggcgatccacagccacatttctcacatgtcattctgcgaggcgtgcccgagggtgccgagttaggccaagttccacttgagccagtcgggccccctgaaagaggactgctggccgcctcactgagccctacacttctgagcacccctcgccctttttctcttgaactaatcggccaagacgctgcgggtagaaggctgcaccgagcggctccacagccttcaacagtggtgccagtcttgttggagctatcaggaccatcaggctttctggcccccggcagtaaggttcctctctctcttaggattgcctccttcagcggaccgcaggacctcgacctgcggaccttcgtgaacccttctttttctcttacatctaatctgtcccgtgcccacttggaactgaatgagtcagcgtggggtcgcttgtggctggaggtgccagactctgctgctcctgatagtgtcgtcatggtgacagtgactgcaggggggagagaggcaaaccctgtcccacccacacacgcctttctgcggctgctggtttctgcccccgcccctcaggaccgacataccactcccactggttctagcgatcctatactaacaaccgcaacaccagccttctctccctttacattagtaacacaaggccgggccggcgccggtctggccgccggaagtccatggtggggaacagtcgggggcgttctcctgctgcttggactagcatcttggtag

SEQ ID NO: 218727 - DNA, 2676 bp, Artificial Sequence
  derived and/or modified sequence
atgttgccgacggaggtacctcagagccaccctggcccatccgctttactgttgttgcagttactactgccccctactagtgcattcttccctaacatttggtccctgctggccgcccccggaagcatcacccatcaggatctaaccgaagaggcagccctgaacgtgacacttcagctgttcctcgaacaaccccccccaggaagaccgcctctacgcctcgaagattttcttggacgaacactgctcgcagatgatctgtttgctgcctactttggccctggttcttctcgccgatttagggccgccctgggtgaggtgagtagagcgaacgcagcgcaggatttcctgcccacttctaggaacgaccccgaccttcattttgacgccgaacgactgggtcagggtcgggcacgtctggttggtgcgctgcgggagactgtggtggctgcacgagcattagatcacacactcgctaggcagcggctgggcgccgccttgcatgccctccaggatttctattcgcactcaaattgggtggagcttggcgagcagcaaccacacccccatcttttatggccaaggcaagaattacaaaacctcgctcaggtggccgatccgacctgtagtgattgcgaagaattgagctgtccacggaactggctgggtttcacattgttaacgtcggggtacttcggaacccacccacctaagccgcccggcaagtgctcccatgggggtcactttgatcgtagctcaagtcagccacctagaggaggtattaataaagactctactagtcccggcttctcaccacatcatatgctgcacctacaagcagcgaagctggcattactcgcgagcatccaggctttcagcctgctgagatcccgactgggtgaccgcgatttttcccggctgctggatatcaccccagcatcttcactaagcttcgtgctcgataccacaggctccatgggcgaagaaatcaatgcggcaaagatccaggcccgccatcttgttgaacagcggcgaggtagtcctatggaacccgttcattacgtactggtccctttccatgaccctggctttggccccgtgtttactacaagcgatccggattccttttggcagcagctgaacgagattcacgctctgggtggcggagatgaacccgaaatgtgcctaagtgccttacagttagccctgctccacactccccctctaagtgatattttcgtgttcaccgatgccagtcctaaagacgcttttttgaccaaccaggtcgagtcactgacccaggagcgccggtgcagagtgacctttttagtcacagaagatacctcgcgcgtccaggggagagctcgtcgcgagattctgtcccctctgagattcgaaccttataaagcagttgcgctggccagtggtggggaggtgatctttaccaaagaccagcacattagggacgtagctgccattgtcggggaatcaatggccgctctagtcactctgcctttggatcctccagtagtagtccccggacaacccctggtgtttagtgttgatgggctccttcaaaaaattactgtgcggattcacggggatatttcttctttttggatcaagaaccccgcaggagtgagtcagggtcaagaggaaggcggcggaccgcttggccacacgcgccggttcgggcagttttggatggtaactatggacgatcccccccagactggaacatgggagatacaggtcacagctgaggatacacctggtgtccgcgtgcaggctcagacgtctctagattttctgtttcacttcggcattcccatggaggacggtccgcatcccgggttgtatccacttacccagcctgtagccggactgcagactcagttgctcgtcgaggtaaccggcttgggcagcagagctaaccccggagatccacaaccccatttcagtcatgttatccttcgcggcgtgcccgaaggcgctgagttggggcaggtaccgctggagccagtcgggccccctgagaggggactcctggcggcctcactctctcccaccttactgtcaactccacgccccttcagcctggaacttatcggtcaggacgctgcaggcagacggctacaccgggctgcgcctcagccttccactgtggtccccgtgttactggaactgagcggaccctctggatttctcgccccaggcagtaaggtacccttgagccttaggatcgcctccttttccgggccccaggatctcgatctacgtacattcgttaacccatctttctctctgacaagcaacctttcgcgcgcccacctggaacttaatgaatcagcctggggtcgcctttggttagaggttccagattcggctgcacccgactccgtggttatggttacagtcacagctggaggccgcgaagccaaccccgttccccccactcatgcatttctgagactcctcgtcagcgcccccgccccgcaagatcggcataccacacctacaggctcatcagaccctattcttaccaccgctacacccgcattttcacccttcaccctggtgactcagggccgcgcgggcgcaggactggctgctggatcaccttggtggggaaccgtcggcggcgttctgttgttgctgggtctcgccagctggtag

SEQ ID NO: 218728 - DNA, 2559 bp, Artificial Sequence
  derived and/or modified sequence
atgctcccaaccgaggtcccccaatcgcacccaggaccttccgctcttctgctcttgcaattgttactgccgccaactagtgccttttttccaaatatctggtccctgctcgccgctccaggatcgatcactcaccaggacttgaccgaggaggctgcccttaacgtgacactccagctgttcctcgagcagccgccacctggtagaccacctctacgtctggaagattttctaggccgcaccctgctggctgacgacctgttcgccgcctacttcggtccaggttcatcccggagatttcgggcagctctgggagaggtttcccgggccaacgcggcacaagacttcctgcctacgtctcgtaacgacccagatctgcattttgatgcggaaagactcggacaagggcgagcccgtcttgtcggtgctctgcgggagaccgttgttgccgccagagccctagatcatactcttgccagacaacgcttaggagcagctctgcatgccctccaagatttctacagccactctaactgggttgagctaggggaacaacagccccacccccatctcctgtggccacgacaagagctgcagaacctcgcccaagtggccgaccccacgtgtagtgactgcgaagaactatcctgccctcggaattggcttggcttcactctgctcacttccggatacttcggcacccatccccccaagccaccagggaaatgctcccacggcggacactttgaccgatcctccagccagccaccacggggcggcataaataaggatagcacctccccgggcttcagtccacatcacatgcttcatctgcaggctgccaaacttgctctcttggcctcgatccaggccttttcccttctgcggagcagactgggggatagggatttctctagattgctggatatcactcctgcaagctcactgtcgttcgtgctggataccacaggctctatgggtgaggagatcaatgcggcaaaaattcaggctagacacttggtcgagcaacgacgcggttctcctatggaaccggtccactatgtgctggttcctttccacgacccgggcttcggaccagtgttcacaacttctgaccctgactccttctggcagcaactcaacgagattcatgccttgggaggtggcgacgagcctgagatgtgcctgtctgctctacaattagcccttttgcatacgccaccactgagcgacatctttgtctttacagatgcgagtccaaaagacgccttcctcactaatcaagtcgaatccctaactcaggaacgccggtgccgcgttaccttcctggtcaccgaagacaccagtagagtccaagggagggcccgacgggagattctgtcgccacttaggttcgagccctataaagccgtggctttggcatccggaggagaagttatcttcaccaaagaccaacacatccgcgacgtggcggcaattgtgggagaaagcatggctgccctcgttactctcccgttggatcctccagtagtcgtaccaggtcagcctctcgttttcagtgtggacgggctgctgcaaaaaatcacggtgcgaatccatggagatatcagcagcttttggatcaaaaatcctgcaggcgtgtcacaagggcaggaagaagggggtggacctctcggacatacacgccggttcgggcaattttggatggtgacaatggacgaccccccccagactgggacatgggaaattcaggtcactgcagaagatacacccggcgttcgcgtacaagcccaaacatctttggacttcctgttccactttggcataccaatggaggacggccctcatcccggcctgtatccactgacccagccagttgccggtcttcaaacacagttgttagtggaggtcacaggcctaggttccagggcaaaccccggcgatccacaacctcacttctcccacgttattctgaggggcgtacccgagggggctgagctcgggcaagtcccactggaaccagtcggtcctcccgagcgcgggctactggcagcttccttatcgcctactcttttgtcaaccccacggccattctctctggagctgattggtcaggacgccgccggtcgcaggctgcatcgtgccgccccccagccatctacggtggtccctgtgctccttgagctctccggaccttcaggttttctggctcccggatcaaaggtccctctgtcgctgagaatagcttcttttagcggcccacaggacttggatctgcgtacctttgtgaaccctagcttctccctaacttcgaatctgtctcgcgcccatttggagctgaatgagagtgcctggggaagactgtggctcgaggtacccgattcagctgcccccgattcagtcgttatggtgactgtcaccgcgggaggaagggaggcgaaccctgttccacccactcacgctttccttaggctcctggtttcagccccggctccccaggtgagaaatcattatttcccaagtcaaggccctgcgcatcacccttatcgattgatctag

SEQ ID NO: 218729 - DNA, 2559 bp, Artificial Sequence
  derived and/or modified sequence
atgctgcctacagaagtcccacagtcacacccaggaccttctgctctacttttgcttcagttactcctcccacccacatccgcctttttccccaatatttggtccctgctagcagcccccggatcaatcacacaccaggacctcactgaggaggcagcccttaatgttacactgcaattgttcttagagcaaccaccgcccgggagaccgcctttacggctcgaagacttcctgggccgcacgctactagctgatgaccttttcgctgcatacttcggaccaggcagttcaagacggttccgggctgccttaggagaggtcagccgagctaacgccgcccaggacttcttaccaacctccagaaacgaccccgacctgcactttgatgcagagagacttgggcaagggagggcgcggctggtgggcgccctaagagagacagtggtcgcggcccgggccttggatcacaccctcgcccgtcaacgcctgggagcagcattacacgccttgcaggacttttactcccattccaattgggtggaactgggggagcaacagccccatccgcatttattatggccacggcaagagttgcagaacttggcacaggtcgcagatccaacctgcagtgattgtgaggaactgagctgtcctagaaattggctcggtttcactctattgacaagtggctacttcggcacccacccccccaaaccccctggcaagtgcagccacgggggacactttgataggagttcttcccagccccctcgtggcggcataaacaaggacagcacaagcccaggcttctcgccccatcacatgttgcacctccaggccgctaagctcgcacttctcgctagcatccaggcgttcagcctgttaaggtcaagattaggggacagggacttctcacgacttctggatattactcccgccagttctttgagttttgtgttggacacaacaggctcaatgggtgaggaaattaatgctgccaagattcaagcgcgacatctcgttgagcagcgacgaggatcgcctatggagccagtccattatgtattggtcccgttccacgaccctggttttggcccagttttcacaacctccgatcccgactctttttggcagcagctaaatgaaatccatgccctgggtgggggcgatgagcccgagatgtgcctctcagcactgcaactggctcttctgcatactcccccgctgagcgacatctttgtctttaccgatgcgagtcccaaagacgccttcctcactaatcaggtggaaagcctaacccaggagcgtaggtgtcgtgtgacatttctggtgacagaggacacaagccgtgtgcaaggccgcgccagacgcgaaattctctctccactgcgtttcgaaccttataaggccgtggccctggcatcagggggtgaagtgatctttacaaaagaccaacatataagagatgtagcagccattgtcggtgagtctatggcagctctggttacactgcccctcgaccccccagttgtggtgcccggacaacctctagttttttcagtcgatggcctgcttcagaagattaccgtacgcatccatggtgatatcagctccttctggataaaaaaccccgccggggttagccagggccaggaagagggaggaggccctctcggacatactagaagatttggccagttctggatggtcactatggatgaccccccacagaccggaacctgggagatccaggttacagcagaagacacacccggcgtccgagtgcaggcccaaacctcactggattttctgttccacttcggcataccaatggaggatgggccacatccaggcctctacccccttacgcaacccgtcgcgggcctgcaaacacaactgttagtggaggttacaggcctgggatctcgggccaaccctggggacccccagccccatttttcccacgtcattctgcgcggggtgcctgagggggccgagctaggccaagtcccattagaacccgtgggacccccagaaagaggactgttggcagccagtctctcccctactcttttgtctacccctcggccgttctcactggagctcattggacaagatgccgccggaagaagactgcatcgcgcggctcctcaaccctccacagtagtgccagttctgttagaactctcaggcccatcaggctttctagcccccggttccaaagtgcctttatcattacgcattgcatccttttcaggacctcaggacttagacctgagaacctttgtcaatccgtctttctccctcaccagcaacttgagccgtgcacacttggagctgaatgaatcagcatggggacggctgtggctagaggtgcccgattctgccgcccccgactccgtggtcatggtgacagttactgcgggtggacgagaagcaaatccggtacccccaacccacgccttcctccggctgctagtctccgccccagccccacaggttcgtaaccattatttccctagtcagggcccagcccaccatccctatcggcttatctag

SEQ ID NO: 218730 - DNA, 2559 bp, Artificial Sequence
  derived and/or modified sequence
atgctcccaacggaagtgccacagtcacaccctggcccaagtgctttattgcttctccagctacttttacctcccacctcagcatttttcccgaatatatggagtctattagccgcaccaggatccattacccaccaagacctcactgaggaagccgccctaaacgttacactgcagctctttctagagcagcctccaccgggacgtccaccgctacgactggaggactttcttggacgcactctcctcgcggacgatctgttcgcagcgtatttcggccccgggagcagtagaagattcagagccgccctgggcgaagtgagcagagccaatgccgcccaggacttcctgccaacttctagaaacgatccagacctccactttgatgcagaaagattaggccaaggtagagcccggctggtaggagccttaagagagaccgtggtcgcagccagggccttggaccacacccttgcacgccagaggcttggagctgccctacatgctctgcaggatttttactcacattcaaactgggttgaacttggggagcagcagcctcacccccatcttttatggcccagacaagaactccaaaacctggcccaggtcgcagatccaacatgtagcgactgcgaagagctctcttgccccaggaattggctgggcttcaccctcttaacatctggttatttcggaactcaccctcctaagcctccaggtaaatgcagccatggcggacacttcgacagatccagctcccaacctccgaggggcggcattaacaaagactccacgtccccaggcttcagtccccatcacatgctgcacttacaggctgcaaaattagcccttctggccagcatccaggccttctccctactgagatcaaggctaggagaccgcgactttagcaggttacttgatattaccccagccagctctcttagcttcgtcctggacaccaccggaagcatgggcgaggaaatcaacgccgctaagattcaggccaggcacctcgtagagcagagaagaggtagccctatggaacccgtccactatgtccttgtcccgtttcatgaccccggatttgggcctgtattcaccacaagcgacccagactctttctggcaacaattaaatgaaattcacgccttgggcggtggagatgaacctgagatgtgtctttccgctctgcagctcgcccttctgcatacaccaccgctgtcagatatttttgtgtttacagatgccagtcccaaggacgcgtttctcacgaatcaggtggagagcctgacccaggaacgacggtgtcgcgtgacattcttagtaaccgaagacacgtcccgggtacagggcagggctaggagagaaattttgtccccattgagattcgagccttataaagccgtggcgctagccagtggaggagaagtaatctttaccaaagatcagcatatacgggatgttgctgccatcgtgggtgagagtatggctgcactggtgacattgccattagatccccccgtggtggttcccgggcagcctttggttttcagcgtcgacggactcctgcagaaaatcacagtgcggattcacggcgatatcagcagcttctggatcaaaaacccagcaggagtgtcccaaggtcaagaagaagggggagggcccctaggacacaccaggcgtttcggtcaattctggatggtgaccatggacgaccccccccaaacaggaacgtgggagatccaggtcaccgcagaggacacccccggagtgcgtgtgcaagcgcagacatctctggactttctattccacttcggtatccccatggaggacggccctcaccctgggctttacccacttactcagccagtggccggcctgcagacgcagctcctcgtagaggtgacagggctcggatcaagagcaaacccaggggacccacaaccacacttttcccatgtgatcctacggggggtgccagaaggagccgagctagggcaggtgcctctcgaaccagtgggacctcccgagagggggttacttgccgcatccctctctcccacactgttaagcacgccccgacctttctcattagagcttattggtcaggacgcggccggacgccgactacatcgggcggctccacagccgagtacagtggtaccagtcttgctggagctgagtgggccttcgggatttctggctcccggcagtaaagtcccccttagtctcaggatcgcctctttctcaggaccacaggacttagatcttcgaacgttcgttaaccccagtttcagccttacaagcaatctgagccgagcacacctggagctgaacgaatccgcctggggtcggctgtggctggaggttcccgattcggccgctcctgattccgtagttatggtgaccgtaacagcaggcggacgcgaggcgaaccctgtacctcctacccatgcttttttaagactcctcgtgtccgctcctgcgccccaagtgagaaatcactactttccaagccagggccctgcccatcacccataccgattgatttag

SEQ ID NO: 218731 - DNA, 2559 bp, Artificial Sequence
  derived and/or modified sequence
atgctgccaaccgaggttccccagtcccacccgggacccagcgctcttttacttctgcagttgctcctccctcctacttcagccttcttccccaatatatggtcgctccttgccgctccgggctccattacccaccaggacctcacagaggaggccgcgctcaacgtaacgctgcagcttttcctggaacagccccctccagggcgcccacccctacgtctggaggacttcctcggacggaccctcctggccgatgacctgttcgctgcgtactttggcccggggagctcgcggaggtttcgagctgcccttggcgaagtgtctagggccaatgccgcacaggatttcctgccgacctctcgcaatgatcctgatcttcacttcgatgctgaacgcttaggccaaggaagagcacgcctggtgggcgccttgcgggaaacggtggtagccgctcgtgctctcgaccacaccttggctaggcagagattgggagcagcccttcatgcactgcaagatttctattcacactctaactgggtggagctcggagagcagcagccacacccacacctattgtggccacgccaggagctccaaaacctcgcccaggtggcggaccctacctgctccgactgcgaagagctctcctgtccacgcaattggcttggcttcacgctgctcacatctgggtactttgggactcacccgccaaagccaccaggcaaatgtagccacggaggtcatttcgatcggtctagtagtcaaccccctcgcgggggaattaataaagattctactagtcctggattctcaccccaccatatgttacacctccaagcggcaaaactcgccctactggcaagcatccaagcattttctctccttcgttcccgtctgggggatagggacttttcccgcctcctcgacatcactcctgcgtcctcactttcgtttgttctcgatacaacgggttcaatgggggaggagataaatgccgcgaagatccaggcccgacaccttgttgagcagagaagagggtcgcctatggagccagtccattatgtgctggtgccattccacgatcccggattcggacccgtgtttactactagtgacccagattctttttggcagcagctgaacgagattcacgccctggggggaggcgacgagcctgaaatgtgtctgtctgctctccagttagccttactgcacacccctccgctctccgacatattcgtctttactgatgcaagcccgaaggacgcatttctcacaaaccaggtagaatctttgactcaggaaaggaggtgccgagtcacatttctggtgactgaagatacgtctagagtacagggtcgggccaggagggaaatcctgtcccctcttagattcgaaccatataaagctgtcgccctcgcttctggaggtgaagtaatctttacaaaggatcagcacatcagagacgtggcggctatcgttggcgagagtatggctgccctcgtaactttgccgttggatccaccagtcgtcgttccaggacaaccactcgttttcagcgttgatggacttctgcagaaaatcaccgtgcgcatccatggcgatatatcctccttttggatcaagaatcctgcgggggtgtcccaagggcaagaggaaggaggtgggcctttggggcatacccgccggttcggtcagttttggatggtaaccatggatgaccctcctcagaccggcacctgggagattcaggtcaccgcagaagataccccaggtgtgagggttcaggcccaaacatccctggacttcctattccattttggcattcctatggaagatggacctcaccccgggttgtatccacttacacagccagttgccggcctccaaacacaattactagtagaagtcactggtctcggttcacgcgctaaccctggcgatcctcagcctcacttctcccatgttatcctccgaggggtcccagaaggggccgaactggggcaggtcccactggagcctgttggaccacccgaacggggtctgctggccgcgtcgctgagccccacactgctttcaacacctagacctttctccctcgaactaataggacaggacgcggctggcaggcggctgcatagagccgcaccccaacctagtaccgtggtgccggtactgctagagctgtcaggaccatcgggattcttggcacccggaagtaaagttcccctatccctgcgcattgcctcctttagtgggcctcaagacctcgatttgcgcacatttgtgaatcctagcttttctttaacatcaaatctatcccgcgcccacctggagctgaatgaatcggcttggggaagactgtggctcgaagtcccagatagtgctgctccagactctgtcgtaatggtgactgtgacagccggaggccgggaagccaatccagtgccacctacacatgccttcttgagacttctcgtaagcgcccccgccccacaagtacgcaaccactacttcccctcacaggggcccgctcaccatccttaccggttaatttag

SEQ ID NO: 218732 - DNA, 2559 bp, Artificial Sequence
  derived and/or modified sequence
atgctccctacggaagttccccagtcccatcccgggccaagcgcactgttattattacagcttcttctccctcctactagcgcctttttcccgaacatttggtctctcctggcagccccagggtcaattacacatcaggacctcactgaggaagccgcactgaatgtgacgctacaactgttcctggagcagcctccaccaggccgccccccactcagactcgaagattttcttggacggactctactggccgacgacctgtttgctgcatactttggtcccggatcatctcgtcgcttccgggccgccctcggggaagtttcccgcgccaatgctgcacaggactttctgccaaccagtcgtaacgaccccgatctgcattttgacgccgaaagactgggtcaaggccgagcccgtctggtcggagctctccgcgagactgttgtcgccgcgcgtgcactggatcatacactagctcgccagcgcctgggcgccgccctacatgccctgcaagacttttattcccactctaattgggttgagttgggtgaacagcagccacaccctcaccttttgtggcctcgccaagaacttcagaatttagcccaggtggctgaccctacttgctcagattgcgaagaacttagttgcccacgaaattggttaggcttcactttgttaacatctgggtactttggaacacatcccccaaaaccccctggaaagtgcagccatggcggccattttgacaggagttcgtctcagccccctaggggtggcattaataaagattctacatcacccggcttctccccccatcacatgctgcaccttcaagctgctaaattggctttattggcatccatccaggctttcagcttgctacgatctcgtctcggggaccgagacttctcacggttactagacattactcccgcttcgagtttaagcttcgtgctggatacaaccggatctatgggagaagaaatcaacgccgccaaaatccaggctaggcacctcgtcgagcagcgccggggctcgccaatggaacctgtccattatgttctcgtcccatttcacgatcctggtttcggacccgtgtttacgacttctgaccctgactcattctggcagcagctgaacgagatccatgccttaggtggaggagatgagccagaaatgtgcctgtctgcgctgcaattagccttgcttcatacaccacccctgtccgatatttttgtcttcactgacgctagcccaaaagatgccttcttaaccaaccaagtggaatctttgacacaggaacggcgatgtcgggtgacatttctggttactgaggatacgtcaagagttcaaggacgcgcaaggagggaaatcttatccccattaaggttcgaaccttacaaagcagtcgcactggcgagcggaggcgaggtgatatttacgaaggaccagcacattagagacgtcgctgctatcgtcggtgagtcaatggccgctctcgtaacactaccactcgatcctccggtggtcgttcccgggcagcccctagtgttttcagtagacggtcttcttcaaaagatcactgtacgcattcatggggatataagttcgttctggataaaaaacccggctggagtgagtcaaggacaggaggaaggaggcgggccactggggcacacacgacgcttcggacagttttggatggtgaccatggatgacccccctcaaacaggtacatgggagattcaggtaacggccgaagatacacccggcgttagagtgcaagcccagacaagcttagacttcttattccacttcggcatacccatggaggacgggcctcaccccggcttgtatccactcacccagccagttgccggtctacaaacccaactcctggtcgaggtcaccgggcttggatcgcgcgcgaatcctggggacccccagcctcacttcagccacgtaatacttaggggcgtccctgaaggagctgaactaggccaggtcccgctcgagccagttggaccccctgaaagaggcctcctagccgcttccttgtctccaactctccttagtactcctaggccattctctcttgagctgatcggtcaagatgccgccgggagaagactgcatcgcgccgcacctcagcccagtaccgttgtgcctgtgctgcttgagctctccggtcctagtggctttttagctcctggaagtaaagtccctctctcccttagaattgccagtttttccgggccccaggatttggacttgcgaacgtttgtcaacccttccttctccttgacctctaatttgagtagggcccatttagagctaaatgagagcgcctggggacgcctttggctcgaagtgcccgattctgccgcgcccgactccgtggtcatggtgaccgtcactgcaggtggccgcgaagccaatccagttccacctacccatgctttccttagactgctcgtcagtgctccagctccacaagtacgtaatcattatttcccttcccagggccctgctcaccatccctacaggttgatatag

SEQ ID NO: 218733 - DNA, 2676 bp, Artificial Sequence
  derived and/or modified sequence
atgttgccaaccgaggttccccaaagtcatccaggaccttctgccttgctgcttctccagctgctgttgcccccaacctccgcgttctttccaaacatttggtcgctccttgctgcacccggaagtatcacgcaccaagaccttacggaagaagctgccctgaacgttacacttcaactctttctagagcagcctcctcctggacgtcctccgctcagactcgaggattttctcggcaggacacttctcgccgacgatttatttgcagcctacttcggccccggatcaagccgccggttcagagctgccttgggtgaagtctccagggctaacgccgcccaggatttcctacctacctcaagaaatgaccccgatctccactttgacgccgagaggctcggccaaggtcgtgcaagactcgttggggccttgagggagacggtcgtagcagcgcgggcattagatcatacactcgcacgtcaaagactgggcgcagcattacacgctctgcaggatttctactctcattcaaattgggttgaacttggagagcagcagccacacccacacctgctttggccaagacaggagttacagaacttagcacaagtggctgatcctacttgcagtgattgcgaggaattgtcctgcccacgaaactggctcggctttactctcctaacatccggatattttggaactcaccccccaaaaccacctggcaaatgtagccatggcggacattttgatagaagttcatcccagcctccaaggggagggatcaataaagactccacctcccccggctttagcccacaccacatgcttcacctccaggccgctaagctcgctctgttagcctccattcaggccttctccctgctccgcagcagactcggagaccgggatttctctaggcttcttgatataaccccagcatcctccttaagcttcgtcctggacacaaccggtagtatgggagaagaaattaatgccgcaaaaatccaggcgagacatctggttgaacagagacgcggtagtcccatggaaccagtccattacgtgctagtgccttttcatgaccctggcttcgggcctgtgttcactacctccgatcccgacagcttctggcagcaactcaatgaaatacatgcactgggagggggcgacgagcccgaaatgtgtctgtctgctctgcagctggctctgcttcatactccacctctttccgatattttcgttttcactgacgctagccccaaagatgcttttctcacaaatcaagtcgagagcctgacccaggaacgccgctgcagagtgaccttccttgtcaccgaagatacttcaagagttcagggacgcgcgaggcgcgaaattctgtctcccctaagatttgagccttacaaagccgtcgccctggcctcaggcggagaggtaatattcaccaaagatcaacatatacgggacgtggcagccatcgttggcgaatctatggccgccctcgtcactcttccgttagatcctccagttgtcgtgcccggacagcctctggtgttctccgtggatggactccttcaaaaaataacagtgagaatacatggggatatttcgagcttttggattaagaatcccgccggcgtttctcaaggccaagaagaaggtgggggaccactcggccacactcgtagatttggccagttctggatggtaacaatggacgatcctccccaaactgggacctgggaaatccaggtaaccgcagaggacacaccaggagttcgcgtgcaggctcagactagcctagatttcttattccattttggcatcccgatggaggatgggcctcatcctggactttaccctctcactcagcccgtcgctggactgcagactcaactcctggtggaggtcaccggtctggggtcgcgggctaacccaggcgatcctcagccccatttttcccacgttatactccgcggagtacccgaaggagccgaactgggccaggtacctctcgaaccagtcggtccccccgagagaggattgctagcagctagcctaagtcccaccctactctctaccccacgaccgttctctctggagttgatcggtcaggatgcggcaggcagaaggttacatcgggcagcaccgcaaccttcaaccgtcgtccctgtgttgttagagttatccggcccctccggtttcctggccccgggcagcaaagttcccttatccctaagaatagctagtttctccgggccccaagacttagacctcagaactttcgtgaacccctcatttagtctgacatccaatctctctcgcgcccatttggaattgaatgaatcagcatggggtcggctgtggttagaagttcccgatagcgcggccccggactcagttgtgatggtcacggtcaccgcaggtgggcgagaagctaatcccgtaccacccactcacgcatttctgcggttactggtttcagctcccgctccccaagaccgacatacgacccccactggctcatctgatccaatactgaccactgctacacctgccttttctccttttaccctggtcacacagggtagagccggagccggattagccgccggatcaccctggtggggaacagtaggaggtgttctactcttgcttgggctggcctcttggtag

SEQ ID NO: 218734 - DNA, 2676 bp, Artificial Sequence
  derived and/or modified sequence
atgttgccaaccgaggttccacaaagccaccctggtcccagcgccctgctccttctgcagctcctcctaccccccacctcagcgttttttccaaacatctggtccctgctggccgcccctggaagcattacacaccaagatctcaccgaggaagccgccttgaatgtcaccctgcagttgtttctggaacaaccccctcccggcagacccccactgcgccttgaggattttctcgggaggacactgctggccgacgacctcttcgccgcttacttcggccccggctctagtagacgttttcgggccgctctaggagaagtcagccgcgccaatgcagcccaagatttcctgcctactagtagaaacgacccagacctgcactttgatgcagaacggctgggccaggggagagcccggttagtgggagcattacgtgagactgtagttgccgcccgcgcattagaccacaccctggcaagacaacgcctcggtgccgccctgcacgccctccaggacttctactcccacagtaattgggttgaactcggagagcaacagcctcatcctcaccttttgtggccccgccaagagttacagaatctcgcacaggtagctgatcccacatgttcagactgtgaagaactatcttgtccgcgtaattggctcggcttcactttgctaacctctgggtactttgggacacatccccccaaaccacccgggaaatgctcgcacgggggacactttgatcgcagcagcagccagcccccaagaggcggcatcaataaggacagcacatctcctggattcagtcctcatcacatgctgcatttacaggccgccaaattagcccttctggcgtctatacaagccttttccctactgcgctcacgactaggcgacagagatttttcaagattgctagacattacacccgcctctagtctttcctttgtcctggatacaactggaagcatgggagaagaaatcaatgctgccaagatccaagcacgccacctcgtcgagcagcgcaggggcagccccatggaacctgttcactacgtgttagtgccctttcacgatcccggattcgggcctgttttcaccacttccgatcccgacagcttttggcaacagctgaatgaaatccacgccctcggaggaggcgacgaacccgagatgtgcctcagcgcactgcagctggctctactgcacacaccgcctctgtccgacatatttgttttcaccgacgccagccccaaggatgcattcctgactaaccaagtagaaagcctgacacaggagcgtcgttgccgcgtgacctttcttgttaccgaagacacgagcagagtccaggggagagcacggcgggagattctgtcaccattaagatttgaaccatacaaggccgtggccctggcttcagggggggaagtgattttcacaaaggatcagcacattagagatgtggccgcaatagtaggagagtctatggccgccctcgtgacactacccctagatcctccagtagtcgtccccggccagccactcgtgttctctgtcgatggacttctccagaaaattacagtccggattcatggagatattagttccttttggatcaaaaacccagcaggagttagccaaggacaggaggaaggaggaggtccccttggacatacccgcagattcggacagttttggatggtaacaatggatgacccccctcagaccggtacttgggagatacaggtcactgcagaagacactcccggtgtgcgcgtgcaggcacagacctcactggattttctgttccatttcggaatacctatggaagacggccctcaccccggcttatatcctctgacacaacccgtcgccggactccaaacccagctgctggtcgaagtcactggcctaggctcacgcgccaatcccggggaccctcagccgcacttttctcacgtgatcctacggggtgtccctgaaggcgcggagctcggtcaagtacccctggaacctgtaggaccccccgaacgaggtctcctggccgcatcgctgtcacctacgctgctgtccacaccccggcccttcagtctggagcttataggccaggacgcagctggcagacgtcttcaccgtgccgctcctcagccatcaaccgttgtgcctgttctgctcgaactgtctggcccctctggattcctcgcgccagggtctaaggttcccctgtcattaaggatcgcgtctttttctgggcctcaagatctcgatctgcggacgtttgtcaacccctcattcagcctcacctctaacctgtcaagggcccacctcgaactgaacgagagcgcctggggcaggctgtggctggaagtgcccgatagtgccgctcccgattccgtggtaatggtaacggtcactgccggcggaagagaagccaatcctgtaccaccaacacatgcttttctgcgtcttctcgtttcagcccccgcccctcaggatcgccatacaactccaacaggctcatcagacccaatactcactaccgccacacccgcattttctcctttcacactggtcactcaaggacgagcgggggcagggctcgccgctggttcaccttggtggggcactgttggcggggtgctgctgcttctgggtcttgcaagctggtag

SEQ ID NO: 218735 - DNA, 2676 bp, Artificial Sequence
  derived and/or modified sequence
atgctgccaaccgaggttccacagagccatcccggcccttctgcgctgctccttttgcaattgctgctgcctcccacatccgcatttttccctaacatctggtccctgctagcagcacccggctccattacacaccaggatttgactgaggaggctgccctgaacgtgactctacagctgttcctcgaacagcccccacctggacgccccccactacgactagaagatttcctgggacgcaccctgttggccgacgatttgtttgctgcgtattttggccctggctcatctcgcagatttcgcgcagcgttaggagaggtgtctcgggctaacgctgcacaagattttttgccaacttctaggaacgacccagatttacacttcgacgcagaaaggttagggcaaggaagagctagacttgtgggagctttgcgtgaaaccgtggtcgccgcccgggcactggatcataccttagcccgacagagattgggcgctgccttgcacgcactgcaggacttctactcacacagtaattgggtggagcttggggaacagcaacctcatccacacctactatggccacggcaggagcttcaaaatctggctcaggtggccgaccccacctgctccgattgtgaagaactgtcttgccctaggaactggctcggcttcacacttctgacctcaggctattttggtacacatcctcctaagcctccaggaaagtgctctcacggcgggcactttgaccgatcaagctctcagcctcctagaggagggattaacaaggactcgacctcgcccggtttttccccacaccatatgcttcacctgcaggccgctaaattagcattactcgcgtccatccaggctttctccttgttgcgtagcagactcggcgatagagattttagtcgcctacttgacatcactcccgctagcagcctgagctttgtgctggatacaacaggaagtatgggtgaagagattaacgccgccaaaattcaggcccgtcatctagtcgagcagaggcgcggcagtcccatggaaccagttcactacgtacttgttccgttccacgatcctggattcggacccgtcttcactacatccgaccccgactcattttggcagcagttaaatgaaattcatgctctcggcggaggcgacgagcctgagatgtgcttgagcgctttacagctggccctacttcacacacctccactgtcggacatctttgtgtttactgacgctagccccaaggacgcttttcttactaatcaagtggaatctttaacccaggaacgtcggtgtagagtgacatttctcgtgaccgaggataccagtcgcgtgcaaggccgggcaaggcgagaaatcctatcccccctgcgcttcgagccatacaaagcggtcgccctagcctccggcggtgaggtcatctttacaaaagaccaacacatcagagatgtggccgcaattgtcggtgagtccatggcagctctggttaccctgcccctcgacccgcccgtggtcgttcctggccagcctctcgtgttctcagtggatggactgcttcagaagattaccgtgaggattcacggagatatatcctctttctggattaaaaaccctgcaggcgtgtctcagggacaggaagaaggaggtggcccactcggccatactcggcgatttggacaattttggatggtcacgatggacgacccccctcaaacaggcacttgggaaatacaagtcaccgccgaagacactcctggtgtacgagttcaggcccaaacttccctcgatttccttttccactttggtattcccatggaagacggcccacacccaggactttatcccttaactcaacctgttgctggcctgcagacccagttgttggtggaagtaactggccttggctctagggccaatccaggagatccacagccacacttttcacatgtgattcttagaggtgtccctgaaggcgcagaactcggccaggtacctctggagccagttgggccgccagagaggggcctgctcgcggcatcactgagtcctactcttctttctaccccccgaccattcagtctcgaactgatcggccaggacgccgctggacgccgcctgcatagagccgcacctcagcctagcactgtggttcccgtgttattggaactgtctgggccttcagggtttttggcccccggatccaaagtcccgctctcattaaggatcgcctctttctctggaccccaggacttagacctcagaacgttcgtgaatccaagcttcagtttaacaagtaatctctcccgtgcgcacttggaattgaatgagtctgcatggggccggctgtggcttgaagtacctgattcagctgcccccgacagcgtcgtcatggtgacagttactgccggcggtcgcgaagctaatccggtgccgccaactcatgcttttttgaggctgcttgtctccgctccagctccccaggatagacataccacaccaaccggctcctctgatcctattttgaccacagctactccagctttctcaccttttaccctggtgactcagggcagggcaggcgcaggcctcgctgctggaagtccctggtggggaaccgtcggcggagtgttactcctcctcggccttgcttcctggtag

SEQ ID NO: 218736 - DNA, 2676 bp, Artificial Sequence
  derived and/or modified sequence
atgctacccaccgaggtcccacagagtcatcctgggccgtctgcgctgctactgctgcaactcctgctaccccccaccagtgccttcttccctaacatatggtcattactggctgcaccgggatccataacacaccaggacctcacagaggaagccgcattgaacgttacattacaactattcctcgaacaaccccccccagggcgccctcctctccgacttgaagactttctgggcaggactcttctggccgacgatctctttgccgcttactttggccccggaagttcccgcaggttccgggcagctctcggggaagtatcaagagcgaacgccgcccaggatttcctccccacatcccgaaacgacccggacctgcactttgacgctgagcgactgggacagggccgtgcccgactggtcggcgctttgagggagaccgttgtagccgcacgggccctcgatcacacactggcacggcagaggttaggtgccgccttgcacgccctccaggatttttattctcattccaactgggtggaactcggtgaacaacagcctcacccacacctgctttggccccggcaagaactccaaaatctggcccaggtcgccgatcccacttgttctgactgtgaagaattaagctgtcctcgcaattggctcggctttaccctcctgacctctggctactttggcacccaccccccaaaacccccaggcaaatgttcacacggaggacactttgatcgatcttcatcccagccgccacgtggaggcattaataaagactccacttcacccggcttctcccctcaccacatgctacacttgcaagccgctaagttggcactcctcgcttccatccaggcattctccctgctgcggtctcgtttaggggatagagacttttctcggctgctagatattacacctgcatccagcttgtccttcgtcctcgataccacaggctcaatgggggaggaaatcaatgccgctaaaatacaagcccgccaccttgtcgagcaacgccgcggtagcccaatggaacccgtccattacgttctcgttccctttcatgaccccggttttggacccgttttcaccacctcagacccagatagtttctggcagcaattaaacgaaatccacgcactgggtgggggagatgaacctgagatgtgcctgtcagctctacagctggccctcctccacacacctccactatccgatatttttgtcttcacagacgcctcacccaaagatgcctttctgacaaaccaggtcgagagcttaacccaggagagaaggtgtcgcgtcacattcctggttaccgaggacacctccagagtgcagggccgtgcccgccgggagatcctctcaccactgcgatttgaaccctacaaagccgtggcactggcatcaggcggagaagtaatttttactaaagatcaacacatccgggatgtcgcagcaattgtgggtgaaagcatggcagcactggtcactttacctctcgatcctcccgttgtcgtgcccggccagcctctagttttcagtgttgacgggctcctgcagaagattactgtgagaatccatggggacatcagttctttctggataaaaaacccagctggagttagccagggccaggaagaaggaggaggcccacttggacacacacggagatttgggcaattctggatggtgaccatggacgaccctccgcaaaccggcacttgggagattcaagttactgcagaggatacaccaggcgtacgcgtccaagcccagacttccctcgacttcctgtttcattttggaattccaatggaagacggccctcatccaggactctatcccttgacacaacccgtggccggattacagacacaacttctggttgaggtgacaggcttgggcagcagagcgaaccccggagacccacaaccccatttttctcatgtcatccttaggggagttcccgaaggggcggagctgggacaggtgccgctggaaccggtgggccctcctgaaaggggactgttggcagcatccctgagtcccacacttctaagcactccaagaccattctcactggagctaatagggcaagacgcagcaggacgacgattgcatagagctgcgcctcaaccatctacagttgttcccgtgcttctcgaactgagtgggccttctggattcctcgcccccggttcaaaagtgcctctgagcctgcgtatagcttcattctccgggcctcaagaccttgacctcaggacattcgtcaatcccagctttagcttaacttccaacctctctcgcgcccacctggagttaaacgagagcgcctggggcagactgtggctggaagttccggacagcgctgctccggactctgtggtcatggtcaccgtcactgctgggggacgagaagccaatccagtgccccccactcatgcctttctgcggttactggtttcggcccctgcacctcaggaccgccacacaacacctaccggcagctccgaccccatcctcactaccgctacccccgctttcagtccatttactctcgtaacccagggccgagcaggtgccggtctagcggcaggatctccttggtggggcaccgtagggggcgttctattactgctgggcttagctagctggtag

SEQ ID NO: 218737 - DNA, 2676 bp, Artificial Sequence
  derived and/or modified sequence
atgctcccaacagaagttccccagtctcatcccggcccaagcgcgctgctgctcctgcaacttcttctgccacccacatcggctttcttccccaatatctggtccttgttggcagccccaggatctattacacatcaagaccttacggaagaggcagcactgaatgttacactgcaactgttccttgagcaaccccctcctggccggccacccctgagattagaggactttctcggccgcacgttgctcgccgatgacctcttcgccgcttatttcggccccggctcatcacgacggtttagggcagctctgggtgaagtttcaagggcaaatgctgctcaggactttctccctactagcaggaacgatccagatctacactttgatgctgaacggctgggtcagggtcgcgcacgtcttgtcggcgctttaagagagaccgttgtagctgcccgggcactggaccacacactcgctagacaaaggctgggggcagccctgcacgccctacaggacttttacagtcatagtaactgggtcgagttaggagagcagcaacctcaccctcatctgctttggcccagacaagaattacagaacctggcacaggtcgccgatccaacatgttcagattgcgaggaattgtcttgtcctcgaaactggctgggattcacgctactgacttccggatatttcggcacacatcctcctaaacccccaggcaagtgttcccatggaggccacttcgaccgctcaagctcccagccaccccgcgggggaataaacaaggatagcacaagccctgggttctcacctcatcacatgctgcatttacaggctgctaagttggcactgctggcatctatccaagctttctctctcctgcgctccagactgggcgaccgcgatttttcccggctgctggatatcaccccagcatcttcactaagcttcgtgctcgataccacaggctccatgggcgaagaaatcaatgcggcaaagatccaggcccgccatcttgttgaacagcggcgaggtagtcctatggaacccgttcattacgtactggtccctttccatgaccctggctttggccccgtgtttactacaagcgatccggattccttttggcagcagctgaacgagattcacgctctgggtggcggagatgaacccgaaatgtgcctaagtgccttacagctggccctactacacacccctcctctatccgatatttttgtcttcaccgacgccagtcccaaggacgctttcttaacaaatcaagtcgaatccctcactcaagagcgtagatgtcgggtgacctttctcgttacagaggataccagcagagtgcaaggccgagcccgccgagagatcttgagcccactgcgattcgaaccttacaaagctgtggccctcgcctctggaggcgaagtaatctttacaaaagatcagcacatccgcgacgtggctgccatcgtgggggagtccatggcagcgctggtcactttgccccttgatcctccagttgtagtgccgggccagccattggttttttctgtggatggtctcctgcaaaaaataacagtgcgcatccacggcgacatttcaagtttctggatcaaaaaccctgccggagtatcacagggtcaagaggaaggaggaggacctctgggacacacaagaagattcggtcagttctggatggtgactatggatgatcctccacaaaccggcacatgggagattcaggtgacggctgaggacacacccggagtcagggttcaagcacagacctctctcgatttcctttttcacttcggcatccccatggaagatggtccacatcccggcctttaccctttaacgcagcccgtggcgggtttgcagacacagctgctcgtagaggttacggggctcgggtccagagcaaatccaggagatccccaacctcatttttctcatgtgatcctgcgcggagtgcctgaaggtgccgaactgggtcaggtccctcttgagcccgttgggccacccgaacggggcttgttagccgcctctctgagccccacattgctgtctacaccccggcctttctccctggaactgatcgggcaggacgccgcagggcgtagactccaccgcgcagcccctcagccatccaccgtggtacctgtcctgttggaacttagcggcccatctggctttttggctccaggatcaaaagtacctctcagtctgaggattgcctcattcagcggcccccaagacctggacctcagaacctttgtgaacccaagcttctctttgacttctaacctctccagagctcacctggaattgaatgaatccgcttggggacgactttggcttgaagtgcctgattccgcagcccctgattccgtggttatggttacagtcacagctggaggccgcgaagccaaccccgttccccccactcatgcatttctgagactcctcgtcagcgcccccgccccgcaagatcggcataccacacctacaggctcatcagaccctattcttaccaccgctacacccgcattttcacccttcaccctggtgactcagggccgcgcgggcgcaggactggctgctggatcaccttggtggggaaccgtcggcggcgttctgttgttgctgggtctcgccagctggtag

SEQ ID NO: 218738 - DNA, 2559 bp, Artificial Sequence
  derived and/or modified sequence
atgctgccaacagaagtaccccaatctcaccccggaccatctgccttgctcttgcttcagctgcttcttcccccaacttctgctttctttcctaatatctggtccctgcttgcagcccccggaagcatcacccaccaagacctcactgaggaagcagcacttaacgtgacgttacagttgtttcttgaacagcctcccccaggcaggccacccctgcgactggaagactttctgggccggacccttctcgcagatgacctgtttgccgcttatttcggccccggttccagcagacgattcagagcagctttaggcgaggtgtctcgggccaacgctgcacaggacttccttccaacatccaggaacgaccccgatttgcatttcgatgccgaacgcctcgggcaagggagagctagacttgtcggtgccctgagagagacagtggttgccgctagggcccttgaccataccctcgctcggcagcgcttgggcgccgcactgcatgcactccaagacttctactctcactctaactgggtcgagttaggggaacagcaaccccaccctcatctgttgtggccacgccaggagttacaaaatttagctcaggtggccgatcctacatgtagcgattgcgaggagctgtcctgccctagaaactggcttggcttcaccctcctaacctccgggtatttcggcacccacccccccaaacccccaggcaaatgttctcatggtgggcacttcgatcggagttcatcccagcctcccaggggcggcataaataaagactctacttcgcccggcttttcaccgcaccacatgttacatctgcaggcagcaaaattggcattgttagcaagcatacaggctttttctctacttaggtcccgactgggggacagggattttagtagattactcgacatcacgcctgcctcttccctcagttttgtccttgatacgactggaagcatgggcgaagaaatcaacgcggccaaaattcaagccagacatctcgttgaacagcggcgcgggtcccccatggaaccggtgcactatgtcctcgtgccgtttcacgaccccgggtttggcccagtgtttactaccagcgaccccgattccttttggcagcaattaaatgagatacatgcattgggaggcggcgatgagccagaaatgtgcctatcagctctacaacttgctctcctccacaccccccccctcagcgacatctttgtttttacagacgcctctccaaaagacgcgttcctgaccaaccaagtcgaatcccttacccaagaaagacgctgtcgagttaccttcctcgtgaccgaggacaccagccgtgttcaaggaagagcccgccgcgaaatcctgtccccactcaggtttgagccctataaggcggtggcactcgcaagcggtggggaggtgatttttacaaaggatcaacacattagggatgttgctgccattgtaggcgagtctatggccgcactcgttactctcccgttggatcctccagtagtcgtaccaggtcagcctctcgttttcagtgtggacgggctgctgcaaaaaatcacggtgcgaatccatggagatatcagcagcttttggatcaaaaatcctgcaggcgtgtcacaagggcaggaagaagggggtggacctctcggacatacacgccggttcgggcaattttggatggtgacaatggacgaccccccccagactgggacatgggaaattcaggtcactgcagaagatacacccggcgttcgcgtacaagcccaaacatctctggatttcctcttccacttcggaatccctatggaggatggcccacaccccggactatatcccttaactcagcccgtggcaggacttcagactcagctcctcgtggaggtaactgggctcgggtcacgcgcgaaccccggtgacccacaacctcacttttctcacgtaatcctgcgtggagtccccgaaggagccgagctcggccaggtgcccttagagccagtgggacctcctgagcgcggactccttgcagcctcactgtcccctaccctgttaagtacccctcgacctttctcactggagttgatcggccaggatgctgccggtaggcgactccaccgcgctgctcctcaaccatctacggtcgtccctgtcttacttgagctgtcaggaccctctggttttctcgcccccgggagcaaggtccctttaagtctgaggattgccagtttctccggtccacaagatctcgatctcagaaccttcgtcaacccatccttctctcttacatccaacctcagcagagcacatttggaattgaatgagagtgcgtggggcagactttggcttgaagtgcctgattcggctgcgccggatagcgtagtcatggttacggtgacagctggaggaagagaagctaatcccgtcccacctacccatgcatttttgagattactcgtgagcgcccctgctcctcaagttcgcaaccactactttccatctcagggtcccgcccaccacccatacaggctcatttag

SEQ ID NO: 218739 - DNA, 2559 bp, Artificial Sequence
  derived and/or modified sequence
atgctgcctacagaagtcccacagtcacacccaggaccttctgctctacttttgcttcagttactcctcccacccacatccgcctttttccccaatatttggtccctgctagcagcccccggatcaatcacacaccaggacctcactgaggaggcagcccttaatgttacactgcaattgttcttagagcaaccaccgcccgggagaccgcctttacggctcgaagacttcctgggccgcacgctactagctgatgaccttttcgctgcatacttcggaccaggcagttcaagacggttcagggcagccctaggagaggtgagtcgggcaaacgcggcccaagactttctgcccacttcaagaaatgatcccgaccttcacttcgacgcggagaggctcggtcagggtagagcaagactcgtaggagcactcagagagacagttgtagccgcacgtgctctggaccacacactggctagacaacgactgggtgcggccttgcacgctctgcaggatttttatagccactcgaactgggtcgagctcggtgagcaacagccccatccccatctgttatggccgcgacaggagctgcaaaacctagcccaagttgcggaccccacgtgtagcgactgtgaagaactgtcctgtcctcgaaactggttaggattcacactgcttacgagcggctatttcggcacccatccccccaaacccccaggaaaatgctcccacggtgggcacttcgataggtcaagcagccagcctccacgtggtgggatcaacaaggatagcacttctcccggcttcagtccacatcatatgctccatttacaggcagccaaacttgccctcctggcctctattcaagcgttctccctgctgaggagcagactcggtgacagggactttagccggctactggacattaccccagcctcctccctcagtttcgttttggatactacaggctcaatgggcgaagagattaacgccgcgaagattcaagcccgccacctggttgaacaacgcagaggcagtccgatggagcctgtgcattacgttcttgtcccattccacgacccaggcttcggtcctgtttttactacctccgaccctgactccttctggcaacagctgaacgaaatacacgccctcggggggggtgatgaacctgagatgtgcctctccgccttacaactggcactactgcatacaccccccctttcagatattttcgtgttcactgacgccagcccaaaggatgccttcttgaccaatcaggtagagagtttgacccaggagaggagatgtcgggtgacgttcctggtgaccgaggatacttccagagtccaaggacgcgcccgcagggagatactgtcaccgctaagattcgaaccttacaaggctgtagccctggcaagtggaggagaggtgatatttactaaagaccagcatattagagatgtggctgccatcgtaggtgagtctatggccgccctggttacactgcccctcgaccccccagttgtggtgcccggacaacctctagttttttcagtcgatggcctgcttcagaagattaccgtacgcatccatggtgatatcagctccttctggataaaaaaccccgccggggttagccagggccaggaagagggaggaggccctctcggacatactagaagatttggccagttctggatggtcactatggatgaccccccacagaccggaacctgggagatccaggttacagcagaagacacacccggcgtccgagtgcaggcccaaacctcattggattttctctttcacttcgggattcccatggaagatggaccccacccaggactgtaccctctgacccaaccagtagccggccttcagactcaactgttggtggaggtgaccggcctcggcagcagagccaaccccggagacccccaaccgcattttagccatgttatcttgagaggggttcccgagggagctgaactgggccaggtccctttagagcccgttggaccccctgaacgaggattgctggctgccagcctctccccaaccctactctccacccccaggcctttttctcttgagctcattggacaagatgccgccggaagaagactgcatcgcgcggctcctcaaccctccacagtagtgccagttctgttagaactctcaggcccatcaggctttctagcccccggttccaaagtgcctttatcattacgcattgcatccttttcaggacctcaggacttagacctgagaacctttgtcaatccgtctttctccctcaccagcaacttgagccgtgcacacttggagctgaatgaatcagcatggggacggctgtggctagaggtgcccgattctgccgcccccgactccgttgtgatggtcaccgtgactgccggcggaagggaagccaatccagtgccccccacccacgcgttcctgcgcttgcttgtttctgccccagctccccaagttcgtaaccactatttccccagccagggccctgcacatcatccatataggctgatctag

SEQ ID NO: 218740 - DNA, 2559 bp, Artificial Sequence
  derived and/or modified sequence
atgttgcccactgaggttccccaatcacacccaggacctagtgccctccttctgttacaattgctactgcccccaacctccgccttctttcccaacatttggtccctgctagcagctccgggaagcataacacaccaggatttgacagaggaagcagcccttaacgtgacactgcagctttttttggaacagcccccccctggtagaccgcctctgagacttgaagatttcctgggccgcactctactcgcggacgacctctttgccgcttattttggacctggatcatcgcgaagattcagagccgccctgggcgaagtgagcagagccaatgccgcccaggacttcctgccaacttctagaaacgatccagacctccactttgatgcagaaagattaggccaaggtagagcccggctggtaggagccttaagagagaccgtggtcgcagccagggccttggaccacacccttgcacgccagaggcttggagctgccctacatgctctgcaggatttttactcacattcaaactgggttgaacttggggagcagcagcctcacccccatcttttatggcccagacaagaactccaaaaccttgcccaggtggccgaccccacctgtagtgattgtgaagaactttcatgcccaaggaattggctaggcttcacactgcttacatcaggatattttgggacccatcctccaaaaccccccggtaagtgcagccacggcggacactttgatcgatccagcagtcagcctccacgaggcggaatcaataaggactcaacttcccccggcttcagcccacaccacatgctgcatctccaagctgccaaacttgccctgctggcgtcaatccaagcctttagtctactccggtcccggcttggtgaccgcgactttagcaggttacttgatattaccccagccagctctcttagcttcgtcctggacaccaccggaagcatgggcgaggaaatcaacgccgctaagattcaggccaggcacctcgtagagcagagaagaggtagccctatggaacccgtccactatgtccttgtcccgtttcatgaccccggatttgggcctgtattcaccacaagcgacccagactctttctggcaacaattaaatgaaattcacgccttgggcggtggagatgaacctgagatgtgtctttccgctctgcagctcgcactcctccacacaccccctctttctgatatctttgtgttcaccgatgcttcgcccaaggatgcatttctcacgaatcaggtcgaatcactaacccaagagcggaggtgtagggtgaccttccttgtgaccgaggacacatcacgggtgcagggtcgggccagacgggaaatactgagcccacttagattcgagccttacaaagctgtcgcacttgcctcgggtggggaggttatcttcactaaagaccagcacatccgagatgtcgccgcaattgtaggagaatccatggcagccctggtgactttacccttagatcctcccgttgtggtccccggccaacctctggtattttcggtagatggcctgctgcagaagataacggtgcgtatccacggtgatatctctagtttctggataaaaaacccggcgggagtttcccagggccaggaggaaggcggtggcccccttggacatacgcggcgatttggacagttctggatggtaacaatggacgaccccccacagacaggcacatgggagattcaggtaacagcggaagacacgccaggcgttagggttcaagcacaaacaagtctcgattttttattccatttcggtatacctatggaggacgggcctcacccaggcttgtatcctcttacccagcccgttgccggcctgcagactcagctattagtggaagtcaccggtctcggctctcgagccaacccaggagacccacagccacacttttcgcacgtcattcttcggggggtgcctgagggggcagagctgggtcaggtaccgttagaaccggtcggcccaccggagaggggcctcttagctgcctccctgagtccaaccctactttctacccctagaccctttagtttagagttgataggtcaagacgcggccggtcgacgattgcatagggctgccccacaaccctcaaccgtggtccccgtgcttctagagctttccggcccctccgggtttcttgccccaggaagcaaagtccctttatccctgcggatcgcgtcattttctggtccacaagacctcgacctgcgaaccttcgtgaatccttcatttagcctcaccagtaacttgtctagagcccatttggaacttaatgagtccgcatggggtcgcctatggttagaggtgccagactccgccgcccccgattcggtggtaatggttaccgtgactgcaggaggaagggaagctaatcctgttccccccactcacgcctttttacgtcttctagtaagcgctccagcccctcaagttaggaaccactactttccaagccaaggaccggcgcatcacccctataggttaatctag

SEQ ID NO: 218741 - DNA, 2559 bp, Artificial Sequence
  derived and/or modified sequence
atgttgccaactgaagtaccacagtcacatccaggaccctccgccctgctcctcctccagctgttactccctcccacaagtgcgttttttcctaatatttggtccctacttgccgctccaggcagtatcacacatcaagacctgactgaagaggccgccctaaatgtcacactgcaactgtttctggaacagccaccccccgggaggccccccctgaggctggaagactttttgggacgaacccttctcgccgatgacttgttcgctgcctacttcggacctggctcctcgagaaggtttagagccgcccttggggaagtttctcgggctaacgccgctcaggacttcctgccaaccagtagaaacgatcctgatctgcatttcgatgccgagcgactgggacaagggagagcacggctcgtcggcgctttgagagagactgtcgtggctgctagagccttagatcacactcttgcgagacagcgtctgggcgcggctttgcatgcattacaagatttttatagccactccaattgggtagagctcggagagcaacagccgcatcctcatctcctttggccacgtcaagaacttcaaaacttggcccaggttgctgacccgacttgctccgattgcgaagaactgagttgccccagaaattggctaggctttacattgcttaccagtggctactttgggacccacccgcccaaaccaccaggaaagtgctcccatggcggacatttcgatcgctccagctcccagcctcccagaggtggcataaacaaggactccacatcacctgggttcagtccacaccacatgctccacctgcaagccgcaaagcttgcgttgttagcaagtattcaagcatttagccttctaaggtctagacttggcgacagagacttctcgagactattagatatcactccagccagcagcctctccttcgtgcttgatactaccggctctatgggcgaggaaattaacgctgcaaaaatccaggctcgtcatcttgtggagcagcgcagaggaagtcccatggagcccgttcactacgtcctggtgcccttccacgatcccggctttggccctgtattcaccacatcggacccagattccttttggcagcaactcaatgaaattcacgccttgggagggggggatgaacctgagatgtgtctttccgctttgcagctggctcttttacacaccccaccattatcagacatattcgtgttcactgatgccagccctaaagatgctttcctgaccaaccaggtggaaagtctgacccaggagaggaggtgccgagtcacctttctggtaactgaagacaccagtcgcgtacaaggccgggctagaagagaaatcctctctccattacgctttgagccctataaagccgtagccctcgcaagtggtggcgaagttatatttaccaaggatcaacatatccgtgacgttgccgcaatcgtgggcgagtccatggcagccctagtaaccctcccactagacccacctgtcgtcgttcccggccagcccctggtattctccgtggacggactgttgcagaaaattacagttaggattcatggcgatattagtagtttttggattaaaaacccagcaggcgtgtcccaaggacaagaagaaggaggaggtccgcttggacacacgaggcgattcggccagttctggatggttaccatggatgatccgccccagaccggcacctgggagattcaggtcacagccgaagacaccccaggcgtgagagtccaggcgcaaacatccctggacttcctattccattttggcattcctatggaagatggacctcaccccgggttgtatccacttacacagccagttgccggcctccaaacacaattactagtagaagtcactggtctcggttcacgcgctaaccctggcgatcctcagcctcacttctcccatgttatcctccgaggggtcccagaaggggccgaactggggcaggtcccactggagcctgttggaccacccgaacggggtctgctggccgcgtcgctgagccccacactgctttcaacacctagacctttctccctcgaactcatcgggcaggatgcagccggcagacgcttgcatagggctgcccctcagcccagtaccgtcgtccctgttttactagaattgtccgggccttctggcttcctcgcccctggatctaaagttcctctgtcccttagaatcgccagttttagcggtcctcaggacctcgacctccgcacatttgtgaacccttctttctccctgacatccaacctctctcgggcccatcttgaacttaatgagtcagcatggggtcgactatggctcgaggtgccagattccgccgcaccagacagcgttgtaatggtaacagtcaccgctggcggcagagaagccaatccagttcccccgacccatgcatttctaaggctgttagtctcagctccggcaccccaggtaaggaatcactactttccgtctcagggccccgcacatcacccctataggctaatttag

SEQ ID NO: 218742 - DNA, 2559 bp, Artificial Sequence
  derived and/or modified sequence
atgctgcccaccgaggtgccccagagccaccccggccccagcgccctgctgctgctgcagctgctgctgccccccaccagcgccttcttccccaacatctggagcctgctggccgcccccggcagcatcacccaccaggacctgaccgaggaggccgccctgaacgtgaccctgcagctgttcctggagcagcccccccccggcagaccccccctgagactggaggacttcctgggcagaaccctgctggccgacgacctgttcgccgcctacttcggccccggcagcagcagaagattcagagccgccctgggcgaggtgagcagagccaacgccgcccaggacttcctgcccaccagcagaaacgaccccgacctgcacttcgacgccgagagactgggccagggcagagccagactggtgggcgccctgagagagaccgtggtggccgccagagccctggaccacaccctggccagacagagactgggcgccgccctgcacgccctgcaggacttctacagccacagcaactgggtggagctgggcgagcagcagccccacccccacctgctgtggcccagacaggagctgcagaacctggcccaggtggccgaccccacctgcagcgactgcgaggagctgagctgccccagaaactggctgggcttcaccctgctgaccagcggctacttcggcacccacccccccaagccccccggcaagtgcagccacggcggccacttcgacagaagcagcagccagccccccagaggcggcatcaacaaggacagcaccagccccggcttcagcccccaccacatgctgcacctgcaggccgccaagctggccctgctggccagcatccaggccttcagcctgctgagaagcagactgggcgacagagacttcagcagactgctggacatcacccccgccagcagcctgagcttcgtgctggacaccaccggcagcatgggcgaggagatcaacgccgccaagatccaggccagacacctggtggagcagagaagaggcagccccatggagcccgtgcactacgtgctggtgcccttccacgaccccggcttcggccccgtgttcaccaccagcgaccccgacagcttctggcagcagctgaacgagatccacgccctgggcggcggcgacgagcccgagatgtgcctgagcgccctgcagctggccctgctgcacaccccccccctgagcgacatcttcgtgttcaccgacgccagccccaaggacgccttcctgaccaaccaggtggagagcctgacccaggagagaagatgcagagtgaccttcctggtgaccgaggacaccagcagagtgcagggcagagccagaagagagatcctgagccccctgagattcgagccctacaaggccgtggccctggccagcggcggcgaggtgatcttcaccaaggaccagcacatcagagacgtggccgccatcgtgggcgagagcatggccgccctggtgaccctgcccctggacccccccgtggtggtgcccggccagcccctggtgttcagcgtggacggcctgctgcagaagatcaccgtgagaatccacggcgacatcagcagcttctggatcaagaaccccgccggcgtgagccagggccaggaggagggcggcggccccctgggccacaccagaagattcggccagttctggatggtgaccatggacgaccccccccagaccggcacctgggagatccaggtgaccgccgaggacacccccggcgtgagagtgcaggcccagaccagcctggacttcctgttccacttcggcatccccatggaggacggcccccaccccggcctgtaccccctgacccagcccgtggccggcctgcagacccagctgctggtggaggtgaccggcctgggcagcagagccaaccccggcgacccccagccccacttcagccacgtgatcctgagaggcgtgcccgagggcgccgagctgggccaggtgcccctggagcccgtgggcccccccgagagaggcctgctggccgccagcctgagccccaccctgctgagcacccccagacccttcagcctggagctgatcggccaggacgccgccggcagaagactgcacagagccgccccccagcccagcaccgtggtgcccgtgctgctggagctgagcggccccagcggcttcctggcccccggcagcaaggtgcccctgagcctgagaatcgccagcttcagcggcccccaggacctggacctgagaaccttcgtgaaccccagcttcagcctgaccagcaacctgagcagagcccacctggagctgaacgagagcgcctggggcagactgtggctggaggtgcccgacagcgccgcccccgacagcgtggtgatggtgaccgtgaccgccggcggcagagaggccaaccccgtgccccccacccacgccttcctgagactgctggtgagcgcccccgccccccaggtgagaaaccactacttccccagccagggccccgcccaccacccctacagactgatctag

SEQ ID NO: 218743 - DNA, 2676 bp, Artificial Sequence
  derived and/or modified sequence
atgctgcccaccgaggtgccccagagccaccccggccccagcgccctgctgctgctgcagctgctgctgccccccaccagcgccttcttccccaacatctggagcctgctggccgcccccggcagcatcacccaccaggacctgaccgaggaggccgccctgaacgtgaccctgcagctgttcctggagcagcccccccccggcagaccccccctgagactggaggacttcctgggcagaaccctgctggccgacgacctgttcgccgcctacttcggccccggcagcagcagaagattcagagccgccctgggcgaggtgagcagagccaacgccgcccaggacttcctgcccaccagcagaaacgaccccgacctgcacttcgacgccgagagactgggccagggcagagccagactggtgggcgccctgagagagaccgtggtggccgccagagccctggaccacaccctggccagacagagactgggcgccgccctgcacgccctgcaggacttctacagccacagcaactgggtggagctgggcgagcagcagccccacccccacctgctgtggcccagacaggagctgcagaacctggcccaggtggccgaccccacctgcagcgactgcgaggagctgagctgccccagaaactggctgggcttcaccctgctgaccagcggctacttcggcacccacccccccaagccccccggcaagtgcagccacggcggccacttcgacagaagcagcagccagccccccagaggcggcatcaacaaggacagcaccagccccggcttcagcccccaccacatgctgcacctgcaggccgccaagctggccctgctggccagcatccaggccttcagcctgctgagaagcagactgggcgacagagacttcagcagactgctggacatcacccccgccagcagcctgagcttcgtgctggacaccaccggcagcatgggcgaggagatcaacgccgccaagatccaggccagacacctggtggagcagagaagaggcagccccatggagcccgtgcactacgtgctggtgcccttccacgaccccggcttcggccccgtgttcaccaccagcgaccccgacagcttctggcagcagctgaacgagatccacgccctgggcggcggcgacgagcccgagatgtgcctgagcgccctgcagctggccctgctgcacaccccccccctgagcgacatcttcgtgttcaccgacgccagccccaaggacgccttcctgaccaaccaggtggagagcctgacccaggagagaagatgcagagtgaccttcctggtgaccgaggacaccagcagagtgcagggcagagccagaagagagatcctgagccccctgagattcgagccctacaaggccgtggccctggccagcggcggcgaggtgatcttcaccaaggaccagcacatcagagacgtggccgccatcgtgggcgagagcatggccgccctggtgaccctgcccctggacccccccgtggtggtgcccggccagcccctggtgttcagcgtggacggcctgctgcagaagatcaccgtgagaatccacggcgacatcagcagcttctggatcaagaaccccgccggcgtgagccagggccaggaggagggcggcggccccctgggccacaccagaagattcggccagttctggatggtgaccatggacgaccccccccagaccggcacctgggagatccaggtgaccgccgaggacacccccggcgtgagagtgcaggcccagaccagcctggacttcctgttccacttcggcatccccatggaggacggcccccaccccggcctgtaccccctgacccagcccgtggccggcctgcagacccagctgctggtggaggtgaccggcctgggcagcagagccaaccccggcgacccccagccccacttcagccacgtgatcctgagaggcgtgcccgagggcgccgagctgggccaggtgcccctggagcccgtgggcccccccgagagaggcctgctggccgccagcctgagccccaccctgctgagcacccccagacccttcagcctggagctgatcggccaggacgccgccggcagaagactgcacagagccgccccccagcccagcaccgtggtgcccgtgctgctggagctgagcggccccagcggcttcctggcccccggcagcaaggtgcccctgagcctgagaatcgccagcttcagcggcccccaggacctggacctgagaaccttcgtgaaccccagcttcagcctgaccagcaacctgagcagagcccacctggagctgaacgagagcgcctggggcagactgtggctggaggtgcccgacagcgccgcccccgacagcgtggtgatggtgaccgtgaccgccggcggcagagaggccaaccccgtgccccccacccacgccttcctgagactgctggtgagcgcccccgccccccaggacagacacaccacccccaccggcagcagcgaccccatcctgaccaccgccacccccgccttcagccccttcaccctggtgacccagggcagagccggcgccggcctggccgccggcagcccctggtggggcaccgtgggcggcgtgctgctgctgctgggcctggccagctggtag

SEQ ID NO: 218744 - DNA, 2559 bp, Artificial Sequence
  derived and/or modified sequence
atgctccccactgaagtgccccagtctcacccaggtccatcagccttgctcctgctccagcttctgctgccgccaacatccgccttctttccaaatatttggagcctgctagccgctcctgggtcaattacccatcaggacctgacagaggaggctgcactgaatgtgacactgcagctatttctggagcagcctcctccggggcgaccccctctgagactggaagactttctgggccgcacactgcttgctgatgatttgtttgccgcttactttggaccaggctctagtcgaaggtttagagcagctctgggcgaagtgtcccgcgccaatgcagctcaggactttttgcctacctccagaaatgaccccgacctacacttcgacgcagaacggctcgggcaagggcgcgcacgcctggtaggggcgcttcgtgagacagtggtggccgctcgcgcactggatcacacgttagctcgccagcgccttggggccgctttgcatgcgttgcaggacttctacagccactcaaactgggtggaactgggggaacagcagcctcatcctcacctcctgtggcctcgacaggaattacagaacctagcgcaagtcgctgaccctacctgcagcgattgtgaggagctcagctgtccgcgtaattggctgggtttcacattgctgacctctgggtattttggaactcaccctccaaagcctcctggcaaatgttcccatggaggccactttgaccgatcaagctcccagcctcctcgcggcggaataaacaaggattccacgtcaccaggcttctccccccaccatatgctacacctgcaggctgctaagctcgcactcctcgctagtatccaggcttttagcctgctgcgctcgaggctcggcgatcgggactttagtcgtctcctggacattacacccgcctctagtctttcttttgtcctggataccactggctccatgggagaagagatcaacgccgccaagatccaggcacggcacttggtggaacagcgccggggctctcctatggagcctgtgcattatgtgctcgtacccttccatgatcctgggtttggacccgtgttcaccacatctgaccccgattcattctggcaacagctcaacgagatccacgccctgggtggaggcgatgaacctgaaatgtgcctctctgctctgcaactggcacttctgcatacacctcccctctctgatatattcgtgtttactgatgcctctccaaaggacgctttccttacaaatcaggtggagtccttgactcaggagcggcgctgtagggtcacatttttggtgacagaggatacaagccgcgtgcaaggaagagctaggcgagagatcctgagccccttgagattcgaaccttataaagctgtggccctcgcctcaggcggagaagtgatttttaccaaagaccaacatatccgcgacgtggcggccattgtgggagagagcatggccgccctagtaaccctgccgctagatccacctgtagtcgtgccaggccaacctttggtgttctctgttgacgggctgctgcagaaaatcacagttagaattcacggcgacatttcttctttttggatcaaaaaccctgcaggggtttcacagggtcaggaggaaggtggtggacccctgggtcacacacgtcgtttcggccaattttggatggtgactatggacgatcctccgcagactggaacctgggaaatccaagtgacagccgaggacaccccaggcgtgagagtccaggctcagacaagcctggatttcctttttcacttcgggattcctatggaggacggtcctcatcctgggctttatccgctgactcagcctgtggcagggctacagacccaattacttgtcgaggttacgggcctgggctccagggccaaccccggggacccacagccacacttcagccacgtgatcctaagaggggttcccgagggggcagagttgggacaggtcccgctggaacctgtgggcccacccgagcgcgggctcttagcagcaagccttagccccactcttctgtctacaccccggccatttagcttggagctcatagggcaggacgcagccggccgcagactgcacagagccgctcctcaaccatcgacggtagtgcccgttctcttggagctttcaggccctagtgggtttctggctcccggttcaaaagtgccactttctcttcgtattgctagtttcagcggcccgcaggatctcgacctccggacgtttgtaaatcccagcttctcactgacaagtaatctatcccgggcccacctggagctaaatgaatccgcttggggtaggttgtggctggaggtgcccgatagtgccgcgcctgattcagttgtcatggttactgtcactgccggaggcagagaagcaaaccctgtgccacctacacacgctttccttaggttgctggtgtccgcccccgccccacaagtgaggaatcattactttccctcccagggccccgctcatcacccctataggctgatctag

SEQ ID NO: 218745 - DNA, 2676 bp, Artificial Sequence
  derived and/or modified sequence
atgctgccaacagaagtgccccagagtcaccccggcccaagcgccctcctccttctgcagttgcttctgcctcccacctccgccttcttccccaatatctggtctctactggcagcccccggatccattacacaccaagaccttacagaggaggcagccctcaatgtcaccttgcagctgtttcttgaacaaccccctccaggaagacctcccctgcgtctcgaagactttctaggacggaccctactggctgatgatctgttcgccgcctattttggccccggcagctctaggagattccgtgctgctctgggagaggtgagcagggctaacgccgcgcaggattttctccccacatctcgcaatgatcccgatctccattttgacgccgaaaggcttggacaaggccgcgcccgattggttggagccttgcgagaaacggtggtagccgcacgggctttagatcacacactggcacgccagagattgggtgccgccttacacgccttacaggacttctactcacatagcaattgggttgagctcggcgagcaacaaccccacccgcaccttctgtggccccggcaggaattacaaaacctcgcccaggtcgcggacccgacctgttccgattgcgaggagctgtcgtgtccccgaaactggttgggatttactctccttaccagcggctattttgggacccatccccctaaacctccagggaaatgttcgcacgggggacactttgatcgcagcagctcccaaccacctcgaggggggattaataaggacagcacctcacccggattcagccctcatcacatgctgcacttgcaggccgccaaacttgccctccttgcctcaatccaagccttctcgttactcaggtcaagactcggcgaccgagattttagccggctgttggacattacacccgctagctctctgtctttcgtgctcgatactactggaagcatgggggaggagatcaacgcagctaaaattcaggccaggcatttggtagaacaacgtagggggtcgccaatggaacctgtgcactacgtgctggttccgttccacgatcccggattcgggccggtgtttaccacctcagatcccgacagtttctggcagcagctgaatgagattcacgcactgggtggcggagacgagccagaaatgtgccttagtgctttgcaactggccttgctccacaccccacctctgtcggacatcttcgtgttcacagatgcaagtcctaaagatgcatttctgaccaaccaagttgaatcactgacccaggagaggcgttgccgggtaaccttcctagtgaccgaggacacctctcgagtgcaggggcgagcccgacgcgagattctgtctccgctgcgtttcgagccatacaaggccgtggccttagctagcggtggtgaggtaattttcactaaagaccagcatatacgagacgtggccgccatagtgggcgaaagtatggccgccctcgtcactctcccgctcgacccccctgttgtcgtccctggccaaccccttgtattctccgtcgacggcctcttacagaagatcactgttcgcatccacggtgatatctccagcttttggatcaagaaccccgcgggggtgtctcaaggccaggaagagggaggcggccccctgggccacactagacggtttgggcagttttggatggtaaccatggatgatccacctcagacaggcacctgggagatccaagtgaccgcggaggatacccccggggtacgtgttcaggctcagacgtctttggattttcttttccacttcggaattccaatggaagacggcccacaccccggtctgtatcctctaacgcaacctgttgcgggcctccagacacagctgttagttgaagtaaccggactgggctctagggccaatccaggggatcctcagccacacttctcacacgtcatcctaagaggcgttcccgaaggggctgagctcgggcaggtgccacttgaaccagtgggccctccagagcgggggcttttggcagcctcactttcccccacattgctgtctactccccggcccttctccctcgagctgatcggtcaagatgctgctggccgacggctccaccgcgccgccccacaaccttccacggtcgtccctgtcctgctcgagctctccgggccctctgggttcctggcccccgggagcaaggtaccactttccttgagaattgcaagtttctccgggcctcaagaccttgacctcaggacgtttgtgaatccatcgttcagccttacttctaatcttagccgcgctcacttggagcttaatgagtccgcatgggggaggctatggctcgaggttcctgacagcgccgcccccgatagcgtagtcatggtgacagttaccgctggcgggagggaagcaaatcccgtccctcccacccatgcatttctgcgtctgctggtttccgcaccagcaccacaagataggcacacaacacccaccgggtcgtccgaccccatactcacaaccgcaacccctgccttttctccgttcacattggtgacacagggacgggccggcgctgggctagctgcagggagcccctggtggggcaccgtgggtggagttctgctcctgctgggactggcatcctggtag

SEQ ID NO: 218746 - DNA, 2676 bp, Artificial Sequence
  derived and/or modified sequence
atgttacccacagaagtgccccagtcccacccaggaccatcagcccttttgctcttgcagctgctcctccctcccacgtccgctttcttcccaaatatttggtcactactggccgcccctgggagcatcactcatcaagatttgaccgaggaggctgctttaaacgtgactttgcagcttttcctcgagcagcccccaccaggtagacctccccttcggttagaggactttctggggcggacgttgctggctgacgacttatttgcggcttacttcggacctggtagttctagacgattcagggctgcactgggggaggtgtctagggccaacgcagcacaagacttcttgcctactagtcgaaacgatcccgacctgcactttgacgctgagcggctgggccaggggcgcgcaagactcgttggcgcactgcgtgaaacagttgtggcagcacgggctctggaccacactctggcaagacagcgtctgggtgccgctctgcatgccctgcaagatttttattctcactcgaactgggtcgaactgggggaacagcaaccacatcctcacctgctctggcccagacaggagcttcagaacctcgctcaggtggccgatccaacgtgttctgactgtgaagagctgtcttgtccgcgtaattggcttgggtttacactgctgacctccggatactttggcacccaccctccaaagcctcccggaaagtgctctcatggcggccacttcgatcggtcgtcaagccagccccctagaggaggcataaacaaggattcaacatcaccaggtttctcccctcaccacatgctgcaccttcaagccgcgaaacttgccctgctcgcctctattcaggctttctcgcttttacgaagccgacttggcgatagagactttagcaggctgctcgacatcacccctgcctcaagtctctcttttgtgttagatactaccgggtccatgggggaggagattaatgcagcgaagatccaggcacgacacctggtcgagcagaggcgtgggagccctatggagcctgttcattacgtcttagtcccctttcacgaccccggcttcggtccagtgttcactacctctgaccctgacagcttttggcagcagctgaatgagattcacgctctagggggtggcgacgaaccggaaatgtgcctctcagcccttcagcttgccctgctgcacacacctccgctctcagacatctttgtgtttacagatgctagtccaaaggatgccttcttgacaaaccaagttgaatctctgacccaagagagacggtgccgggtgacattcctggtcactgaagacacttcccgagttcaggggagggcaagacgagaaattcttagtcccctgcgctttgagccatacaaagccgtcgctctggcctctggaggcgaagtcatcttcacaaaggatcagcatattcgcgacgttgccgcaatcgttggggagagtatggccgctctcgtgaccttgccactcgatccccccgttgttgtgccgggacagccgctggtgtttagcgtcgatggcctcctacaaaaaatcaccgtgcgcattcacggggatattagcagcttttggattaagaatcccgcaggcgtcagccagggccaggaagagggaggaggccctctcggccatactcgcagattcggccagttctggatggtcacgatggacgaccctccgcagactggtacctgggaaatacaagtcacggctgaggacactccgggcgtaagagtgcaggctcagacaagcctcgacttcctgttccatttcggcattcccatggaggacggtccccacccaggattgtaccccctgacgcagcctgtggccggccttcaaacacagctgctcgtcgaagttaccggattaggttcgcgggccaatcccggagaccctcaaccgcattttagccatgtgattctaagaggggtgccagaaggggccgaactggggcaggtgccccttgaacccgtgggcccacccgagcgggggttattggccgcttccctgtcacctactctgctctcaacaccaaggcccttctcactcgaactgatcggccaggacgctgcaggaaggcggctgcaccgggcggcacctcagccatccacggtggtgccggttttgttggagctaagcgggccctcaggattcctggcccccgggagcaaggtgcctttatccctgcgaatcgctagctttagcgggccacaggacctcgacctacgcacttttgtgaatccatctttctctctgacttccaacttatcccgtgctcacttagagttaaatgaatccgcttggggacgtttatggctagaagtaccggacagtgccgccccggattctgtggtcatggtgacagtgactgctggcggcagagaagctaatcccgtcccacctacgcacgcctttttgcgccttctcgttagcgcccccgcgccccaagatcggcacaccacacctactggatcgtccgatcctatcctgaccaccgccacaccagccttcagcccgtttacactggttacacagggacgagctggtgccggcctggccgcgggttccccttggtggggtacagtgggcggggtcttgctcctcctgggtctggcctcttggtag

SEQ ID NO: 218747 - DNA, 2676 bp, Artificial Sequence
  derived and/or modified sequence
atgctccccactgaggtgcctcagtctcatcccgggccttccgctctcctgttgctgcagctcctcctcccccctacctcagcattcttccctaacatctggagcctactggccgccccaggcagcattacacaccaggatttaacagaggaggctgccctgaacgttactctccagctatttctcgaacagccgccgcctggccggcccccgctgaggctggaagatttcttgggtcgcacgctactggccgatgatctattcgccgcctactttggccccggctctagccgacgcttccgcgcagccctgggcgaggtgtcgcgcgctaatgcagcccaagactttttgcccacctcccgcaacgacccagacctacacttcgatgctgaacggttagggcaagggagagcacgcctggtgggcgcccttagagaaacagttgtagctgcacgagcgctagatcacactcttgcccgacagagactaggcgcggccctgcatgccttgcaggatttctactcccatagcaactgggtggagctgggggagcagcaaccccacccacacctgttatggcccagacaggagctccaaaatctggcccaggttgctgacccaacttgcagcgactgcgaggagctttcttgcccccggaactggctggggttcaccctgttgactagtggctatttcggcacacaccctcctaagccaccagggaagtgttcccatggtggccactttgatcgatctagctcacagccacctcgtggagggatcaacaaagacagtacttcacctggcttttcaccccaccacatgctccatctgcaggccgccaaactggctctgctggccagtatccaggcattctcccttttacggtccaggctgggtgacagggacttcagtcggttactcgacatcactcctgccagcagtctaagctttgtgctggacaccacagggtccatgggtgaggaaattaacgccgccaaaatccaggccaggcatctggtggagcaacgccgtggatccccaatggaacctgtgcactatgtcctagttcccttccatgatcccgggttcggacccgtgttcactacttccgacccagacagcttctggcagcaattgaatgagattcacgcgcttggaggaggcgacgaaccagaaatgtgcttgtctgctcttcaattagctctgctccatactccacctttgtcagacattttcgtgttcacagacgcctcacccaaagatgcgttcctgacaaatcaggttgagagtctgacccaagaacggaggtgtagggtgacctttctcgtgactgaggatacctcccgcgtgcagggcagggcaaggcgtgaaattctgagtcctctgcggttcgagccctacaaggctgtagctctggcttcaggcggtgaggtgatattcaccaaggaccagcatattcgggacgtggccgccattgtcggggaatccatggctgccctggtgacgttaccgttggatccacccgtggtggtaccaggccagcctctcgtatttagcgtcgatggattgctgcaaaagatcacggtgcgtattcatggagacatatcctccttttggattaagaacccagccggcgtgtctcagggacaagaggagggggggggacccctgggccataccagaagatttggtcagttctggatggttaccatggacgatccgccccagactgggacctgggagatccaagtgacagctgaggacacaccgggtgtgcgcgtgcaggctcagacatcactagactttctattccactttggaatccctatggaagacggcccccatccgggcctatatcccttgacccaacccgtggccgggcttcagactcaattgctcgtggaagtcactggcctgggttcacgcgcgaacccaggcgatccccaaccacatttttcccatgtgatactgaggggggtccccgagggggcggagcttggtcaggtcccgctggagccagtgggaccccctgagcgcggactgctagccgcctccctgtcgccaacattactgagcactcccagacccttctctctggagctgattggccaggatgcggctggccgcagattgcaccgcgctgctccccagcctagcactgtcgtccctgtcttgctcgagttgagcggtccatctggctttctggccccaggaagcaaagttcccttgtccctgagaatcgcctccttttcaggcccacaggacctggatctccggacttttgtaaatcctagcttttcccttacctccaatttaagccgggctcacctcgagttgaacgaatctgcctggggacgcttatggctggaggtgcccgacagcgcagcccccgacagcgtagtgatggtaacagtcactgcaggtgggcgggaagccaatcctgtgccaccaacacatgcctttttgagactcctggttagcgcccccgcaccacaagaccgccacactactccaacagggtcgtccgacccgattctgactacagccactcccgccttcagtcccttcaccctggtcacacagggccgcgccggagccgggcttgcggctggatcaccctggtggggtacagtgggcggcgttttactcctgcttggactagcgtcttggtag

SEQ ID NO: 218748 - DNA, 2676 bp, Artificial Sequence
  derived and/or modified sequence
atgctgcccactgaagtccctcagtcccatcccggacctagtgccctcttgctgctgcagctcctgctgcccccaacatcagctttcttccctaatatctggtcattactggctgcacctggttccatcacccatcaggacttgacagaggaggcggcccttaacgtgaccctccaactattccttgagcagcccccccctggacggcctcctctacgactcgaggactttctcggacggaccctgctggccgacgacctctttgccgcctattttggaccaggaagtagccgaaggtttcgggcagctcttggagaagtgagccgcgctaacgcagctcaggacttcttgcccacgtcacggaacgaccctgacctgcacttcgatgctgaacgtctgggccaggggcgggctaggctggtgggggcactgcgggaaaccgtcgtggccgcacgggctctagaccacactctggcccggcaacgattgggagccgcactgcacgcccttcaggatttttacagtcattccaattgggtcgaactaggagaacagcagccacacccacacctcttgtggccacggcaggaattacaaaacctggcacaagttgcagacccgacatgtagtgactgcgaagaacttagttgtccccggaattggctaggtttcacccttttaacaagtggctacttcggcacacaccccccaaagcccccaggaaagtgtagccatgggggccatttcgatcgctcctcatcccagccccctcggggaggtataaacaaggatagcactagcccgggcttctctccacatcatatgttacacctccaggctgctaaactggccctgctggcatccatccaggcctttagcctgctcaggtctcggctgggcgatagggactttagcaggctgctggacatcactcccgccagttcgctctctttcgtgttagatacgactggttctatgggggaagagattaatgctgcaaaaatccaggcacgtcatttagtggagcagaggagaggatcccctatggaacccgtgcattatgtccttgttcctttccatgatcccggcttcggaccagtctttacaacttctgatccagattcattctggcaacagctgaatgagatccacgccttagggggaggagacgaaccggagatgtgcctctcagctctacagctggccctccttcacacgccgccactgagtgacatcttcgtctttactgacgcttcgcctaaggacgcatttcttactaaccaagtagagtctttgacccaggaaagacggtgcagagtcacctttctggttactgaagacacttccagagtccaaggccgggccagacgcgagatcctgagtccccttcgcttcgagccttacaaggctgtggctctcgcttccggtggagaagtgatctttaccaaggaccagcatattagagatgttgctgcaattgtgggggagtcaatggctgctttggtcacattaccgctggacccccctgtggtggtccctggccaaccactggtgttctcagtggacggactgctccagaaaataactgtgaggattcatggcgacatctccagcttctggatcaagaatcctgcgggagtctcccagggacaggaggaagggggcggacccctcggccatactaggagatttgggcaattttggatggtgacaatggacgacccaccccaaacaggcacttgggagatccaagtcaccgcggaggacacaccaggagtccgcgtgcaggcccaaacatccctggacttcttgttccatttcgggattccaatggaggacggacctcatccagggctctaccccttgacccagccggtggccggactccagacgcaactgctggtggaggttaccggcctggggtcccgcgccaaccctggcgatccccaaccacatttttcccacgttatcctaaggggcgtgccagagggggctgagcttggccaggtgcccctggagcccgtaggtcctcccgagcgtggccttcttgctgccagcctgagtccaaccctcctaagtacaccccgacccttcagtctcgaacttattggccaagacgccgcaggtagacgcctgcacagagctgcgcctcagccctctacagtggtgccggtgctgttggagctcagcggtcccagtggattcttggcccccggatcaaaggttccattgtccctccggatcgcgtcttttagcggcccccaagacttggacttgcgaacgtttgtgaacccgtccttcagtctgacctcgaacctgtctagggcgcatctggagctgaatgagagtgcctgggggcggctctggttggaggtgcccgacagcgcagccccggacagcgtggtgatggtcacagtgaccgccggcggccgagaagccaatcctgtgccccccacccacgccttcttgaggttattggtgagtgcccctgctccacaggatcgtcacactacacccactggctcctccgaccccattcttaccaccgctacaccggcttttagccctttcaccctggtcacccagggcagggcaggcgccggtttagccgccgggtccccatggtggggtacggttggcggagtgctacttttactcggcctcgcttcatggtag

SEQ ID NO: 218749 - DNA, 2676 bp, Artificial Sequence
  derived and/or modified sequence
atgctgcccactgaagtgccacaaagccacccgggcccatctgcgctgttgctgctgcaattgctgctgccccccacatccgctttctttcctaacatctggagcctgctggccgctccaggcagtataacacatcaggatctgaccgaggaggcagctctaaatgtgacactgcaattgttcttggagcaaccaccacccggcaggccccctctccgcttagaggatttcctcggccgtaccctgctggctgacgaccttttcgccgcctacttcggacccgggagttcaagacggtttagagcagctctgggggaggtgtctcgcgcaaacgccgcccaggattttttaccgacatcaaggaacgatcctgacctacattttgatgctgagcgcctgggccaggggcgggcgcgactagtgggtgcactgcgcgagaccgtcgttgcagctagggccttagaccacactctcgcaagacagagactgggagccgccttgcacgccctacaagatttctactcacatagcaactgggtggagctaggtgaacagcagccgcaccctcacctgctgtggcctcgccaggagctgcagaatttagcgcaggtggctgatcccacatgctccgattgtgaggagctgagctgtccacgcaactggctcggattcacgctactcacatctggttactttgggacccaccccccaaagccgcctggcaaatgttctcacggcggacatttcgatcgaagctcaagccagccacctcgcgggggaattaataaggattctacatcccccggcttttccccgcatcacatgctgcatttgcaagctgcaaaactggccctcctggctagcattcaggctttctcgctgctaaggtcacgcttgggcgatcgggacttttctagactgttagacatcacacccgcctcttccttgagcttcgtgctggatacaaccggtagcatgggcgaagaaattaacgctgccaaaatacaggccaggcatttagtggagcagcgtagagggtctcccatggaaccggtccattacgtgctggtgccctttcacgatcctgggtttgggcccgtgttcactacatccgaccctgactccttttggcagcagctaaatgagatccacgcgctcgggggaggcgacgagcctgagatgtgtctttctgctctgcagctggcactgctgcacacaccacccctcagcgatatatttgtgtttaccgatgcatcccctaaagacgcgtttctaactaatcaggttgaatctcttacccaagagagaaggtgcagagtcacttttctcgtcacggaggatacgagtagggtgcagggcagggcccgtcgggagatcctgtctccccttcgcttcgagccttacaaggctgtcgctttggccagtggtggcgaggtgattttcacaaaagaccagcatatccgggacgtggcagctatcgttggcgagtcgatggcagcgttggtgactttgcccctcgaccctcccgttgtggtgcccgggcagccactggtgttttccgtggatggcctattacagaagataacggttcgtattcacggggacattagctcattctggataaaaaacccagccggtgtgtctcagggccaagaagagggagggggccccctgggccatacgagaaggtttggccagttctggatggtgactatggatgacccgcctcagaccggaacatgggagatccaagttacagccgaagataccccaggcgtgcgtgtgcaggcccagacaagtttggatttcctgtttcatttcggcatcccaatggaggacgggccacatcccggtctttaccccctcactcagcccgtggccggtttacagactcagctgctggtcgaagtgacggggctcggaagcagagcaaacccaggggatccccagccccatttcagccacgtgatcctgcgcggagttcccgaaggagcggagcttgggcaggttcctctcgagccagtaggccctccggaacgtggcttgcttgcggctagcttatcaccaaccctgctgagcactccgcggcccttttcactcgagctcatcggacaggatgcagcgggcagacggctgcatagagccgccccccaaccttccaccgtggtgccagtgcttctggagctgtcggggccctccggattcttggccccgggcagcaaagtgcctctgtccctgcgtatcgcctccttttctggccctcaggacctagacctccgaacttttgttaatccatcattcagcctgacgtcaaacctgtcgcgggcgcacttagagctgaacgagtctgcttggggacgcttgtggttggaagtgcctgactcagctgcccccgacagtgttgtaatggttactgttaccgctgggggtagggaagctaacccagtgcctcctacacacgctttcctgaggctccttgtcagcgcacctgccccacaggatcgacacacaacgcccacaggaagctccgatccaatcttaacaaccgctaccccagccttttcaccgttcaccttggtgacccagggtagggcaggagccgggctggccgcagggagtccttggtggggcacagtgggtggcgttctgttactgttgggcctggcttcatggtag

SEQ ID NO: 218750 - DNA, 2559 bp, Artificial Sequence
  derived and/or modified sequence
atgctgcccactgaggtgccacaatcacacccgggtccttcagcactgctgttgctacagcttctcctgccgcctacttctgctttcttccctaatatctggtccctgctcgctgctcctggttctattactcatcaggacctgactgaggaggctgcattgaacgtcaccttacagctcttcctggaacagcctccgccaggacgaccacctctgaggttagaggattttctgggccggactttactagcggacgatctgttcgccgcctacttcggcccaggatcctccaggcggtttcgggctgctctgggggaagtctccagagcgaacgctgcacaggacttcttgcccacttcacgcaatgatcccgacctgcacttcgacgcagaaaggctcggccagggcagagcgaggctcgtgggagcactcagagaaactgtggtggccgcccgggcactagaccataccctggctcgccagaggcttggcgctgcactccatgccctccaggatttctacagccacagcaattgggtggaattgggcgagcagcagccacacccacatctcctctggccccgacaggagcttcagaacttagctcaggtagctgaccctacgtgctcagattgtgaggagctgtcatgtccccgcaattggctgggcttcaccctgctaaccagcggctatttcggaacccatccaccaaagccccccggtaaatgctcccacggagggcacttcgatagatcctcatcccagccccctcgtggtggtatcaacaaggattccacctctcctggattcagtccccatcacatgttacacctccaggccgccaagttagcactcctggcctctattcaggctttttctttactgaggtctagacttggcgatcgggatttttctagactcctggatattactccagccagttcactcagctttgtgctggatacaacagggtcgatgggcgaggagataaacgcagccaaaattcaagcaagacacctggtggaacagcgccgcggatccccgatggaaccagtacactatgtactggtgcctttccacgaccctgggttcgggcccgtgttcacgacttctgaccctgattccttttggcagcagctcaatgagattcatgctctgggcggcggagacgagcccgaaatgtgtttaagtgccctacagctggcacttctacacacaccgccactaagcgatattttcgtgtttactgacgccagtcccaaagacgccttcttgaccaaccaggtggagtctctcacccaggagcgccgatgcagggtcacattccttgtgaccgaggatacttctagagtgcagggccgcgccagacgggagattctgagtcctctgcgctttgaaccatataaagctgtggcactggcttcggggggggaggtgatcttcactaaagatcagcacatcagagatgtcgctgctatagtgggggagtccatggcagcactcgttactttacccctggacccccctgtggttgttccaggccaacccctcgtgtttagtgtcgatggattgttgcagaagatcaccgtgcgcatacacggcgacatctcttcgttttggataaaaaaccctgccggagtctcacaaggccaagaggaaggtggcggcccccttgggcatactcgccgctttggacagttttggatggtgacaatggatgacccaccacagacaggcacatgggaaattcaggtgacggctgaggacactccaggagtgcgtgttcaagcgcagaccagtttggactttctgttccactttgggatccctatggaagacggtccgcaccccggcttgtatccgcttactcaacccgtggccgggctgcagacccagttactggtagaggtgacggggcttggatctagagccaaccctggcgatccacagccccatttcagtcacgttattttgcgaggcgtccccgagggagctgagctgggtcaggtgcctttggaaccagtgggcccacctgaaagaggccttctcgctgcctcgttgtctccaacgctgctttccaccccccggcctttctctctagagctgatcgggcaggacgccgccggacggaggttgcaccgagccgcccctcagccgtctacggtggtcccagtacttctggagctaagcggcccctcaggcttcctcgcccctgggagcaaggttccactttccctgcgaattgcatcgttttccggcccgcaggatctcgatctgaggacattcgttaatccttccttcagcttaacttcaaacctgagtagggcccatctggaactgaacgagagtgcatgggggcggctgtggctggaagttcccgacagtgcagctcccgatagtgtggtgatggtgacagtaaccgccggcggacgcgaagcgaaccctgtgcctccaacacacgcatttctgcggcttctcgtgtcggcccctgccccccaggtcagaaatcactactttccatcgcaggggccagcccaccacccctacagactgatttag

SEQ ID NO: 218751 - DNA, 2559 bp, Artificial Sequence
  derived and/or modified sequence
atgctcccgacagaggtcccccagtcgcaccccggtccttccgctctgctgctgctgcaacttctcctgcctcccacctctgctttcttccccaatatttggtcactgctggctgcacctggaagtattacacaccaggacctcaccgaggaggctgccctgaatgtgactctgcagctatttctggagcagcccccacccggcaggccacccctgagactggaggacttcctcggaaggactttattagccgacgacctctttgctgcttatttcggtccaggttcatcgcgtcggtttagggccgcattaggggaggtcagtagggctaatgccgcacaggactttctgccgacctccagaaacgatccagaccttcactttgacgcagagcgcttggggcagggtagagcccgtctggtgggggcccttcgagaaaccgtcgtcgcggcccgcgccctcgaccatactctggcccgccagagactgggagcagctctgcacgcactgcaggacttttactcccactcaaattgggtggagttaggcgaacagcagcctcacccacatcttctgtggccacgtcaggagctccagaacctagcccaagtggccgacccaacctgcagcgactgcgaggagctttcctgcccaaggaactggttaggcttcactttgttgactagtggctacttcggtacgcacccgccgaagccccctggaaagtgctcacacggcggacatttcgatcggtcgagctcccagccccctcgcgggggtattaataaagattccaccagcccgggctttagtccccaccacatgctgcaccttcaagctgcaaagctggccctgctggcctctatccaggcctttagcctgctaaggtcgcgcctgggtgaccgcgacttttctaggctattagacatcacacccgccagtagcctgagctttgtcctcgacactacagggagcatgggcgaggaaattaatgccgccaagatacaagcacggcacctggtggaacagaggaggggctccccaatggagccggtgcattatgtactggtgccattccacgatccgggatttggtcccgtgtttacaacgtcagatcctgactctttctggcagcagctcaacgagattcacgccctgggtggaggagatgaaccggaaatgtgtctctctgctttgcaactcgctttgctccatacaccacctctgtccgacatcttcgtttttacagacgcttcacccaaggacgcattcctgacaaatcaggtggagagccttacacaggaaagacgctgccgcgtgaccttcctggtcacggaggacactagtcgggtacagggtcgagctaggagagagatactatctcctctacggtttgaaccctataaagctgtggccttggcgtccggaggtgaggtgatctttaccaaggaccagcatatccgcgatgtggcagcaattgtgggtgagagtatggctgcccttgtcaccctgccattggatccccccgtagttgtccccggacagcctttggtgttttccgtcgacggcctcctgcagaagattaccgttagaatacatggggacatctccagcttttggatcaaaaatccggcaggcgtttcccagggccaagaagagggcgggggtccacttggacacaccagacggttcgggcagttctggatggtgacgatggatgatccccctcagacagggacctgggagattcaggtgactgctgaggacacccccggcgtccgtgttcaggctcagacgtccttagacttcctgttccactttggcatccccatggaggatggccctcaccccgggctgtatccgctcacacagccggttgctgggctgcaaacccagcttctcgtcgaggtcacaggattaggctcacgggcaaatccaggcgatccgcagccccacttttcccacgtgatactccgcggtgtgcctgaaggagctgaattaggtcaggtacctcttgaacctgtagggcctcccgaaaggggactgttagccgccagcctctctccaactctcctttccactccccgcccattttccctcgagctaatcggacaggacgccgccggcagacgcctccatagagccgccccacagccctcaacagtggtgccggtgttgttagaacttagtggcccttctgggtttctggcgcctggtagtaaggttcccttgagcctcaggatcgcctcatttagtggacctcaggatctagatcttaggacctttgttaacccttccttctcattgacctcaaacctcagtcgggcccaccttgagctgaatgagtccgcgtggggcagactctggctggaggtgccggactcagccgctccagactcagtagtaatggtgaccgtgaccgcaggtggccgcgaagcaaaccctgtgcccccaacacatgcctttctcaggctattagtgtcagcacccgcgccccaggtgagaaaccactacttcccctcccagggacctgctcatcatccttacagactcatatag

SEQ ID NO: 218752 - DNA, 2559 bp, Artificial Sequence
  derived and/or modified sequence
atgctgcccactgaagtgcctcaatcgcatcctggaccaagcgctcttttgcttctgcagctgctccttcctcctacatccgccttttttcccaatatttggagcttgctggccgctcccggaagcattacacaccaagacctcaccgaggaagcagcgcttaacgtaacgctacagctgtttctggaacaacccccccccggccgacctcccctgcggctcgaagactttcttggtcgaaccctgctggcggatgaccttttcgccgcctacttcggaccagggtcgagtaggcgcttcagggcggcactgggagaggtttcaagagccaacgcagctcaggattttttaccaacttcaaggaacgatcctgatctgcatttcgatgctgagaggcttggtcaagggcgggcgcgcttagtgggtgccctgagagaaactgtggtggccgccagagctctagatcacaccttagcccggcaacgactaggcgccgcgctccacgctctgcaggacttttacagccactccaactgggtggagctcggcgagcagcagcctcacccccacctgctctggccccgacaggagttgcagaatctggcccaggtggcagaccccacttgtagtgactgcgaagagctctcctgcccccgtaactggctgggtttcactcttttaacaagcgggtacttcggtactcatcctcctaagccacccggaaagtgttcccacggagggcactttgacaggagttcaagtcagcctcctcgcggcggtattaataaagactcaaccagtccaggcttctcaccccatcatatgctacatctccaggctgccaaactggccctgctagctagcattcaggcattcagcctgctgagatcaagacttggagatcgggacttctctcggctgctggatattacacctgcctcctcactgtcatttgtcctggataccactgggtctatgggggaggaaattaatgcagccaagatccaggcaagacacttagttgaacagcggagagggagtccaatggaacctgtgcattacgtacttgttccatttcacgatcctgggttcgggcccgtgtttaccacttcagatcctgattcgttttggcaacagcttaatgagatccatgccctaggcggaggggatgagcctgaaatgtgcctcagtgctttgcagttagctctgttgcacaccccccccttatcagatatctttgtgtttacagacgcctcccctaaggacgctttcctgaccaaccaggttgagagtctcacccaagaaagaagatgccgggtgacatttcttgtgaccgaagatacaagccgcgtacaggggagggcaaggcgcgagattctaagcccccttaggttcgagccttacaaagcagtagcactcgccagcggtggcgaggtcattttcaccaaagatcagcatattagggacgtcgccgccattgttggggagagcatggcggctctggtgactctgcctctggatccaccagtggttgtccctggtcagccactcgtgttctccgtggacggcttgcttcagaagatcactgtgcggatccacggcgatatttcctccttctggatcaagaatccggcgggggtatctcagggacaagaggaaggcgggggcccactggggcacaccagaaggtttggtcagttttggatggtgacgatggacgatcctccacagactggaacatgggagatccaggtaaccgcagaggataccccaggagttcgagttcaggcacagacatctctggattttctcttccatttcggtatcccgatggaagacggtcctcaccctggactttatcctcttacacaaccagttgccggcctacagacccagctcttagtcgaagtaacgggactggggtcacgcgccaatcctggtgacccgcagcctcatttcagccacgtcattctccggggcgtccctgaaggagctgaattaggacaggttcctctggagccagttggccccccggaaagggggctgctcgcagcatcactttccccaacattgctgagtacaccccggccattttctctggagctcatcggacaagatgccgcaggaagaagactgcatagagccgcaccccagccatctacagttgtgccagtgcttctcgaattatccggcccttccggtttcttagcccctgggagtaaggtgccgctgtctctgcggatagcatcattcagcggtccacaggacctcgaccttaggacgtttgtgaatccctcattcagcttaacaagcaacctgtccagagcccatttagagctgaatgaatcagcttgggggaggctgtggctggaggtccctgactcagcggcacccgattccgttgttatggtcactgtgacagcaggaggaagggaagcgaatcccgtgcctcctacccatgcatttctgcgattactggtaagtgccccagccccccaggtccggaatcattacttcccgagtcaggggcccgcacatcatccttataggttgatttag

SEQ ID NO: 218753 - DNA, 2559 bp, Artificial Sequence
  derived and/or modified sequence
atgctccctacagaggtcccccagtcccacccaggcccatctgctctcctgctcctacagttgcttctgcccccaacatcagccttctttcctaacatctggagccttcttgctgcaccaggatctatcacacatcaagacttgacagaagaggcagccctgaacgtcaccctgcagctgttcctggagcagccccccccaggccgaccacccctgagacttgaggactttctcggtcgcactttactggccgacgacctgttcgctgcttacttcggccccgggtcatctcgtaggtttcgagccgccctgggggaggtaagtagagcaaacgcagcacaagacttcctgcccacgtctcggaacgatcctgacctgcatttcgacgcggaacggctcggacaggggcgagcccggttagtgggggccttacgagagaccgttgtagcagcccgagctctggatcatacattggcccgccagcgcctcggtgccgccttacatgcactgcaggacttctactctcattccaattgggtagagctgggcgagcagcagccccacccccatcttctgtggccgcggcaggagttgcagaatttggctcaagtcgccgaccccacttgttcggactgcgaggaattatcttgtcccaggaactggcttggtttcactctcttaactagcggatatttcggaactcaccctccaaaaccccccggtaaatgttcacacggcgggcacttcgacaggtcttcctcacagcccccacgcggaggaatcaacaaggactctacttctcccgggtttagcccccaccacatgctccacctgcaagcggccaaattggcactgctggccagtatccaagcgttttctctgcttaggagccgtctgggtgatagggacttttccaggcttttggatatcaccccagcgagctccctgagttttgttctcgatactaccgggagtatgggggaagaaattaatgccgcaaaaattcaggcgcgccatcttgtcgagcagcgtcgtggatcgcccatggagcctgttcactatgttctggtgcctttccacgatccagggttcggcccagtgttcacgacatctgatcctgattctttctggcagcaactgaacgaaatccacgctcttggcggaggagatgagcccgagatgtgtctgagcgccctgcagctcgcccttctgcatactccccccttgtcagatatctttgtgtttactgacgcatcaccgaaagatgccttcctgactaaccaggtcgaaagtctgactcaagaaagaaggtgcagggttacctttctggttactgaagatacctccagagtgcaaggcagagccaggagggagatattgtcacctctgagattcgagccctacaaagccgtagctcttgcctctggcggggaagtcatcttcactaaggatcagcacatacgagatgtcgcagctattgtgggtgagtctatggcggcactggttacactgccattagatcctccagtggtggtgcctggccagcctttggtgttctccgttgatgggcttctacagaaaatcactgttagaattcatggtgatatatctagcttttggattaagaaccccgccggcgtgtcccaaggccaggaggagggcggcggccctctgggacacacgagaaggtttggacagttttggatggtgacaatggatgaccccccccagactgggacgtgggagatccaagtgaccgccgaggacacacctggggtgcgggttcaggcacagacttcactggacttcttgttccattttggcattcccatggaagatggccctcacccaggcctatatcccctgacgcagccggtcgccggcctacagacccagctgcttgttgaagtgaccggactcggcagccgtgcgaatccgggagacccccaaccgcacttctctcatgtcatcttgcggggagtgccagagggggctgagctagggcaggtcccactggagcctgtggggcccccagaaagaggacttttggccgcctccctgtctcccacgctgctgtcgacgcctagacccttctctcttgagctgatcggacaagacgcggcgggacgccgccttcaccgggctgcccctcagcctagcactgtagtgccggtcctgttggagctgagtggcccgtccggcttcctcgcacccggatctaaggtccctctgagccttcgtattgcgtcctttagcggcccgcaagacctcgatctgcgaaccttcgtaaacccctccttctcgctcacatccaaccttagtagggcccacctcgaactgaatgaatcagcctggggccggctgtggttagaagttcctgacagcgcggcacccgattccgtggtaatggtgactgtcactgccggaggccgcgaagcgaaccccgtgccaccaactcatgcgtttctccgtctgttagtgagtgctccggccccccaggtgaggaaccactattttccctctcaaggtccagctcaccacccttatcgccttatttag

SEQ ID NO: 218754 - DNA, 2559 bp, Artificial Sequence
  derived and/or modified sequence
atgctgcccacagaggtgccccagagccaccctggccccagcgccctgctgctgctgcagctgctgctgccccccaccagcgccttcttccccaacatctggagcctgctggccgcccctggcagcatcacccaccaggacctgacagaggaggccgccctgaatgtgaccctgcagctgttcctggagcagcccccacctggccggccccccctgcggctggaggacttcctgggccgcaccctgctggctgatgacctgtttgctgcctacttcggccctggcagcagccgccgcttccgggccgccctgggggaggtgtcccgggccaatgctgcccaggacttcctgcccaccagcagaaatgaccctgacctgcactttgatgctgagcggctgggccagggccgggcccggctggtgggcgccctgcgggagaccgtggtggccgcccgggccctggaccacaccctggcccggcagaggctgggcgccgccctgcacgccctgcaggacttctacagccacagcaactgggtggagctgggggagcagcagccccacccccacctgctgtggccccggcaggagctgcagaacctggcccaggtggccgaccccacctgcagcgactgtgaggagctgagctgccccaggaactggctgggcttcaccctgctgaccagcggctacttcggcacccacccccccaagcccccaggcaagtgcagccatggaggccactttgacaggagcagcagccagcccccccggggcggcatcaacaaggacagcaccagccctggcttcagcccccaccacatgctgcacctgcaggccgccaagctggccctgctggccagcatccaggccttcagcctgctgcggagccggctgggggaccgggacttcagccggctgctggacatcaccccagccagcagcctgagctttgtgctggacaccaccggctccatgggagaggagatcaatgctgccaagatccaggcccggcacctggtggagcagaggcggggcagccccatggagcctgtgcactacgtgctggtgcccttccatgaccccggcttcggccctgtgttcaccaccagtgaccctgacagcttctggcagcagctgaatgagatccacgccctgggcggcggagatgagcctgagatgtgcctgagcgccctgcagctggccctgctgcacaccccacccctgagtgacatctttgtgttcacagatgccagccccaaggatgccttcctgaccaaccaggtggagagcctgacccaggagcggcgctgccgggtgaccttcctggtgacagaggacaccagccgggtgcagggccgggcccggcgggagatcctgagccccctgcgctttgagccctacaaggctgtggccctggccagcggcggggaggtgatcttcaccaaggaccagcacatcagagatgtggccgccatcgtgggggagagcatggccgccctggtgaccctgcccctggacccccctgtggtggtgcccggccagcccctggtgttttctgtggatggcctgctgcagaagatcaccgtgcgcatccatggagacatcagcagcttctggatcaagaacccagctggggtgtcccagggccaggaggagggcggcggccccctgggccacacccggcgcttcggccagttctggatggtgaccatggatgatcctccccagacaggcacctgggagatccaggtgacagctgaggacaccccaggagtgcgggtgcaggcccagaccagcctggacttcctgttccacttcggcatccccatggaggatggcccccaccctggcctgtaccccctgacccagcctgtggccggcctgcagacccagctgctggtggaggtgacaggcctgggcagccgggccaaccctggggacccccagccccacttcagccacgtgatcctgcggggcgtgcctgagggcgctgagctgggccaggtgcccctggagcctgtgggccccccagagcggggcctgctggccgccagcctgagccccaccctgctgagcaccccccggcccttcagcctggagctgattggccaggatgctgctggccggcggctgcacagagctgccccccagcccagcacagtggtgcctgtgctgctggagctgagcggccccagcggcttcctggcccctggcagcaaggtgcccctgagcctgcgcatcgccagcttcagcggcccccaggacctggacctgcggacctttgtgaaccccagcttcagcctgaccagcaacctgagccgggcccacctggagctgaatgaaagtgcctggggccgcctgtggctggaggtgcctgattctgctgccccagacagcgtggtgatggtgacagtgacagctgggggccgggaggccaaccctgtgccccccacccacgccttcctgcggctgctggtgtctgccccagccccccaggtgaggaaccactacttccccagccagggccctgcccaccacccctaccgcctcatctag

SEQ ID NO: 218755 - DNA, 2676 bp, Artificial Sequence
  derived and/or modified sequence
atgctgcccacagaggtgccccagagccaccctggccccagcgccctgctgctgctgcagctgctgctgccccccaccagcgccttcttccccaacatctggagcctgctggccgcccctggcagcatcacccaccaggacctgacagaggaggccgccctgaatgtgaccctgcagctgttcctggagcagcccccacctggccggccccccctgcggctggaggacttcctgggccgcaccctgctggctgatgacctgtttgctgcctacttcggccctggcagcagccgccgcttccgggccgccctgggggaggtgtcccgggccaatgctgcccaggacttcctgcccaccagcagaaatgaccctgacctgcactttgatgctgagcggctgggccagggccgggcccggctggtgggcgccctgcgggagaccgtggtggccgcccgggccctggaccacaccctggcccggcagaggctgggcgccgccctgcacgccctgcaggacttctacagccacagcaactgggtggagctgggggagcagcagccccacccccacctgctgtggccccggcaggagctgcagaacctggcccaggtggccgaccccacctgcagcgactgtgaggagctgagctgccccaggaactggctgggcttcaccctgctgaccagcggctacttcggcacccacccccccaagcccccaggcaagtgcagccatggaggccactttgacaggagcagcagccagcccccccggggcggcatcaacaaggacagcaccagccctggcttcagcccccaccacatgctgcacctgcaggccgccaagctggccctgctggccagcatccaggccttcagcctgctgcggagccggctgggggaccgggacttcagccggctgctggacatcaccccagccagcagcctgagctttgtgctggacaccaccggctccatgggagaggagatcaatgctgccaagatccaggcccggcacctggtggagcagaggcggggcagccccatggagcctgtgcactacgtgctggtgcccttccatgaccccggcttcggccctgtgttcaccaccagtgaccctgacagcttctggcagcagctgaatgagatccacgccctgggcggcggagatgagcctgagatgtgcctgagcgccctgcagctggccctgctgcacaccccacccctgagtgacatctttgtgttcacagatgccagccccaaggatgccttcctgaccaaccaggtggagagcctgacccaggagcggcgctgccgggtgaccttcctggtgacagaggacaccagccgggtgcagggccgggcccggcgggagatcctgagccccctgcgctttgagccctacaaggctgtggccctggccagcggcggggaggtgatcttcaccaaggaccagcacatcagagatgtggccgccatcgtgggggagagcatggccgccctggtgaccctgcccctggacccccctgtggtggtgcccggccagcccctggtgttttctgtggatggcctgctgcagaagatcaccgtgcgcatccatggagacatcagcagcttctggatcaagaacccagctggggtgtcccagggccaggaggagggcggcggccccctgggccacacccggcgcttcggccagttctggatggtgaccatggatgatcctccccagacaggcacctgggagatccaggtgacagctgaggacaccccaggagtgcgggtgcaggcccagaccagcctggacttcctgttccacttcggcatccccatggaggatggcccccaccctggcctgtaccccctgacccagcctgtggccggcctgcagacccagctgctggtggaggtgacaggcctgggcagccgggccaaccctggggacccccagccccacttcagccacgtgatcctgcggggcgtgcctgagggcgctgagctgggccaggtgcccctggagcctgtgggccccccagagcggggcctgctggccgccagcctgagccccaccctgctgagcaccccccggcccttcagcctggagctgattggccaggatgctgctggccggcggctgcacagagctgccccccagcccagcacagtggtgcctgtgctgctggagctgagcggccccagcggcttcctggcccctggcagcaaggtgcccctgagcctgcgcatcgccagcttcagcggcccccaggacctggacctgcggacctttgtgaaccccagcttcagcctgaccagcaacctgagccgggcccacctggagctgaatgaaagtgcctggggccgcctgtggctggaggtgcctgattctgctgccccagacagcgtggtgatggtgacagtgacagctgggggccgggaggccaaccctgtgccccccacccacgccttcctgcggctgctggtgtctgccccagccccccaggacagacacaccacccccaccggcagcagtgaccccatcctgaccacagccaccccagccttcagccccttcaccctggtgacccagggccgggccggggccggcctggccgccggcagcccctggtggggcaccgtgggcggcgtgctgctgctgctgggcctggcctcctggtag

SEQ ID NO: 218756 - DNA, 2942 bp, Artificial Sequence
  derived and/or modified sequence
ctcactcacctccgcactgcagccaagggaggcccgccctggcgtgggctgctgcctgtggctttgggcaggcaggagcgaaagggccaggggttgcctgtcctcccccaccctgttgaggccttcctccccctctgctgagcctcggttaattataactctgacctaagtgccctgtgacgtcaagcccgggccagccctgcccaggagacccagcaaccaggtccatgtctcagccatgctccccacggaggtcccccaatcccacccgggcccctcagcgttgcttctgctgcagctgttgctgccccccacatctgccttcttccccaacatctggagcctgctggctgcccctggctccatcacccaccaagacctaactgaggaggcagcgctcaacgtcaccctgcagctcttcctggagcagccacccccaggccgcccccctcttcgtcttgaggacttcctgggtcgaacactccttgctgatgacctctttgccgcctactttggacctggttcttctcggcggttccgagcagccttaggtgaggtgtctcgtgccaatgcagcccaggacttcctgccaacttccaggaatgaccccgacctgcactttgatgctgagcgactgggtcagggacgcgcgcgcctggtaggggctctgcgggagaccgtggtggcagccagggcccttgaccacaccctggctcgccagcgcctcggggctgcacttcatgccctgcaggatttctacagtcatagcaactgggtggagctgggcgagcagcagccacaccctcacctcctctggccaaggcaggagctccagaacctggcacaagtggccgatcctacctgctccgattgcgaggagttgagctgccccaggaattggctgggcttcacactcctcacctctggctactttggaactcatcccccgaaacctccagggaaatgtagccacgggggccattttgaccggagcagctcccagccaccgaggggaggcatcaacaaggacagcacatccccaggcttctcccctcaccacatgctgcacctccaggctgcaaaactggcccttctagcctccatccaggccttcagccttctgcgaagccgcctgggagacagggatttctccaggctgctggacatcaccccagcctccagcctgagctttgtcctggacaccacgggcagcatgggtgaggagatcaacgctgccaaaatccaggctcgccaccttgtggagcagcggagaggcagccccatggagcctgtccactatgtcctggtgccttttcatgacccagggttcggccctgtctttacaaccagtgaccctgacagcttctggcaacagcttaatgagatccatgccttggggggtggagacgagcctgagatgtgcctgtcagccctgcagctggccctgctgcacacacctccactctcagatatctttgtcttcacggatgcctcccccaaggatgcctttctcaccaaccaggtggaatccctgactcaggagcggcgctgccgggtaacattcctggtgactgaagatacatcaagggttcagggtcgagctcggcgtgagatcttgtcccctctgcgttttgagccatacaaagcagtggccctggcctcaggaggagaggtgatcttcaccaaagaccagcacattcgagacgtggcagccattgttggggagagcatggctgccctggtgactcttcccctggaccctcctgttgtggtgcctgggcagccacttgtgttcagcgtggatgggctgctccagaagatcacagtccggatccacggagacatcagcagcttctggatcaagaaccctgcaggggtctcccagggccaggaggaaggcgggggtcctctaggtcacactcgccgctttgggcagttctggatggtgaccatggatgaccctccacagacaggaacctgggagatccaggtcacagctgaggacacccctggggtgagagtgcaagcccagacctccctggacttcctcttccactttgggatccccatggaggatggaccccaccctggcctctaccccctgactcagccagttgcaggtcttcagacccagctgctggtagaagtgacagggttgggttccagagccaatcctggggatcctcagccgcatttctcccacgtcatccttcgaggggtcccagagggtgccgaactaggccaggtgcccttggagcccgtgggacctccggagcgaggtctcctcgcagcctcgctgtcgcccacgctgctgtccacccctagacccttctccctggagctgattggccaggacgcagcggggcggcgcctgcacagggctgcccctcagcctagcactgtagtccctgtccttctggagcttagtggcccctcgggtttcttggccccgggcagcaaagtcccgctcagtctccgcatcgccagcttctcgggccctcaggatcttgaccttaggactttcgtcaaccccagcttctccctcacctccaacctctccagggctcacctggaactgaatgagtcggcctggggccgcctgtggctggaggtcccagattcagcggccccggattccgtggtgatggtgactgtgactgcagggggacgagaagccaacccagtacccccgactcatgctttcctccggctcctggtatcggccccagccccgcaggtgaggaaccactactttccatcacagggaccggcacaccacccctaccggctcatctgacccgatcctcaccacggccacccctgccttttcccccttcacattggtgactcaaggcagggctggggcagggctggctgcgggcagcccctggtggggcacagttggaggggtgctgcttctgctaggcctggcctcctggtga

SEQ ID NO: 218757 - DNA, 2881 bp, Artificial Sequence
  derived and/or modified sequence
cctggcgtgggctgctgcctgtggctttgggcaggcaggagcgaaagggccaggggttgcctgtcctcccccaccctgttgaggccttcctccccctctgctgagcctcggttaattataactctgacctaagtgccctgtgacgtcaagcccgggccagccctgcccaggagacccagcaaccaggtccatgtctcagccatgctccccacggaggtcccccaatcccacccgggcccctcagcgttgcttctgctgcagctgttgctgccccccacatctgccttcttccccaacatctggagcctgctggctgcccctggctccatcacccaccaagacctaactgaggaggcagcgctcaacgtcaccctgcagctcttcctggagcagccacccccaggccgcccccctcttcgtcttgaggacttcctgggtcgaacactccttgctgatgacctctttgccgcctactttggacctggttcttctcggcggttccgagcagccttaggtgaggtgtctcgtgccaatgcagcccaggacttcctgccaacttccaggaatgaccccgacctgcactttgatgctgagcgactgggtcagggacgcgcgcgcctggtaggggctctgcgggagaccgtggtggcagccagggcccttgaccacaccctggctcgccagcgcctcggggctgcacttcatgccctgcaggatttctacagtcatagcaactgggtggagctgggcgagcagcagccacaccctcacctcctctggccaaggcaggagctccagaacctggcacaagtggccgatcctacctgctccgattgcgaggagttgagctgccccaggaattggctgggcttcacactcctcacctctggctactttggaactcatcccccgaaacctccagggaaatgtagccacgggggccattttgaccggagcagctcccagccaccgaggggaggcatcaacaaggacagcacatccccaggcttctcccctcaccacatgctgcacctccaggctgcaaaactggcccttctagcctccatccaggccttcagccttctgcgaagccgcctgggagacagggatttctccaggctgctggacatcaccccagcctccagcctgagctttgtcctggacaccacgggcagcatgggtgaggagatcaacgctgccaaaatccaggctcgccaccttgtggagcagcggagaggcagccccatggagcctgtccactatgtcctggtgccttttcatgacccagggttcggccctgtctttacaaccagtgaccctgacagcttctggcaacagcttaatgagatccatgccttggggggtggagacgagcctgagatgtgcctgtcagccctgcagctggccctgctgcacacacctccactctcagatatctttgtcttcacggatgcctcccccaaggatgcctttctcaccaaccaggtggaatccctgactcaggagcggcgctgccgggtaacattcctggtgactgaagatacatcaagggttcagggtcgagctcggcgtgagatcttgtcccctctgcgttttgagccatacaaagcagtggccctggcctcaggaggagaggtgatcttcaccaaagaccagcacattcgagacgtggcagccattgttggggagagcatggctgccctggtgactcttcccctggaccctcctgttgtggtgcctgggcagccacttgtgttcagcgtggatgggctgctccagaagatcacagtccggatccacggagacatcagcagcttctggatcaagaaccctgcaggggtctcccagggccaggaggaaggcgggggtcctctaggtcacactcgccgctttgggcagttctggatggtgaccatggatgaccctccacagacaggaacctgggagatccaggtcacagctgaggacacccctggggtgagagtgcaagcccagacctccctggacttcctcttccactttgggatccccatggaggatggaccccaccctggcctctaccccctgactcagccagttgcaggtcttcagacccagctgctggtagaagtgacagggttgggttccagagccaatcctggggatcctcagccgcatttctcccacgtcatccttcgaggggtcccagagggtgccgaactaggccaggtgcccttggagcccgtgggacctccggagcgaggtctcctcgcagcctcgctgtcgcccacgctgctgtccacccctagacccttctccctggagctgattggccaggacgcagcggggcggcgcctgcacagggctgcccctcagcctagcactgtagtccctgtccttctggagcttagtggcccctcgggtttcttggccccgggcagcaaagtcccgctcagtctccgcatcgccagcttctcgggccctcaggatcttgaccttaggactttcgtcaaccccagcttctccctcacctccaacctctccagggctcacctggaactgaatgagtcggcctggggccgcctgtggctggaggtcccagattcagcggccccggattccgtggtgatggtgactgtgactgcagggggacgagaagccaacccagtacccccgactcatgctttcctccggctcctggtatcggccccagccccgcaggaccggcacaccacccctaccggctcatctgacccgatcctcaccacggccacccctgccttttcccccttcacattggtgactcaaggcagggctggggcagggctggctgcgggcagcccctggtggggcacagttggaggggtgctgcttctgctaggcctggcctcctggtgacaca

SEQ ID NO: 218758 - DNA, 2559 bp, Artificial Sequence
  derived and/or modified sequence
atgctgcccaccgaggtgccccagagccaccccggccccagcgccctgctcctgctgcagctcctgctgccccccacaagcgccttctttccaaatatttggtccctcctcgccgcacctggcagcatcacgcaccaggacctgaccgaggaggctgccttgaatgtaacacttcagctgttcctggagcagccccctccggggcgaccacctctgaggctcgaggatttcctgggccgcacacttttggcggatgacttatttgccgcgtatttcggccctggaagctcgagacgcttccgcgcagcactgggtgaggttagccgagccaatgccgcccaagacttcctgccaaccagccgcaatgaccccgacttgcattttgacgccgaacgtttgggccaggggcgcgcacgcctcgtgggggccttgcgggagacggtggtggccgcacgcgctctggatcacaccctcgcacgacagaggcttggagctgccttgcacgccctccaggatttttactcgcattccaattgggtggagctgggggaacagcagcctcacccccatcttctttggccgcgccaggaactgcagaacctggcccaagtcgcagaccctacctgctccgattgcgaggaactctcttgccctaggaactggctgggcttcactttacttacctccggctactttggcacccacccacctaagccaccgggcaaatgctcacacggcggacattttgaccggtcaagttcacagcccccgagagggggaattaacaaggactccacctcccccggctttagcccacatcatatgcttcatctgcaggccgcaaaactggcccttctagcttctattcaagcattcagtctgcttcgctcacggctgggggacagggacttctcccgcttgctagacattacgccagcctcatccctgtcctttgtgctggacaccacaggcagcatgggcgaagagattaatgccgcaaaaatccaggcccggcatctagttgaacagaggagggggtctcctatggaaccagtacattatgtgctggtgccttttcacgaccccggattcgggcctgtctttactacttccgacccagactcattctggcagcagcttaacgagatacatgcccttggcggaggggacgagcctgagatgtgtctctctgctttacaactggcccttctgcacacacctcccttatctgacattttcgtcttcaccgacgcaagcccgaaggacgccttcctaactaatcaggtggaatctttgacacaggagcggaggtgtcgggtcaccttccttgtcacggaggatacatcacgcgttcaagggagggcgcgacgcgagattctctcgcccctcagatttgagccttataaagctgttgctctggcctcaggaggagaggtgatttttactaaagatcaacacattcgtgacgtggccgcgatcgttggggagtctatggctgctctggttacactccccctcgatcctcctgttgtggtaccaggccagccgctagtattcagcgtggatggattgctccagaagataacagtcaggatacatggcgacattagttcgttttggatcaagaatcccgccggggtatcacaggggcaggaagagggtggaggaccactcggccacaccaggcgatttggccagttctggatggtgactatggatgaccccccacagacaggcacttgggaaattcaagttacggctgaggatactccaggggttagggtccaagcacagacttccctggactttctctttcacttcgggattcctatggaagatggcccccatcccggcctatatccactcacgcagcctgtagcaggtctgcagacacagctcttggttgaagtcactgggttgggatctagggcgaaccctggcgatccccagcctcacttttctcacgtgatcttacgtggagtaccagagggcgcggagcttgggcaggtgccactggaacccgtcggaccaccagaaaggggcctgctggcggcaagcctgagccctacactgctgagcacaccccgtcctttttctctagagcttatcggacaggatgcagcaggccgacgcctgcatagggcagcgcctcagccatctactgtcgtgccggtattgctggagctgtcaggcccctctggtttcctagcccccggctccaaggtgccactgagcctgagaatcgcgtctttttccggtccgcaggacctggatcttcgtacgttcgtgaatccctcattctcgctgaccagtaacctgagcagggcccatttagaattaaatgagagcgcatggggccggctgtggctggaggtgccagatagtgccgccccagatagcgtggtaatggtcacggtgacagcgggaggccgggaagccaaccccgttccccccacacacgcgttccttagactgctggttagcgccccagctccacaggtaaggaaccactactttcctagccaaggccccgcacaccacccatatcggctgatctag

SEQ ID NO: 218759 - DNA, 2676 bp, Artificial Sequence
  derived and/or modified sequence
atgctgcccaccgaggtgccccagagccaccccggccccagcgcccttctactgctgcagcttctgctaccacctacatctgctttctttcccaacatttggagtctactagccgctcctggaagcatcacccatcaagacttaaccgaggaggccgccctcaacgtcaccctccagctctttttagagcagccaccacctggccgacctcccctacgtctggaagacttcctcgggagaacactgctggccgatgacttgtttgctgcatactttggtccaggtagctctcggcggttccgagcagccctaggcgaagtgtcacgagcgaatgccgcccaagatttcctccctaccagcagaaacgatccggacctgcacttcgacgccgagcggttaggccaggggcgggctcgcctagttggagccctccgcgagacggtggtcgccgcccgggctttggaccacacgcttgccagacaaagattgggcgccgccctgcacgccctccaggacttctacagccacagtaattgggtcgagctgggcgagcagcagcctcacccgcatctcctctggcccagacaggaattgcagaacttggctcaggtcgccgacccgacatgctccgattgcgaagaactgtcatgtccgagaaattggctggggttcaccctgctgacatctggctacttcggtacgcaccctccaaaaccacctggcaaatgttcccatggagggcactttgatcgctctagctcccagcctccccgcggtggaatcaacaaagactctactagccctggattctccccccaccatatgttacacctgcaggccgccaagctggcccttctggcaagcatccaggccttttccctactgcgctcccgcctgggcgacagagacttctcacggttgctggatattacaccagccagtagcttaagtttcgttctggacacaaccggctctatgggagaggagatcaatgctgcaaagatacaggctcggcatcttgtagagcagcgccgaggcagtcctatggagcccgtccactacgtactggttccgtttcatgatccaggattcggccccgtttttaccacctccgatcccgattcattctggcagcagctgaacgaaatccatgctcttggcgggggtgacgagcctgagatgtgcttgtctgctctccagctggccttgctacatactccgcccttgtccgatatcttcgttttcacggacgcttctcccaaagatgccttcctgacgaaccaagtggagtcacttactcaggagcgaagatgcagagtaacgttcttagtgaccgaagacacctctcgggttcagggtcgggctagaagagagattctgtcacctcttagatttgaaccctataaagcggtggccctggcgtccggtggagaagttatctttaccaaagaccagcatattcgggacgtggccgctattgttggagagagcatggcagctctagtaaccctgcctttagacccgccagtggtcgtgcctggccaacccctggtttttagcgttgatggcctcctgcagaagataacagtgaggatccacggggatatctcctccttttggattaagaatccagccggagtgtcccaggggcaggaagaggggggaggaccactcggacacacacggcggttcggacagttctggatggtgacaatggatgatccaccccaaacaggcacctgggagatacaggtcaccgccgaagacacccccggggtgcgcgtacaagcccagacatcactggactttctgttccacttcgggattcctatggaggacggtccacaccccgggctgtaccctctcacacaacccgttgctggtttgcagactcagctgttagtagaagttactggtctgggaagcagggctaatcctggagatcctcagcctcacttctctcacgtgatcttacgcggtgtccccgaaggcgctgagcttggacaagtgcctctggagcccgtgggccctcctgagaggggactgctcgccgctagtctgtctccaaccctcctctcgaccccaagacccttttccttggagctgataggccaagacgcagcgggccggaggttgcatagagcagccccacagccatcaacagtcgtccctgtcctgctcgaacttagtggcccctcgggctttctggcacccggtagcaaggtccccctttctctgcgaatcgcttcattttccggacctcaggatctggatctccgaacctttgtcaatccgtccttcagtcttacaagcaacctgagtagggcccaccttgaactgaatgagtcagcctggggccgcctttggctggaggtccctgactccgccgctcccgatagtgtggtgatggtaacagtgacggccggaggcagggaagccaatcccgtccctcccacacacgcatttctgagattgctagtgagtgcccctgctcctcaggatcgtcatacgactcccactggaagttccgaccctatacttacaactgctacacccgccttttccccctttactttggtgacacaggggcgagcgggggctggattagccgctgggagcccgtggtgggggacagtgggcggcgtgctcctgctgttaggtttggctagctggtag

SEQ ID NO: 218760 - DNA, 2676 bp, Artificial Sequence
  derived and/or modified sequence
atgctgcccaccgaggtgccccagagccaccccggccccagcgcccttctgcttctgcagttgctccttcccccaacttcagctttcttcccaaatatatggtcgctactggcagcccccggatcaatcacacaccaggacctaaccgaagaggcagctttgaacgtgacactccaactgttcctcgaacagcctcctccagggcgaccgccgcttaggctggaggacttcctggggaggacattactggccgatgatttgttcgcagcatatttcggccctggttctagtcgcaggttccgcgccgccttgggggaggtgtctagggctaacgcggcgcaggactttctgcccacctctcgtaacgatccagatttgcacttcgatgccgaaagattaggccagggacgcgccaggttggtcggtgcattaagagaaaccgtcgtcgccgcccgggcacttgaccatacactggcccggcagagacttggcgcggcactgcacgctctgcaggatttctacagccactcaaattgggtcgaacttggcgagcagcaaccccaccctcatctcctctggccgcggcaggagctccagaatcttgcccaggtggccgatcctacatgctccgactgcgaggaattatcctgcccgcgtaattggctaggctttaccctgcttacctccggatacttcgggacgcatcccccaaagcctcccggaaagtgcagccacgggggacactttgatcgctcgagctcccagccccccagggggggcatcaacaaagacagtacctccccagggttctcaccacatcacatgctgcacctccaggccgccaagctggccctgctggcatccatacaggctttcagtctgctgagatcccgactcggcgatcgggattttagtaggttgctggacattacgcccgcgtcatccctgagcttcgttctggacacgacaggcagtatgggagaggagatcaatgcagccaaaatacaagccaggcatctggtggaacagaggcggggatcgcccatggagcctgtacactatgtgttggtgcccttccacgatcctggatttggaccagtctttacgacatccgatccggacagcttttggcagcaattgaatgaaatccatgctctcggcggtggcgatgaacccgaaatgtgcctgtctgcactgcagcttgccttgctgcacactcctcctctatctgacatcttcgtttttacggatgcaagccccaaagatgcgtttttaactaatcaagtggagagcctcactcaagagcggaggtgtagagtgaccttcctggtgacagaggatacttcacgcgtccagggtagagcacgccgagagatactcagcccactgagattcgaaccttataaagcagttgctctggcaagcggtggtgaagtcatcttcacgaaggatcagcatatcagggatgttgccgcgatcgtgggagaatccatggccgctctggtaaccctccccctggatccccctgtggtagtacccggccagccactggtgttcagcgttgacgggctgctgcagaagattaccgtgagaatccatggagacatatcgtcattttggatcaagaatcctgcgggagtttcgcagggccaggaggagggcggtggcccattaggtcacactcggaggttcggtcagttctggatggtaacgatggacgaccccccccaaacggggacatgggagattcaggtgaccgccgaggatacccctggcgtgcgggtccaggctcaaacatctctcgatttcctgttccatttcggcattcccatggaggatggaccccaccctggcctgtacccattgacccagcctgtggccggactccagacccagctgctcgttgaagtgacaggattagggtcacgggccaaccccggcgatccccagccacacttttcgcacgtgattctgagaggcgtgcccgaaggggctgaattgggacaggtcccgttggagcctgttgggccaccagagcgtggcttgctggccgccagcctgagtcccacactcctgagtactccgcgccccttttctctggaactgattggacaggatgcggcagggaggagactacatagggccgctccacagccctcaaccgtggtccctgtgcttctggaactgagtgggccttctggtttccttgcaccgggctcaaaggtacctctgagcctaagaattgcttcctttagtgggccccaggatctggatctgcgaactttcgtcaatccatccttttcactaacctcgaatctgtcacgcgctcacttagagctgaacgagagcgcctggggaagactatggttagaagtgcctgattccgccgcacctgacagcgtcgtgatggtaactgttactgcagggggtcgggaggctaacccggtacctcccacccatgccttcttgcggctcctcgtcagtgcccccgcccctcaggaccggcacacaacccccacagggtcttccgacccgatcttgacaacagccactcccgcttttagtccattcactttggtcacccagggccgggcaggggccggactggcggctggttcaccctggtgggggacagttggaggtgtgctgctgctgctcggtctggcctcttggtag

SEQ ID NO: 218761 - DNA, 2676 bp, Artificial Sequence
  derived and/or modified sequence
atgctgcccaccgaggtgccccagagccaccccggccccagcgccctcctgcttcttcagcttctgctacctccaacaagcgccttttttccaaatatctggtccctgctcgcagcccctgggagcataactcatcaagacctgacagaagaagctgcgctgaatgtgaccctgcaactgttcctcgagcaaccaccccccggcaggccgccgctacgtctggaggacttcctcggcagaaccctgctcgctgacgaccttttcgccgcctactttggacctggttcgtcaaggcgtttcagagcagctctaggagaggttagccgggcgaacgctgcgcaggattttctccccacgagccgcaatgacccggacctccatttcgacgcagagcggctggggcaggggcgggcccgactggtgggagccctccgggaaactgtggtggctgcacgcgctctggaccatacactcgctcggcagcggcttggagcagccctgcatgccctgcaggatttttacagtcatagcaattgggtggaactcggtgaacaacagccgcacccacatctcctctggccacggcaggagcttcagaacctggctcaggtggccgatccgacatgctccgactgtgaggagctgtcttgtccacggaactggttagggtttaccctgctgacttccggctattttggtactcatcccccaaaacctcctggcaaatgtagccatggcgggcatttcgaccgttcttcttcccagcccccacggggtgggattaataaagatagcacgagtcccggattcagtccccatcatatgcttcacttgcaggccgctaaactggccctgctcgccagtattcaggccttttcccttcttcgttctcgccttggcgacagagacttttcccggctgctggacataacgcctgcctcgtctctgtcctttgtactggacactacggggtctatgggtgaggagattaatgcagccaaaatccaggcccgccatttggtggagcaaaggcggggctccccaatggagccagtgcactatgtgctcgtgccgtttcacgatccagggtttggacctgtctttactacctcagatcccgattctttttggcagcagttgaacgaaatacatgcattaggcggtggggatgaacccgaaatgtgcctgtccgccttacagctggccctactacatacacctcccctctctgacattttcgtgtttaccgacgcaagtccaaaggacgccttcctgacgaatcaggtcgagtccctcacccaggaaaggagatgtagagtgacctttttagtgactgaagacacttcccgcgttcaggggcgtgctagacgcgaaattctctcaccactgcggtttgaaccatataaagctgtggctctcgcaagcgggggtgaagttatttttacgaaagatcaacatatcagagatgtggccgcaatagtcggcgagtccatggccgctttggtcactctgcccctagatcctccggtggtcgtgcctggacagccactggtgttttctgtggacggactgcttcagaagatcaccgtccgtattcacggggatattagctctttctggataaagaaccccgcgggcgtgtctcagggccaagaggaaggcggagggcctttagggcatacccgcaggtttggtcagttctggatggtcacgatggacgacccccctcagacaggaacctgggagatccaggttacagcggaggatacccctggcgtgcgagtacaagcacagaccagtttagacttcctgttccattttggaatacccatggaggacggaccacatccgggactatatcccttgacacagcctgttgccggtcttcagactcagctgctcgttgaagtgaccgggctcggctccagggcaaaccctggggatccccagccacatttttcccatgtgatcctgaggggggtcccagagggtgctgagctgggtcaggtgccgctcgagccagtgggacctcccgaaaggggtctccttgccgctagtttgtcaccgactcttctcagcacccctaggcccttttctctggagctgattggccaggacgccgccggccggcggcttcatagggcagccccgcagccatcgactgtagtcccagtgctgctggagctgagcggaccaagcgggtttttagcacccggatctaaagtccccttgagtcttcgtatcgcctctttctccggcccccaggatctggacctgcgaacgttcgtgaacccttccttttccctcacaagcaacctgtcccgtgcccatcttgaactaaacgagtccgcatggggaaggctgtggctggaagtgccagactcagctgctcccgactctgtggtaatggtgactgttacagccggcgggcgtgaggccaatcccgtgccccccacccacgctttcctgcggctcctcgtctctgcccctgctccccaggacaggcatacaactcctaccggttcttccgatcctatcctgaccactgctactccagcttttagcccctttacgctcgtgacccaaggcagggcgggcgccggcctggccgctggtagcccttggtgggggacagtgggaggagtgctcctgctgctgggcttggcaagctggtag

SEQ ID NO: 218762 - DNA, 2676 bp, Artificial Sequence
  derived and/or modified sequence
atgctgcccaccgaggtgccccagagccaccccggccccagcgccctgctgctcttacagctcctgcttccccctaccagcgccttctttcctaatatctggagcctcctggccgccccgggctccatcacgcaccaagatttgaccgaggaggccgctttaaacgtgactctgcaactatttctggagcaaccaccacccggcaggccacctctgagacttgaggattttttggggaggacgcttttagccgatgacctgtttgccgcttatttcggacccggttcatccagacggtttcgagccgcgctcggagaagtatcacgcgccaatgctgctcaagactttctgccaacaagcagaaatgaccctgatctgcattttgatgccgagcgtctcggccagggacgcgctcgcctggtcggagctctgcgtgaaactgttgtcgccgcgagagctctggaccatactcttgcgcggcagagacttggcgccgcgttacatgcactgcaggacttttactcccactccaattgggtcgagctcggggaacagcagccacacccccacttattgtggcctcgccaggaactgcaaaatctcgcgcaggtcgctgaccccacttgttctgattgtgaggagctctcgtgtcctcgcaattggctgggcttcactttgctgacttcaggctatttcggaacccaccccccaaagccaccagggaagtgcagtcatggcggacacttcgaccggagttcctcccagccccctcgaggtggtatcaataaggattcaacaagtccgggtttttcaccccatcatatgcttcacctccaggcagccaaacttgcattgctggcatccatccaggcattctccctcctcagatccagattaggcgacagagatttctcccgccttctcgatatcactcctgcctcctccctgtcattcgtcttggatacaacgggctccatgggagaggagatcaacgcggcaaagattcaagccaggcaccttgtggaacagcggagaggctcccctatggaaccagtgcactacgtgctggtccccttccacgacccgggtttcgggcccgtgttcactacgagcgacccagacagcttttggcaacagctgaatgaaatccacgctctgggcggcggggatgaaccagaaatgtgcctgtccgctcttcaattggccttgttacacacccctcccctcagcgacattttcgtcttcaccgacgcttcccctaaagatgcctttctgacaaatcaagtggagtccctgacccaagagcgacggtgccgtgttactttcctagtcacggaggacacatcccgagtccaaggacgcgcaaggagagagattctcagccctctccgctttgagccttataaggcagtggccctggcctccgggggggaagttatcttcacaaaggatcagcatatccgagacgtggccgcaatcgtgggggaaagtatggcagcactggtcactctgcccctggatccacccgttgtggtaccagggcaacctttggtcttttccgtggatggcctcttgcagaagatcacggtcagaattcacggcgacattagctcattctggatcaaaaatccagccggagttagccaaggacaggaggagggaggaggccccttggggcataccaggcgcttcggacagttctggatggtaacgatggatgaccctccccagacaggtacttgggagatacaggtgacagctgaggatactcctggcgttagggtgcaggcacagacaagtctggattttctttttcactttgggatccctatggaggacggcccacaccccggtctctatccactgacccagcccgtggctggtctccagacgcagctgttagttgaagtgactggattgggctccagggccaaccccggcgatcctcagccacatttctcgcatgtgatactccgtggagtgcccgaaggggcagagctgggccaggtgcctctcgagccagtcggacccccagaacgaggtctgcttgcagcctcactgtccccgacccttctgtccacaccaagaccctttagtctggagctcattgggcaggacgcagcaggaagaagactccatcgtgccgcccctcagcctagcacagtcgtgcctgttcttttggagctcagtggcccctccgggtttctcgcacctggttctaaagtccctttgtctctgagaattgcttccttttccggacctcaggatctggatcttaggacctttgtgaatcctagtttctcgctgacgtcgaatctgtctcgggctcacttagagctcaatgagagtgcttggggcagattgtggcttgaggttcccgactccgcagctcccgactctgtggtcatggtcacagtgaccgcggggggcagggaggccaatccagtccccccaacccacgcctttctgcggctcctcgtcagcgcccctgctccccaggaccggcatacaacacccacaggctcctctgatccaatccttaccaccgcaacccctgcgttcagccccttcaccctggtcactcagggccgcgccggagcaggcttagcagccggctccccttggtggggcaccgttggaggagtgttgctcttgctgggcttggcaagttggtag

SEQ ID NO: 218763 - DNA, 2676 bp, Artificial Sequence
  derived and/or modified sequence
atgctgcccaccgaggtgccccagagccaccccggccccagcgccctcctgctcctgcagctgcttctcccacccacttccgctttcttccctaacatatggtctcttctcgccgccccggggtctatcacgcaccaggatttaacagaagaagctgccttgaacgtgaccctgcaactgttcctcgagcagcccccacccggtcgcccccccctacggttagaggatttcctgggtcgaaccctcctagccgacgaccttttcgctgcctactttggcccaggcagttcaagaaggtttcgggcagccctgggtgaagtctcaagggccaacgccgcacaagattttctgccaacgtcaaggaatgaccccgatctgcatttcgatgccgagagacttggccaaggcagagctcgactagtaggggctttgagggaaactgtggtggcagccagggctttagaccacacccttgcccgccagcgcctgggtgcagctctgcacgctctacaagatttttacagtcattcaaactgggtcgaactgggggaacaacagccacatcctcacctgctctggcccaggcaggaactacaaaatctggcccaagtggcagaccccacatgctctgattgcgaggaactttcttgtcctaggaattggctgggtttcactctgttaacgtcagggtatttcggcacccatccaccaaagccaccaggcaagtgttctcacggcgggcatttcgatagatcttcgagccagcctccgcggggggggattaataaggacagtacttctcctgggttttcaccacatcacatgctccacttacaggccgctaaactcgcactgctggctagcattcaggccttcagcctgctcagatccaggttaggagaccgggacttttcaagactgcttgacatcacacctgccagctcattgtcatttgtcctggacacaaccggcagcatgggtgaagaaataaacgcagctaaaatccaggcccgacatctggtggagcagcggagagggagtccaatggaacccgtgcactacgtcctcgtcccctttcatgatcctgggttcggacccgtattcacaacatctgaccccgacagcttctggcaacaactcaatgagattcatgcccttggggggggcgacgagccagaaatgtgtttatcagcattacaattggctctcttacacactcctccgctctctgacatttttgtcttcacggacgcttctcctaaagacgcgtttttaaccaatcaggtggagagcttaacccaggagcgtagatgtagagttactttcctggtaaccgaagacacatctcgggtgcaggggcgcgcacgtcgagaaatcctgagccctttgagatttgagccatacaaggccgtcgccctcgcttcggggggcgaggtaatctttactaaggaccaacatatcagagatgtggctgccatcgtgggagaatccatggcggcactcgttacactgccccttgatccccctgttgtggtgccaggacagcctctggtcttttccgttgatggattgctacagaaaattaccgttcgcattcatggagatatttctagcttctggattaagaacccagctggcgtttctcaggggcaagaggaaggaggagggcctcttgggcatactaggagatttggacagttctggatggtcacgatggatgaccctccacagactggaacttgggaaatacaggtgaccgcagaagacacgccgggtgttagagtacaggcccagacctccttagactttctctttcacttcggcattcccatggaagatgggccccacccaggattgtaccctcttacgcagcctgtcgcggggcttcaaacccagctcctcgtggaagtgacgggactcggttccagagcgaaccctggggacccacaaccacacttctcccacgtgattctgcgcggggttccagaaggtgctgaactcggacaggtccccctggaacccgtgggtccacctgaaagaggtctgcttgccgcctcactcagtccaaccttacttagtaccccccgccccttttctctggagttgattggccaggacgcggccggcaggcggctacaccgggccgctcctcagccatcaactgtcgtgccagtgctgctagagctcagcggaccatcgggcttcctcgctccggggagtaaagtgcctctgagtctgcgcatcgccagtttttctggccctcaggatctggacctgagaacttttgtgaacccatcattttccttgaccagcaatctgtctagagctcacctggagttaaacgagagtgcctggggtcggctttggctggaagtgcccgacagcgccgcccctgacagcgtcgtaatggtgacagtgacagccggcggccgggaggccaatcctgtgcctcctacccacgcgtttctcaggctgctggtctctgcacccgctccacaagaccggcatactacaccaacgggcagctcggaccccatactgacaaccgccaccccagctttttcgccttttactttggttacacaaggtcgggcaggtgcagggctcgccgcggggtctccctggtgggggacggtgggcggcgtgctactcctcctcggcctggcatcatggtag

SEQ ID NO: 218764 - DNA, 2676 bp, Artificial Sequence
  derived and/or modified sequence
atgctgcccaccgaggtgccccagagccaccccggccccagcgccctgctgctgctgcagctgctgctgccccccaccagcgccttcttccccaacatctggagcctgctggccgcccccggcagcatcacccaccaggacctgaccgaggaggccgccctgaacgtgaccctgcagctgttcctggagcagcccccccccggcagaccccccctgagactggaggacttcctgggcagaaccctgctggccgacgacctgttcgccgcctacttcggccccggcagcagcagaagattcagagccgccctgggcgaggtgagcagagccaacgccgcccaggacttcctgcccaccagcagaaacgaccccgacctgcacttcgacgccgagagactgggccagggcagagccagactggtgggcgccctgagagagaccgtggtggccgccagagccctggaccacaccctggccagacagagactgggcgccgccctgcacgccctgcaggacttctacagccacagcaactgggtggagctgggcgagcagcagccccacccccacctgctgtggcccagacaggagctgcagaacctggcccaggtggccgaccccacctgcagcgactgcgaggagctgagctgccccagaaactggctgggcttcaccctgctgaccagcggctacttcggcacccacccccccaagccccccggcaagtgcagccacggcggccacttcgacagaagcagcagccagccccccagaggcggcatcaacaaggacagcaccagccccggcttcagcccccaccacatgctgcacctgcaggccgccaagctggccctgctggccagcatccaggccttcagcctgctgagaagcagactgggcgacagagacttcagcagactgctggacatcacccccgccagcagcctgagcttcgtgctggacaccaccggcagcatgggcgaggagatcaacgccgccaagatccaggccagacacctggtggagcagagaagaggcagccccatggagcccgtgcactacgtgctggtgcccttccacgaccccggcttcggccccgtgttcaccaccagcgaccccgacagcttctggcagcagctgaacgagatccacgccctgggcggcggcgacgagcccgagatgtgcctgagcgccctgcagctggccctgctgcacaccccccccctgagcgacatcttcgtgttcaccgacgccagccccaaggacgccttcctgaccaaccaggtggagagcctgacccaggagagaagatgcagagtgaccttcctggtgaccgaggacaccagcagagtgcagggcagagccagaagagagatcctgagccccctgagattcgagccctacaaggccgtggccctggccagcggcggcgaggtgatcttcaccaaggaccagcacatcagagacgtggccgccatcgtgggcgagagcatggccgccctggtgaccctgcccctggacccccccgtggtggtgcccggccagcccctggtgttcagcgtggacggcctgctgcagaagatcaccgtgagaatccacggcgacatcagcagcttctggatcaagaaccccgccggcgtgagccagggccaggaggagggcggcggccccctgggccacaccagaagattcggccagttctggatggtgaccatggacgaccccccccagaccggcacctgggagatccaggtgaccgccgaggacacccccggcgtgagagtgcaggcccagaccagcctggacttcctgttccacttcggcatccccatggaggacggcccccaccccggcctgtaccccctgacccagcccgtggccggcctgcagacccagctgctggtggaggtgaccggcctgggcagcagagccaaccccggcgacccccagccccacttcagccacgtgatcctgagaggcgtgcccgagggcgccgagctgggccaggtgcccctggagcccgtgggcccccccgagagaggcctgctggccgccagcctgagccccaccctgctgagcacccccagacccttcagcctggagctgatcggccaggacgccgccggcagaagactgcacagagccgccccccagcccagcaccgtggtgcccgtgctgctggagctgagcggccccagcggcttcctggcccccggcagcaaggtgcccctgagcctgagaatcgccagcttcagcggcccccaggacctggacctgagaaccttcgtgaaccccagcttcagcctgaccagcaacctgagcagagcccacctggagctgaacgagagcgcctggggcagactgtggctggaggtgcccgacagcgccgcccccgacagcgtggtgatggtgaccgtgaccgccggcggcagagaggccaaccccgtgccccccacccacgccttcctgagactgctggtgagcgcccccgccccccaggacagacacaccacccccaccggcagcagcgaccccatcctgaccaccgccacccccgccttcagccccttcaccctggtggcccagggcagagccggcgccggcctggccgccggcagcccctggtggggcaccgtgggcggcgtgctgctgctgctgggcctggccagctggtag

SEQ ID NO: 218765 - DNA, 2676 bp, Artificial Sequence
  derived and/or modified sequence
atgcttccaaccgaggtgccacagtctcatcctggtccctctgctttactgttactacagctgttgctgcctcctactagcgcgttcttccctaacatttggtcattactcgcagcacctggatccataacccatcaggatttgactgaggaggcagccctcaacgtcaccctgcagctctttctcgagcagccaccacctggtcgacctccactacgccttgaagactttcttgggcggaccctccttgccgacgacttgtttgctgcctatttcggcccaggctcaagtaggcgattccgtgctgccctcggagaagtaagccgggctaacgcagcccaggatttcttgcccacgtcacggaacgaccccgacctgcactttgatgcagaacgacttggccagggcagagcgagactcgtgggggccttgcgtgagaccgtggttgccgcccgtgccttagaccacacccttgcccggcaacgcttaggcgccgctctccacgccctccaagatttttacagccacagcaactgggttgaactaggagaacagcagccccacccccatttgctgtggcctcgtcaggaactacagaacttggcccaagttgccgacccaacctgcagcgattgtgaggagttgagctgcccaaggaactggcttggattcaccttgctgaccagtggctacttcggcacccatccaccaaaaccccctgggaagtgcagccacggtggacacttcgataggtccagtagccagcctcctcgcggcgggattaataaggatagcactagcccgggattttctccccaccatatgctccatctgcaggcagctaaactcgctttgttggctagtattcaggccttctcattattgagatcaagactcggtgatagagacttttccaggctgctggacatcacacccgctagtagtctctcttttgtgctggacacaaccggatcaatgggggaagagataaatgctgccaaaatccaggcgaggcaccttgttgagcagcgacgggggtcaccgatggagcctgtacactatgtgctggtgccctttcacgacccaggcttcggccccgtcttcacaaccagcgaccctgactctttctggcaacaactgaatgaaatccacgccctgggaggcggcgacgaaccagaaatgtgcctatcagccctgcagcttgcgctgctccatacaccacctttgagtgacattttcgtgttcactgatgcctcccctaaggacgcctttctgaccaatcaagtggagagccttactcaagagcgacgctgtagagttacattcctggtcacggaagataccagccgggtacaagggcgggctaggcgggagatcctgagccctctgagatttgagccgtacaaagccgtggccctcgctagtgggggggaagtgatcttcactaaagaccagcatattcgagacgtagctgccatcgtgggcgaaagtatggctgcactcgtcacgcttccactcgaccctcccgtggtggtgccaggccagccgctcgttttcagtgtggacggtttgcttcagaagattaccgtaaggattcatggagacatctcatcattttggattaaaaatccagccggagtctctcagggtcaagaagagggaggcgggccattgggccacacaaggcggttcgggcagttctggatggtgacaatggatgacccacctcaaacgggcacatgggaaatccaggttactgccgaagatacccctggagtgagagtgcaggcccaaacttcgcttgacttcttatttcactttgggatcccaatggaggacggtccacacccggggctataccccctgacacagcccgtagccggcctgcagacccagcttcttgtggaagtgaccgggctggggtcccgagccaacccaggtgaccctcaacctcacttctcccatgtgattcttcggggagtacctgagggagccgaactgggtcaggtgcctttagaaccagtgggcccacctgaaaggggtttgttggcggcatcactctcccccactctgctgagtactccccgcccctttagcctcgaactaattggtcaagatgccgccggccggcggctacaccgggctgctcctcaaccgagcaccgtcgtgcctgtgcttctggagctgtctggacctagcggttttctcgctccaggctccaaggtgccactctccctcaggattgccagtttctccggaccgcaagatctagacctacgaaccttcgtcaacccaagctttagcttgaccagtaacctgagccgcgctcatctggaactaaatgagtccgcttgggggcgactttggcttgaggtacccgatagcgccgccccagattctgtggtgatggtgacagtgacagcaggcggccgggaagccaatccagtgcctccaacccacgccttcctaaggttgctggtctcagcgcctgcaccccaggacagacataccacacctacagggagtagtgaccccatcctgacaactgcaacccccgctttctcacctttcacattagtcgcccaggggagagctggggccggactcgctgccggctcaccttggtggggaaccgtcgggggagtgttactgcttctggggttggcctcatggtag

SEQ ID NO: 218766 - DNA, 2559 bp, Artificial Sequence
  derived and/or modified sequence
atgctgccaaccgaagtgccacagtcccaccccggcccttcggctctgctactgttgcagctgctactgcctcccactagcgccttcttcccgaacatttggagcctgctggcagcccctggctctataacccaccaagatcttaccgaagaggctgctcttaatgtgaccttgcagctgttcttggagcagccaccgcccggtaggccacccctccgtttagaagatttccttggacgcactctcctcgcagacgatctattcgccgcatattttggtcccgggagttcaagaaggtttcgcgcggcactgggagaggtatcaagggccaatgcagcgcaggactttctccccacctcacggaatgatccagatctccatttcgacgcggagaggctgggccagggcagagcccggctcgtgggggccctcagggaaacagttgtggccgccagagcgctcgatcacaccctcgctaggcaacgcttgggggctgcactccacgccctccaggacttctatagtcactccaattgggtggagttgggagagcagcaaccccacccccacctgctgtggccccggcaagaactccagaatctggcccaggtggcagacccaacctgtagtgactgtgaagagctgagctgcccaaggaactggctcggctttacactgcttacaagcggctatttcgggacccacccaccaaaaccgcctgggaagtgctctcacgggggccacttcgatcggagtagctcccagcctccaaggggaggaattaacaaggattctactagcccggggttctcaccacaccatatgctacatttgcaggcagccaaactcgcccttctggcgtccatacaggcgttcagtctcctgcgctcgcggctgggagacagagacttctcgcggttactggatattacaccagccagctctctgagctttgttctggatactacaggatcgatgggtgaagagatcaacgctgcaaagatccaggctaggcatctggtcgaacaacgccggggctctcctatggaacccgtgcactacgtcttggtacccttccacgaccctggattcgggcccgtgttcaccaccagcgatcccgattcgttctggcagcagttgaacgaaattcatgccttggggggtggcgacgaaccagagatgtgtctgtcagctctgcaactagctctactccacacaccccccctgtctgatatcttcgtatttacagatgcctcacctaaagacgcctttctgaccaatcaggtggaatccttaactcaagagagacgttgccgcgtgactttcctggtcacagaggatacatctagagtgcagggacgtgccaggagagaaatcctgagccccctgcgctttgagccatacaaagcagtggctctggcctctggtggcgaggtgatttttactaaggatcagcacatacgtgacgtggccgctatagtgggagagtcgatggcggcgctggtgaccttacccctggatccaccagtggtcgttccggggcagcctctggttttctcagtggacggcctgctgcagaagatcactgtacgcattcacggagacattagtagcttctggatcaagaacccagccggcgtctcccaaggtcaggaggaagggggaggtccgcttgggcacacaaggcggtttggccagttttggatggtgacgatggacgacccccctcagactggcacatgggagatccaagtgaccgccgaagataccccaggggtgagggttcaggcacagaccagcttagatttcctgttccacttcgggatccccatggaggacgggccgcacccaggactgtaccccctgacccagcccgtggcaggactgcagacacagctgcttgtggaagtgacgggactcggaagtagagcaaaccctggcgatccgcaaccacattttagccacgtcattttaaggggagtgccagagggagccgaactgggccaggtgcccctagaacccgtagggcctccagagcgcgggctgttagcagcgtctctcagtcccacccttcttagtactccgaggccctttagcctggagctcattggtcaggacgccgctggaaggagactgcatagagccgcacctcagccaagcaccgtcgttccagtgctgctcgaactgagcgggccatcggggtttctggcacccggatccaaggtgccgctaagcctccgcattgcatcctttagcgggccccaagacctcgatttgaggacctttgtcaaccccagcttcagtctgacgtctaatcttagcagggcccatctggaactcaacgagagcgcttggggccgactttggctcgaggtgcctgactcagccgccccagactcagtcgtgatggtcaccgtgaccgccggagggcgtgaagccaatccagttcctcccacccacgcctttctaagattgctcgtttccgcaccagccccccaggttaggaaccactacttcccatctcaaggtcctgctcatcacccatataggcttatttag

SEQ ID NO: 218767 - DNA, 2676 bp, Artificial Sequence
  derived and/or modified sequence
atgctgcccacagaggtgccccagagccaccctggccccagcgccctgctgctgctgcagctgctgctgccccccaccagcgccttcttccccaacatctggagcctgctggccgcccctggcagcatcacccaccaggacctgacagaggaggccgccctgaatgtgaccctgcagctgttcctggagcagcccccacctggccggccccccctgcggctggaggacttcctgggccgcaccctgctggctgatgacctgtttgctgcctacttcggccctggcagcagccgccgcttccgggccgccctgggggaggtgtcccgggccaatgctgcccaggacttcctgcccaccagcagaaatgaccctgacctgcactttgatgctgagcggctgggccagggccgggcccggctggtgggcgccctgcgggagaccgtggtggccgcccgggccctggaccacaccctggcccggcagaggctgggcgccgccctgcacgccctgcaggacttctacagccacagcaactgggtggagctgggggagcagcagccccacccccacctgctgtggccccggcaggagctgcagaacctggcccaggtggccgaccccacctgcagcgactgtgaggagctgagctgccccaggaactggctgggcttcaccctgctgaccagcggctacttcggcacccacccccccaagcccccaggcaagtgcagccatggaggccactttgacaggagcagcagccagcccccccggggcggcatcaacaaggacagcaccagccctggcttcagcccccaccacatgctgcacctgcaggccgccaagctggccctgctggccagcatccaggccttcagcctgctgcggagccggctgggggaccgggacttcagccggctgctggacatcaccccagccagcagcctgagctttgtgctggacaccaccggctccatgggagaggagatcaatgctgccaagatccaggcccggcacctggtggagcagaggcggggcagccccatggagcctgtgcactacgtgctggtgcccttccatgaccccggcttcggccctgtgttcaccaccagtgaccctgacagcttctggcagcagctgaatgagatccacgccctgggcggcggagatgagcctgagatgtgcctgagcgccctgcagctggccctgctgcacaccccacccctgagtgacatctttgtgttcacagatgccagccccaaggatgccttcctgaccaaccaggtggagagcctgacccaggagcggcgctgccgggtgaccttcctggtgacagaggacaccagccgggtgcagggccgggcccggcgggagatcctgagccccctgcgctttgagccctacaaggctgtggccctggccagcggcggggaggtgatcttcaccaaggaccagcacatcagagatgtggccgccatcgtgggggagagcatggccgccctggtgaccctgcccctggacccccctgtggtggtgcccggccagcccctggtgttttctgtggatggcctgctgcagaagatcaccgtgcgcatccatggagacatcagcagcttctggatcaagaacccagctggggtgtcccagggccaggaggagggcggcggccccctgggccacacccggcgcttcggccagttctggatggtgaccatggatgatcctccccagacaggcacctgggagatccaggtgacagctgaggacaccccaggagtgcgggtgcaggcccagaccagcctggacttcctgttccacttcggcatccccatggaggatggcccccaccctggcctgtaccccctgacccagcctgtggccggcctgcagacccagctgctggtggaggtgacaggcctgggcagccgggccaaccctggggacccccagccccacttcagccacgtgatcctgcggggcgtgcctgagggcgctgagctgggccaggtgcccctggagcctgtgggccccccagagcggggcctgctggccgccagcctgagccccaccctgctgagcaccccccggcccttcagcctggagctgattggccaggatgctgctggccggcggctgcacagagctgccccccagcccagcacagtggtgcctgtgctgctggagctgagcggccccagcggcttcctggcccctggcagcaaggtgcccctgagcctgcgcatcgccagcttcagcggcccccaggacctggacctgcggacctttgtgaaccccagcttcagcctgaccagcaacctgagccgggcccacctggagctgaatgaaagtgcctggggccgcctgtggctggaggtgcctgattctgctgccccagacagcgtggtgatggtgacagtgacagctgggggccgggaggccaaccctgtgccccccacccacgccttcctgcggctgctggtgtctgccccagccccccaggacagacacaccacccccaccggcagcagtgaccccatcctgaccacagccaccccagccttcagccccttcaccctggtggcccagggccgggccggggccggcctggccgccggcagcccctggtggggcaccgtgggcggcgtgctgctgctgctgggcctggcctcctggtag

SEQ ID NO: 218768 - DNA, 2676 bp, Artificial Sequence
  derived and/or modified sequence
atgctgcccaccgaggtgccccagagccaccccggccccagcgccttgctgctcctccagctgctattgccccccacatcagctttttttcctaacatctggtcacttctggccgctccaggatccattactcaccaggacttgaccgaagaggccgcactgaacgtgacactgcaattatttttggagcagccccccccaggccggcccccactgcgcttagaggacttcctgggacgaacactcctggccgacgatctgttcgccgcgtactttggtccaggcagctcgaggcgctttagagcagcccttggcgaagttagtagagcaaacgccgcacaagacttcctgcccacctctagaaacgaccccgacctgcacttcgacgcagagcggctgggtcaagggagagctaggctcgtgggcgcccttcgtgaaaccgtggtggccgcccgagccctagatcacaccctagcaagacagcgactgggagccgcgctgcacgctctgcaagacttctactctcactcaaactgggtagaactcggagagcagcaaccccacccacatttactctggccccggcaggagttgcagaatcttgcccaagtggccgacccaacctgcagtgattgtgaggaattgtcttgtccccgaaattggctcgggtttactttacttacttccggctacttcggaactcatccccccaaaccacccggtaagtgcagtcacggcggacacttcgatcgaagcagctctcagcccccgaggggaggcatcaacaaggactcaacctctcccggattctccccccatcatatgctacatctgcaagcagccaagctggcgctcttggccagcatccaagccttcagcttactgaggtccagactgggcgaccgagatttctctaggttattagatatcactcccgcgagctctttgagcttcgtcctcgataccaccggaagtatgggagaggagatcaacgcggctaagattcaggcgcggcacctcgttgagcagcggagagggtcaccgatggaacccgtgcactatgtcctcgtaccctttcacgatccaggtttcgggcccgtctttacgacaagcgatcccgattccttttggcaacagctgaacgagatccacgccctgggggggggagacgaaccagagatgtgtctcagtgccctgcaactcgctctcctgcatacccctccactgtctgacatcttcgtgttcactgatgcgtcccctaaggacgcatttctgaccaaccaggtggaatctctgacacaagagcggcggtgtagggttacctttctggtgaccgaggacaccagccgagtccaaggccgggcccgtagggagatactgtctcccctacgttttgaaccgtataaagccgttgccttagcaagcggtggggaagtaatttttacaaaagaccagcatattcgagatgtggctgcgatcgtgggcgagagcatggccgccctcgtgactttgcctctggatcctcctgtagttgtgccaggtcagcctctggtatttagcgtggacggccttcttcagaagatcactgtccgaatccacggcgacatcagtagtttttggataaaaaatccagcaggtgtgtctcagggccaggaagaagggggcggtcctctgggacatacaagacgctttggccaattctggatggtaacgatggatgaccctcctcaaaccgggacctgggaaatccaggtgactgccgaggacacgccaggcgtcagagtgcaggcgcaaactagtttggactttctcttccacttcggcattcccatggaggacgggcctcatcctggcttgtatcccttgactcaacctgtggccggtctacaaacacaactcctggtggaggtcaccggactgggatcacgagcgaatcccggagacccacagccacattttagccatgtaatcttgcgcggagtgccggagggggccgagcttggacaagtccctctggaaccagtgggcccaccagaacggggactgctggccgcgagcctgtctcctaccctgctcagtacaccccgacctttttcgttggagctgatcggtcaggatgccgcgggccggcggttacaccgcgcagcacctcagccctccactgtggttcccgtcctgttagaactatcaggcccatcaggctttttggcccctggcagtaaggtccctctctcactgaggatcgcgagcttttcaggtcctcaggatctggatctcaggacctttgttaacccttctttcagcctgacatcaaacctgagtcgtgcccatctggaactgaatgaatccgcctggggccggctgtggctggaggtacctgactccgccgcccctgatagcgttgtaatggtgaccgtcaccgccggggggcgcgaagccaacccagtgcctccgacgcacgccttcctgagactgctggtgtcagcccccgcccctcaggacagacacacaacacccactggttctagcgaccctattttaacaaccgccaccccagctttttcccccttcactctggtggcccagggtagggccggcgcaggcctagcagcgggctctccctggtgggggaccgttggaggggtccttctgctgttggggttggcatcctggtag

SEQ ID NO: 218769 - DNA, 2559 bp, Artificial Sequence
  derived and/or modified sequence
atgctgcccaccgaggtgccccagagccaccccggccccagcgccctcctcctcctgcagttgcttcttccgcctacgagcgctttctttcctaatatctggtcattgctggcggcccccggtagcatcactcatcaggatctgaccgaggaggccgcacttaatgtaaccttgcagttgttcctcgagcagccaccaccggggagacctcccctgcgactcgaggatttccttggtcggactctactcgcggacgatctgttcgcggcatactttggaccaggatcttcacggcggttcagggccgcactcggggaggtaagccgcgccaacgctgcccaggactttctgcccacctcccgcaacgaccctgatctgcacttcgatgccgagagactggggcagggccgggcgaggttggtcggggctcttcgcgagactgtggtcgccgctagagctctcgaccatactctagcccgacagcgattgggtgctgctctgcacgccttacaggatttctactctcactctaattgggtggagcttggagagcagcagccccatccacatcttctttggcctaggcaggagcttcagaacctcgcccaggtagcggatcccacctgcagcgattgtgaggagctgtcttgcccacgaaactggttaggatttaccctgcttacctcgggatacttcgggacgcaccctccaaagcccccgggtaaatgtagccatggcggccatttcgacagatcttcctcccagccccctcgaggcggtatcaataaagacagcacgagcccgggattctccccccaccatatgctgcatcttcaggctgccaagctggccctgctggcgtctattcaggccttttctctcctcagaagtcggctcggggacagggacttttcacgcctcttggacatcacacccgcgagttctctctcattcgttctggacaccacaggatctatgggggaggagatcaacgccgctaagatccaagcacgacatttggtcgagcagcgcagaggaagtccaatggagccagttcactatgtgctggtccccttccacgaccccgggttcggcccggtcttcacgacatccgacccagatagcttttggcagcagttaaatgagatccacgccctgggaggcggagatgagcccgagatgtgcctctcggcactgcaactggccttgttgcatactcctccactctccgatattttcgtgtttacagatgcctcccccaaagacgctttcctgaccaaccaagttgaatcactcacccaggagaggaggtgcagggtgacgttcctggttacagaagatacatcccgcgttcagggaagagctcgcagggagatcctgtcacctctgaggttcgagccttataaggcagtcgcgctcgcttccggaggcgaggtcatctttacaaaggatcagcacattcgggacgtagctgccattgtaggcgaatctatggcagctctggttacgctccccctcgacccacccgtggtggttccaggccagccactggtgtttagcgtggacggattactacaaaagataaccgtgcggattcacggagacatcagttctttttggattaagaacccggcaggcgtgagccaaggccaagaggaggggggaggcccactggggcacactcggcggttcggacagttctggatggtcaccatggatgaccctccacagaccggaacttgggagatccaggtcacggcagaggacacaccaggcgtcagggtccaagcgcagacctccctggatttcctgtttcacttcggcatccctatggaggacggaccacaccccggcctctaccctctgacccagcctgtcgccggcctgcagacacagttgctcgtggaggtcaccggtctgggctcccgcgcaaaccccggggatccccagccccatttttcgcatgttatactgcgcggtgtgccagaaggagccgagcttgggcaggtccctttggaaccagtgggcccacccgagaggggcctgttggccgcctcactgtctcccaccctgctgtcgaccccccgccctttttcgctggaacttataggacaagatgccgcggggcggagacttcaccgcgcggcgccccagccatccaccgtggttcccgttctcctggagttgtcaggcccctcaggtttcctcgctcccgggagtaaagtgcctctttcgctgcggatcgcctcttttagcggtccccaggatctggatttgcgaaccttcgtcaacccatcctttagcctaacgtcaaacctgtcacgggcccacctggagctcaatgaaagcgcatggggccggctctggttggaggttcctgacagcgctgcacctgactcggtcgtgatggtaactgttacagccggtggccgtgaggctaacccggttccccctacacacgctttcctgcgactgctggttagtgcccctgccccccaggtacgcaaccattacttcccttctcagggtcctgcacatcatccatataggctgatatag

SEQ ID NO: 218770 - DNA, 2676 bp, Artificial Sequence
  derived and/or modified sequence
atgctcccgacagaggtacctcaatcccatccgggaccatctgcactcttgctcctgcagttgcttctcccccctactagcgcattctttccgaatatctggagcctgctggcggctcccggttctatcacgcaccaggacctcaccgaagaagccgcactcaacgtgacattgcagttattccttgagcagccaccgccaggcagacctccgttacgcctagaggactttctggggcgaaccctgttggccgatgaccttttcgccgcatatttcgggccaggctcttctcgccgatttcgcgcagctttgggggaggtgtctagggctaacgcggctcaagatttcctaccaacctccagaaacgatcccgacttacattttgacgccgaaagactcggccaggggagggcacgtctggtcggagcattaagggagactgtggtggcagccagggctttagatcacacactcgccaggcagcggttgggcgcagcattacatgccctgcaagacttttactcccactctaattgggtggaacttggagaacagcagccccaccctcaccttctttggccgaggcaggaactgcagaatttggcgcaagtagccgatccaacatgtagcgattgcgaagagctgagctgccctaggaattggctcggattcaccctgcttacaagcggttatttcggcactcacccccctaaaccacctgggaagtgttctcacggaggacattttgataggagctcaagtcagcctccacgcggagggatcaacaaagacagcacatccccagggttttccccgcaccatatgcttcatctgcaggccgctaaactggctctgttggcttctatacaggccttttcactcctaagaagcaggctgggggacagggatttcagcaggctgctggacatcacccccgcatcttcactttccttcgtgctggatacgaccggctccatgggcgaggaaatcaatgctgcaaaaattcaagccagacacttggtggagcagcgaagaggtagcccaatggagcctgtacattacgttttagtgccttttcacgatcctggctttggtcccgtgttcaccaccagcgacccggactcgttctggcagcaactgaacgagatacacgccctagggggtggagacgagcccgagatgtgtctgtccgccctacagttagcactcctgcatacccccccattgtctgacatctttgtgttcactgacgcctcacccaaggacgcttttctgacaaaccaggtggaatcccttacccaagagcgacgctgcagagtcacgtttctggtaacggaggatacgagccgggtgcaaggtcgggcacgcagggaaatcctatccccactgcgctttgagccgtacaaagcagtggcacttgcaagcggaggagaggtgatttttaccaaggaccaacacattcgtgatgtagctgccattgtcggcgaatccatggccgcactggtgactttgccactggatccccctgtagtggtacctggtcaaccccttgtgttcagcgtggacggactcttacagaaaattactgttcgcatccacggcgacatcagtagtttctggatcaaaaatccagctggcgtatcccagggacaagaagaaggaggcggtcccctaggccacacgagacgtttcggtcagttctggatggtgacaatggatgacccaccacagacagggacctgggagattcaggtgactgcggaagacacgccaggcgtgagggtccaagctcagacttctctggatttcctgttccacttcggaataccaatggaagacggcccacatcccggactctacccgctgactcagccggttgccggtctgcagacccagttgttggtggaagttaccgggctgggctcacgcgcaaacccaggcgacccccagccccatttctcccacgtgattctgagaggcgtgcccgaaggggctgagctggggcaagtccctttggaacccgtcggacccccagaacgcggtctcctggctgctagcctttcacccaccctcttgagtaccccaaggccattcagcctagagctaatcgggcaggacgccgctggtcggaggttacacagagccgctccacaacccagcactgtagtccccgttctgcttgagctttctggcccttcaggcttcctagctcccggatctaaagtccctcttagtctgagaattgccagtttttcaggcccacaggacctagaccttagaacttttgtgaacccaagtttctcattgacaagtaatttatctcgagctcacctggaactgaatgagtccgcttggggaagattatggctggaggtgcctgatagtgccgctccagattccgtagtgatggtgactgtgaccgccggaggaagggaggctaatcccgtcccacccactcacgcatttctacggcttttagtgagcgcccctgcaccccaggatcgccatactacacccaccggctcctcggaccccatattaaccacagcgaccccggcattctcaccatttactctggtggcccagggccgtgccggtgcaggcttggccgcaggcagcccttggtgggggacagtcggaggagtcctgctcttgctgggcctggcatcctggtag

SEQ ID NO: 218771 - DNA, 2559 bp, Artificial Sequence
  derived and/or modified sequence
atgctgcccacagaggtgccgcagtcccacccgggtcccagcgcactgctgctgcttcaactgttgctgccccctacaagcgcctttttccctaatatctggagcctgctggccgctcctggaagcattacacatcaagacctaaccgaggaggccgctcttaatgtgacattgcagctgtttcttgaacagccaccaccaggccgaccacccctccggctcgaggacttcctgggacggacgctccttgccgatgatttgttcgccgcttacttcgggccaggtagcagcaggagattccgcgcagctctaggggaagtctcacgcgcaaacgcagcgcaagacttccttccaacttccagaaacgatcccgatttacattttgacgcagagcggctggggcaaggacgggcaaggctcgtcggtgcccttcgcgagacagtagtggccgcacgagccctggaccacactcttgctaggcagcgtctcggtgcagctcttcacgcgctccaagacttttactcccactccaattgggttgaactaggggaacagcagcctcatccgcatctgttgtggcccagacaagagcttcagaatcttgcacaggtcgctgatcctacatgcagcgactgcgaagagctaagctgcccacggaactggttggggtttacactcctcacgtccggttatttcggaactcacccacccaagcctccagggaagtgcagtcacggcggacacttcgaccggtcatctagtcagccgccaagagggggaattaataaagactccaccagtccagggtttagcccccaccacatgctacacctgcaagccgcaaagcttgccctgcttgcttctatccaggccttctctcttctacggtcacgcctcggtgatagggatttctctagactgctggatataacgccagcctcctccttatcctttgttttggatactaccggttccatgggcgaggaaattaatgcagcgaaaattcaggcgaggcatctggtggaacagcggaggggctcaccgatggaaccagtccactacgtcttagtccccttccacgatcccggatttggcccagtcttcaccactagcgacccagacagcttctggcagcagctcaatgagatccacgctcttggcggaggcgatgagcctgagatgtgtctttccgccctgcagctcgctctgctgcataccccccctctgagtgatattttcgtgtttacagacgcctcacctaaggacgcctttctcacaaatcaagtcgaaagtctgacccaagaaaggcgttgtcgggtcacatttctggtgacagaggatacttctagagtgcagggcagggctcggcgtgagatactgagtcctctgcgctttgaaccttataaagctgtggccctggcttctgggggagaagtcatcttcacaaaagatcaacacattagggatgtggccgctatagtcggcgagagcatggccgcacttgtgaccctgccgttggatcctcctgtagtcgttcccggtcagccattagtgttcagcgtagatggattattgcagaagataacagtgcgcatccatggagatattagttcattttggattaagaatccagcaggagtgtctcaaggccaggaagagggagggggacctctgggccatacaaggcgattcggccaattctggatggtcacaatggatgatcctccacagacaggcacttgggagattcaagtcacagcagaggacactccaggggtgagagtgcaggctcagacctcgttggacttccttttccacttcggcatacctatggaggatggaccacaccctggcctgtatccactgacccaacccgtggcaggcctgcagacccaactgctcgtggaggtcacagggctcgggtctagagctaaccctggagatcctcagccacacttctcccacgtcatcctgaggggcgttccggaaggtgcagaactgggccaagttcctttagagccggtggggccacccgaacgcggactgctagctgcctcactgtcgcctacactgttgtctacccccagaccattttctttggaattaattggccaggatgctgccggaagaagattacacagggcagcaccacagccgtctacggtggtgccagtgctcttggagctgtccggcccttcaggattcttggcccctggcagtaaggtgcccctgagcttgaggattgctagtttttccgggcctcaggatctcgacctccgcacctttgtgaacccctcattctctctcacctctaatctgtcaagagcgcaccttgagctgaatgagtcggcatgggggaggttgtggctggaggtcccggacagcgccgctcccgatagcgtggtgatggtgacagtaacagcgggaggaagagaggccaacccggtccccccaacgcatgcttttctcaggctgctggtttccgccccagcccctcaagttaggaaccactattttccgtctcagggccctgctcatcatccatatcgtctaatatag

SEQ ID NO: 218772 - DNA, 2881 bp, Artificial Sequence
  derived and/or modified sequence
cctggcgtgggctgctgcctgtggctttgggcaggcaggagcgaaagggccaggggttgcctgtcctcccccaccctgttgaggccttcctccccctctgctgagcctcggttaattataactctgacctaagtgccctgtgacgtcaagcccgggccagccctgcccaggagacccagcaaccaggtccatgtctcagccatgctccccacggaggtcccccaatcccacccgggcccctcagcgttgcttctgctgcagctgttgctgccccccacatctgccttcttccccaacatctggagcctgctggctgcccctggctccatcacccaccaagacctaactgaggaggcagcgctcaacgtcaccctgcagctcttcctggagcagccacccccaggccgcccccctcttcgtcttgaggacttcctgggtcgaacactccttgctgatgacctctttgccgcctactttggacctggttcttctcggcggttccgagcagccttaggtgaggtgtctcgtgccaatgcagcccaggacttcctgccaacttccaggaatgaccccgacctgcactttgatgctgagcgactgggtcagggacgcgcgcgcctggtaggggctctgcgggagaccgtggtggcagccagggcccttgaccacaccctggctcgccagcgcctcggggctgcacttcatgccctgcaggatttctacagtcatagcaactgggtggagctgggcgagcagcagccacaccctcacctcctctggccaaggcaggagctccagaacctggcacaagtggccgatcctacctgctccgattgcgaggagttgagctgccccaggaattggctgggcttcacactcctcacctctggctactttggaactcatcccccgaaacctccagggaaatgtagccacgggggccattttgaccggagcagctcccagccaccgaggggaggcatcaacaaggacagcacatccccaggcttctcccctcaccacatgctgcacctccaggctgcaaaactggcccttctagcctccatccaggccttcagccttctgcgaagccgcctgggagacagggatttctccaggctgctggacatcaccccagcctccagcctgagctttgtcctggacaccacgggcagcatgggtgaggagatcaacgctgccaaaatccaggctcgccaccttgtggagcagcggagaggcagccccatggagcctgtccactatgtcctggtgccttttcatgacccagggttcggccctgtctttacaaccagtgaccctgacagcttctggcaacagcttaatgagatccatgccttggggggtggagacgagcctgagatgtgcctgtcagccctgcagctggccctgctgcacacacctccactctcagatatctttgtcttcacggatgcctcccccaaggatgcctttctcaccaaccaggtggaatccctgactcaggagcggcgctgccgggtaacattcctggtgactgaagatacatcaagggttcagggtcgagctcggcgtgagatcttgtcccctctgcgttttgagccatacaaagcagtggccctggcctcaggaggagaggtgatcttcaccaaagaccagcacattcgagacgtggcagccattgttggggagagcatggctgccctggtgactcttcccctggaccctcctgttgtggtgcctgggcagccacttgtgttcagcgtggatgggctgctccagaagatcacagtccggatccacggagacatcagcagcttctggatcaagaaccctgcaggggtctcccagggccaggaggaaggcgggggtcctctaggtcacactcgccgctttgggcagttctggatggtgaccatggatgaccctccacagacaggaacctgggagatccaggtcacagctgaggacacccctggggtgagagtgcaagcccagacctccctggacttcctcttccactttgggatccccatggaggatggaccccaccctggcctctaccccctgactcagccagttgcaggtcttcagacccagctgctggtagaagtgacagggttgggttccagagccaatcctggggatcctcagccgcatttctcccacgtcatccttcgaggggtcccagagggtgccgaactaggccaggtgcccttggagcccgtgggacctccggagcgaggtctcctcgcagcctcgctgtcgcccacgctgctgtcaacccctagacccttctccctggagctgattggccaggacgcagcggggcggcgcctgcacagggctgcccctcagcctagcactgtagtccctgtccttctggagcttagtggcccctcgggtttcttggccccgggcagcaaagtcccgctcagtctccgcatcgccagcttctcgggccctcaggatcttgaccttaggactttcgtcaaccccagcttctccctcacctccaacctctccagggctcacctggaactgaatgagtcggcctggggccgcctgtggctggaggtcccagattcagcggccccggattccgtggtgatggtgactgtgactgcagggggacgagaagccaacccagtacccccgactcatgctttcctccggctcctggtatcggccccagccccgcaggaccggcacaccacccctaccggctcatctgacccgatcctcaccacggccacccctgccttttcccccttcacattggtggctcaaggcagggctggggcagggctggctgcgggcagcccctggtggggcacagttggaggggtgctgcttctgctaggcctggcctcctggtgacaca

SEQ ID NO: 218773 - DNA, 2942 bp, Artificial Sequence
  derived and/or modified sequence
ctcactcacctccgcactgcagccaagggaggcccgccctggcgtgggctgctgcctgtggctttgggcaggcaggagcgaaagggccaggggttgcctgtcctcccccaccctgttgaggccttcctccccctctgctgagcctcggttaattataactctgacctaagtgccctgtgacgtcaagcccgggccagccctgcccaggagacccagcaaccaggtccatgtctcagccatgctccccacggaggtcccccaatcccacccgggcccctcagcgttgcttctgctgcagctgttgctgccccccacatctgccttcttccccaacatctggagcctgctggctgcccctggctccatcacccaccaagacctaactgaggaggcagcgctcaacgtcaccctgcagctcttcctggagcagccacccccaggccgcccccctcttcgtcttgaggacttcctgggtcgaacactccttgctgatgacctctttgccgcctactttggacctggttcttctcggcggttccgagcagccttaggtgaggtgtctcgtgccaatgcagcccaggacttcctgccaacttccaggaatgaccccgacctgcactttgatgctgagcgactgggtcagggacgcgcgcgcctggtaggggctctgcgggagaccgtggtggcagccagggcccttgaccacaccctggctcgccagcgcctcggggctgcacttcatgccctgcaggatttctacagtcatagcaactgggtggagctgggcgagcagcagccacaccctcacctcctctggccaaggcaggagctccagaacctggcacaagtggccgatcctacctgctccgattgcgaggagttgagctgccccaggaattggctgggcttcacactcctcacctctggctactttggaactcatcccccgaaacctccagggaaatgtagccacgggggccattttgaccggagcagctcccagccaccgaggggaggcatcaacaaggacagcacatccccaggcttctcccctcaccacatgctgcacctccaggctgcaaaactggcccttctagcctccatccaggccttcagccttctgcgaagccgcctgggagacagggatttctccaggctgctggacatcaccccagcctccagcctgagctttgtcctggacaccacgggcagcatgggtgaggagatcaacgctgccaaaatccaggctcgccaccttgtggagcagcggagaggcagccccatggagcctgtccactatgtcctggtgccttttcatgacccagggttcggccctgtctttacaaccagtgaccctgacagcttctggcaacagcttaatgagatccatgccttggggggtggagacgagcctgagatgtgcctgtcagccctgcagctggccctgctgcacacacctccactctcagatatctttgtcttcacggatgcctcccccaaggatgcctttctcaccaaccaggtggaatccctgactcaggagcggcgctgccgggtaacattcctggtgactgaagatacatcaagggttcagggtcgagctcggcgtgagatcttgtcccctctgcgttttgagccatacaaagcagtggccctggcctcaggaggagaggtgatcttcaccaaagaccagcacattcgagacgtggcagccattgttggggagagcatggctgccctggtgactcttcccctggaccctcctgttgtggtgcctgggcagccacttgtgttcagcgtggatgggctgctccagaagatcacagtccggatccacggagacatcagcagcttctggatcaagaaccctgcaggggtctcccagggccaggaggaaggcgggggtcctctaggtcacactcgccgctttgggcagttctggatggtgaccatggatgaccctccacagacaggaacctgggagatccaggtcacagctgaggacacccctggggtgagagtgcaagcccagacctccctggacttcctcttccactttgggatccccatggaggatggaccccaccctggcctctaccccctgactcagccagttgcaggtcttcagacccagctgctggtagaagtgacagggttgggttccagagccaatcctggggatcctcagccgcatttctcccacgtcatccttcgaggggtcccagagggtgccgaactaggccaggtgcccttggagcccgtgggacctccggagcgaggtctcctcgcagcctcgctgtcgcccacgctgctgtcaacccctagacccttctccctggagctgattggccaggacgcagcggggcggcgcctgcacagggctgcccctcagcctagcactgtagtccctgtccttctggagcttagtggcccctcgggtttcttggccccgggcagcaaagtcccgctcagtctccgcatcgccagcttctcgggccctcaggatcttgaccttaggactttcgtcaaccccagcttctccctcacctccaacctctccagggctcacctggaactgaatgagtcggcctggggccgcctgtggctggaggtcccagattcagcggccccggattccgtggtgatggtgactgtgactgcagggggacgagaagccaacccagtacccccgactcatgctttcctccggctcctggtatcggccccagccccgcaggtgaggaaccactactttccatcacagggaccggcacaccacccctaccggctcatctgacccgatcctcaccacggccacccctgccttttcccccttcacattggtggctcaaggcagggctggggcagggctggctgcgggcagcccctggtggggcacagttggaggggtgctgcttctgctaggcctggcctcctggtga

SEQ ID NO: 218774 - RNA, 2559 nt, Artificial Sequence
  derived and/or modified sequence
augcugccuacugagguaccacaaagucacccagggccaagcgcccuucuuuugcugcaacuucugcucccuccgacaagcgcguucuucccuaacaucuggagccuccuggccgccccuggaucgauuacacaccaagaucucacagaggaagccgcacugaauguaacgcuucagcuguuccuggagcagccaccaccaggcagaccacccuugcgcuuagaagacuucuuagggcgcacacugcuggcagacgaccucuuugcggccuacuuugggccuggcagcagcagaagauucagagcugcuuuaggugagguaucccgcgccaaugccgcacaggauuuucucccaacaagccguaacgacccagaucugcauuuugacgccgagagauuggggcaaggcagagcuaggcuagugggagcuuuaagagagacugucgucgcggcccgcgcccuugaccacacccuggcuagacaaagacuuggagcugcauugcaugcuuugcaggauuuuuauucucauaguaacuggguggagcugggagaacagcagccacauccccaucuccuuuggccaaggcaggagcugcaaaaucuggcccaaguagcagacccaacuuguagcgacugcgaggaauuaaguugucccagaaacuggcugggcuuuacucugcugaccucuggguacuucggcacucauccuccaaaaccccccggaaaguguucccacggaggccacuucgacagaagcucuucacagcccccucgcggcgggaucaauaaagauagcaccagccccggauucuccccucaccacaugcugcaccugcaggcagcgaaacuagcucuucuugccaguauacaagccuucucuuuacuccggucaaggcugggcgaccgggacuuuucgagauugcuggauaucacccccgcuucaagccuaagcuucguucuugauacaaccgggucaaugggagaagagauuaaugcugccaagauccaggcgcgucaccugguggagcaacgccgcgggaguccuauggaaccagugcacuacguccucgugccauuucacgaccccggguuuggccccguuuuuacaaccucugauccggauucguuuuggcagcaacucaacgagauccacgcacuuggaggaggggacgagccagagaugugucugucugccuuacagcuagccuugcuucauaccccaccacugucagauaucuucgucuucacugaugcgagccccaaggaugccuuccuuacuaaccagguagaaucgcugacgcaggagcggagaugucgcguuacauuuuugguuacggaggacaccucacgcgugcaaggucgggcuaggcgggagauccucagcccucuacgguuugaacccuacaaggcuguggcuuuagcuuccggaggcgaggugaucuuuaccaaagaccagcauauuagggauguggcugcaauugucggugagucuauggcggcuuuaguaacccuuccgcucgacccacccguugugguaccuggacagccccuugucuucaguguugauggcuugcuccagaaaauaacugucagaauccauggggauaucucuucguuuuggaucaagaauccagcuggcgugucccaaggccaggaagagggcggcggacccuuggggcacacccgucgcuuugggcaauuuuggauggugacuauggaugauccuccccaaacagggaccugggagauccaggugacugcugaggacacaccggggguccguguccaggcacagaccucucucgauuuccuauuccauuucggcauacccauggaggacgguccccacccagggcuuuacccucugacccaaccuguggccggccuccagacccagcuucuaguggaaguuacuggccugggcucccgcgccaacccaggggacccucagccacauuucucucaugugaucuugagaggagugcccgaaggcgccgagcugggacagguuccacucgaacccguggggccuccugaacgagggcugcuggcugcaucucugagccccacuuuacuguccaccccuagacccuucucacucgagcucaucgggcaagaugcugccggccggaggcuucacagagccgccccacagccuaguaccguggugcccguccugcuggagcugucugggcccucaggauuucuggcuccuggcucuaaggugccccucagccuacggauugcuucuuucucugggccucaggaucuugaucugagaacauucguaaauccaucauucaguuuaacuuccaaucuaucccgagcucacuuggagcugaacgagucggcauggggccggcuuuggcucgagguacccgauucagcggcacccgauagcgucgucaugguuacugucacagcagggggacgggaagcaaaucccguccccccgacccacgcauuccugcgccuccuggugucggccccggcaccacaggucagaaaccacuauuuuccaucccagggacccgcccaucacccauaccgguugaucuag

SEQ ID NO: 218775 - RNA, 2676 nt, Artificial Sequence
  derived and/or modified sequence
auguuaccuacagaaguuccacagucccaccccgggccuucagcacuuuugcuccugcagcuacugcucccacccacaucggcauucuuuccaaacauauggaguuuauuagccgcgccaggguccaucacccaucaggaucuuaccgaagaggccgcuuuaaauguaacacuccaguuauuuuuagaacagccgccuccuggacggccgccccuuagauuggaggauuuccucggacgcacacugcuugcugaugauuuguuugccgcguacuuuggaccugguucuagcaggcgguuccgcgcugcccugggggaggugucccgugcaaaugcugcccaagauuuucugcccaccagucgcaaugaucccgaccuacauuuugaugcagaaaggcucggacaaggccgcgcaagacucguuggggcauuacgagaaacagucguggcagcucgggcucuggaucacacccuggcaaggcagcgucugggugcggcucuucacgcacuacaagauuucuauucacacuccaauuggguugaacucggggaacagcagccacacccccaucugcuguggccccgacaagagcugcagaauuuggcucagguggccgacccaacaugcuccgauugcgaagaacuguccugcccucgcaacuggcugggguucacuuugcucacuagcggguauuucgggacucauccccccaaaccccccgggaaaugcucacauggggggcacuucgacagguccucaucccagccuccacgcggagggaucaauaaagacagcacuaguccaggcuuuucaccacaccauaugcuucauuugcaagcugcgaaauuagcccuccuggcguccauacaggcauucucacuccuccgcuccagacuuggcgaccgggacuuuaguagacugcucgauauuaccccugcaucaucacugaguuuugugcucgauacaaccggcucuaugggggaggaaaucaacgcggccaagauccaggccaggcaccuuguagagcaacgccgcggaagcccaauggaaccugugcacuaugugcuugugccauuccacgaucccggcuucggaccagucuuuacaaccucugaccccgacucauuuuggcaacagcuuaacgagauccacgcucucggcgguggugacgagcccgagaugugcuuaucugcguugcagcuugcacuguugcauaccccaccccugagcgacaucuuuguguucaccgaugccucuccaaaggacgccuuuuuaaccaaucaggucgagagccuuacacaggagaggcguugcagagugacuuuucuuguuaccgaagauacaagccgagugcagggccgggcccggcgcgagauucugaguccucugcgcuuugaaccuuacaaggccgucgcgcuggccucuggaggcgaggugaucuuuacaaaggaccaacacauuagggauguugccgcgaucguuggcgagagcauggcugcacucgugaccuuaccucucgacccacccgugguggucccaggacaaccuuugguguucucaguugacggauuauuacagaaaauuacgguucggauucauggcgacauuucuagcuuuuggauuaagaauccugccggcgucagucagggccaagaggagggcggggggccccuuggucacacccggagauucggccaauuuuggauggugacaauggaugauccuccucaaaccggcacgugggagauucaggugacggcagaggacacuccaggugugcgugugcaagcacagaccagcuuagacuuccuguuucauuucggaauuccuauggaggacggaccucaccccggucuguacccucugacacagccaguggcaggauuacagacucagcuccugguugaaguuacggggcuagggagccgagcuaauccaggcgacccccagccucauuuuucacauguuauccugcgcggagugccugaaggcgcugaguuaggacaagugccccucgagcccguggggccccccgagcgcggucugcuggcugccucauugaguccaacccugcuuucuacaccacgcccuuucucccuggaguuaaucggccaggaugccgccggcaggaggcugcacagggcugccccucagccuagcacugugguacccguacuccucgagcugucagggccaucaggauuccucgcuccuggcucaaaaguuccucugucccucagaauugccucauuuuccggcccucaggacuuggaccuacgcaccuucgucaauccaucauuuuccuugacuaguaaucuguccagggcccacuuggagcugaaugaguccgcgugggggcggcuuuggcuggaggucccugauucagccgcuccugacucuguggucaugguaacuguuacagcaggggggcgugaagcaaauccugucccgcccacucaugcuuuccuuaggcugcuggucucugcuccagccccacaggaccggcacacaacccccaccggaagcucugacccaauccugaccacagcaacuccugccuucucccccuucacccucgugacucagggaagggccggagccggacuugcugcuggaagcccauggugggguaccgugggcggggugcucuuacugcugggccuugcaaguugguag

SEQ ID NO: 218776 - RNA, 2676 nt, Artificial Sequence
  derived and/or modified sequence
auguuaccaaccgaggugccacagucgcaccccggaccauccgcuuugcuauugcuacagcuguugcucccacccacaucugcuuuuuucccaaacaucuggucucuccucgcagcccccggcagcaucacccaucaagauuuaaccgaggaagcagcccugaacgugacccuacagcuguuucuagagcaacccccaccuggucgaccuccuuugcgccuggaggauuuucugggcaggacauugcuugcugaugaucuguucgcagcuuacuuugggccgggcucuucacgccgguuccgggccgcguugggagaggugucacgcgcaaacgcugcacaggacuuuuuaccgacgucaagaaaugacccagaccugcacuucgaugcugagcgccugggacagggaagggcgcggcucgucggggcucugagggagaccguugucgcggccagagcccuggaucauacucuggcuagacaaagacugggagccgcacugcaugccuuacaggacuuuuacucacacucaaauuggguggaacugggcgagcagcagccucauccacaccuguuauggccgaggcaggaauugcagaaccuugcacagguagcugaucccacaugcagcgacugugaagagcugagcuguccccgcaauuggcucggguuuacccuucuuacaagcggcuacuuuggcacccaccccccgaaaccuccuggcaagugcucgcauggcgggcauuuugauaggaguagcucucaaccgccgcgaggugguaucaauaaagacucuacauccccaggauucuccccccaucauaugcugcaccuccaagccgccaagcuggcucucuuggccucuauccaggcguucucccuacuaaggucccgccugggcgacagagauuuuucaagguuguuggacauuacaccagcaaguucccugagcuuuguacuggauacaacugggagcaugggagaggaaaucaaugccgcaaagauucaggcacggcauuugguagaacagcgccgcggcuccccuauggaacccgugcacuacguccuggucccuuuccacgaucccggcuuuggaccaguguuuacuaccuccgauccugauagcuucuggcaacagcugaaugagauccacgcccugggaggcggcgacgagcccgagaugugccugagugccuuacagcuggcucuacugcacacaccgccucuguccgacauauuuguuuucaccgacgccagccccaaggaugcauuccugacuaaccaaguagaaagccugacacaggagcgucguugccgcgugaccuuucuuguuaccgaagacacgagcagaguccaggggagagcacggcgggagauucugucaccauuaagauuugaaccauacaaggccguggcccuggcuucagggggggaagugauuuucacaaaggaucagcacauuagagauguggccgcaauaguaggagagucuauggccgccuuggugacucugccccuggacccucccgugguaguuccugggcagccauugguguucucuguggaugggcuccuccagaaaaucacuguccgcauacauggcgacaucagcuccuuuuggauaaagaauccugcugggguuagccagggacaggaggaagggggaggaccacucggccacacgcgacgcuuuggccaguucuggauggucacuauggacgacccaccacagaccggaacgugggaaauccaggugaccgccgaagauacccccggcguccgggugcaggcccaaacaucucucgauuuccucuuccacuuuggcauucccauggaagaugguccacauccaggacuguauccucuuacccaacccgucgcuggauuacagacucagcugcugguagaagucaccggucucgggucucgcgccaaucccggcgauccccagccacauuuuucacacgucauucuacggggagucccugagggcgccgagcuggggcaggugccucuugaacccguaggaccccccgagaggggucuucuggcugcuucucuaagcccuacguuacugucaacgccccgccccuuuagucuggaacugaucggccaggaugccgcugggagacggcugcaucgcgcugccccucaaccuagcacaguggucccaguucugcuggaacucucaggcccuuccggcuuucucgccccagguucgaaggugccacugucccuacggauugccuccuuuagcgguccccaagaucucgacuugaggacauuugugaacccaucguucucucugaccucaaaccucucuagagcacaucucgagcugaaugaguccgcauggggcagguuguggcuggaggugcccgacagugccgccccugauuccguugugaugguaacuguuacggcgggcgguagagaggcuaaccccguccccccuacacacgcguuccugcgccugcugguguccgcucccgcgccucaggaucgccacacuacacccacaggauccagcgauccaaucuuaacaacagcuacaccugccuuuucucccuuuacguuggugacucagggaagggcuggggcaggacuggcagcggggucccccugguggggcaccguggguggagugcuucuacuacucgggcuugcaucaugguag

SEQ ID NO: 218777 - RNA, 2676 nt, Artificial Sequence
  derived and/or modified sequence
augcucccgacggaaguaccgcagucucacccuggaccuagcgcccugcucuuacugcagcuguugcugcccccuaccagcgcuuuuuuuccuaauaucuggucccugcuggccgccccagggaguaucacucaucaggacuuaacugaggaggcagcgcucaaugucacgcugcaguuauuucuggaacagccgccgccagguaggccuccgcugcgacuugaagacuuucugggacgcacacugcucgcugaugaccuguucgcggcuuacuucgggccuggcagcucuagacgguucagagcugcguuaggggaagucaguagagcuaaugcagcccaagacuuccugccuaccucaagaaacgacccggaccuacacuuugaugcagaaaggcucggacagggcagggcccgacuaguuggagcucuuagagagacugugguggccgcgcgugcccuagaccauacguuggcccgccaaagacucggugccgcccuacacgcucugcaagauuuuuauucucacaguaacuggguggagcugggugaacagcagccucauccacauuugcucuggcccaggcaggagcugcagaaucuugcacaggucgcugaccccacaugcucggacugcgaagaacugagcugcccgcguaacuggcuuggguuuacucugcuuacaucagguuauuuugggacucaccccccaaagccuccuggaaaguguagucacgguggccacuucgauagaucuagcucccagcccccacgcggugggauuaacaaagacagcaccucccccggcuuuagcccacaccacauguugcaucugcaggcagccaagcucgcgcuccucgccagcauucaggcuuucagucugcuuagaucuagauuaggagacagggacuucagucgccuguuggacauuacacccgccagcagccuaaguuuuguguuggauaccaccggaucaaugggggaggaaaucaaugccgcaaagauccaggcucgccaucugguggaacagcgcagggguucucccauggaacccgugcauuauguccuggugcccuuucaugacccaggcuucgggcccguauucacgacuuccgaucccgauagcuuuuggcagcaguugaaugaaauccacgcucuuggcggaggagacgagcccgaaaugugucugucagcccuccaacuggcucuccuucacacuccuccacucucugauauuuucguguuuacugacgcuuccccgaaagacgccuuuuugaccaaccagguagagagucuaacccaggaacgucgaugucgggucacuuuccuuguuaccgaggacaccagccgcguucagggcagagccaggcgcgaaauucucuccccacuuagauucgagcccuacaaggccguugcacucgcaucuggcggcgagguuaucuucacuaaggaccagcacauuagggaugucgccgcuaucguuggcgaguccauggcagcgcucgucacacucccccuggaucccccaguaguuguuccugggcagccacuaguuuucaguguggacgggcugcugcagaaaaucaccguacgcauccacggugacauuuccucauucuggaucaaaaaccccgcaggagucucgcagggacaggaagaggguggcggaccccuaggacauacacgccguuuugggcaguuuuggauggucaccauggacgauccuccccagacugguaccugggagauccaggucacagcagaagacacgcccggcguccggguucaggcucagacuucucuggacuuccucuuccauuucggaauuccaauggaggaugguccccaccccggccuuuacccgcucacccaaccaguugcaggucuccagacccagcucuugguggaaguuacagggcugggcucucgggcgaaucccggggacccacagccacacuuuagucauguuauucugagaggugucccugagggugccgagcuuggccaggucccacucgaaccuguugguccuccugagcguggucuccuugcugccucccuuucaccgacuuugcucuccacuccccggccauuuucuuuggagcuaaucggucaggacgcagccgggcgacgguugcacagggcugccccccagcccucuaccguggugcccguacuacuggagcucagcggcccuucagguuuccuagccccggguaguaaaguucccuuaagccuccgcauugccagcuucaguggcccacaggaucuggaccuucgcacuuuuguuaacccuaguuuuagccuuacgucuaaccuaagucgagcucaccucgaacucaacgaguccgcauggggccgccuguggcuugaggugcccgacagugccgcacccgacagcgucgucauggugacaguuacugccggcggucgcgaagcuaauccggugccgccaacucaugcuuuuuugaggcugcuugucuccgcuccagcuccccaggauagacauaccacaccaaccggcuccucugauccuauuuugaccacagcuacuccagcuuucucaccuuuuacccuggugacucagggcagggcaggcgcaggccucgcugcuggaagucccugguggggaaccgucggcggaguguuacuccuccucggccuugcuuccugguag

SEQ ID NO: 218778 - RNA, 2676 nt, Artificial Sequence
  derived and/or modified sequence
augcugccuacugaaguaccacaaagucaucccggaccaagugcucuccuccuguuacagcuccuccugccaccaaccucggcguucuuccccaacauuugguccuuacuugcagcacccggguccaucacacaucaggaucugaccgaggaagccgcccucaauguuacacuacaacuuuuuuuggagcagcccccacccggccguccccccuuacgucuggaggacuucuugggccggacuuuauuggccgaugaucucuuugccgcauauuuuggaccagguagcuccaggcgguucagggcggcacuaggcgaaguuucucgcgccaaugcagcccaggauuuccuacccacuucaagaaacgauccggaccuccauuuugacgcugaacgcuuaggccagggcagagcacgauuagucggcgcucugagagaaaccgugguggcugccagggcuuuagaccacacgcuggcacggcagcggcugggcgccgcccugcacgcuuugcaagacuucuauagccacuccaauuggguggagcucggagagcagcaaccccacccucaucuguuauggccgaggcaagagcuacaaaaccuggcccagguagccgacccgacaugcagcgauugugaggagcuguccuguccgagaaacuggcuaggauucacccuucugacuuccggauacuucggaacccacccucccaagccccccgggaaauguucccaugggggucacuucgacagaucauccucacaaccaccgcgggguggaaucaacaaggacucaacuucucccggguuuagcccgcaucauaugcuccaucuccaagccgcuaaguuagcacugcuagcaucaauacaagccuucucacugcuuaggagccgacugggcgaucgggacuuuuccaggcuucucgauaucacaccagcaucaucccugaguuucguccuggauacaaccgggaguaugggcgaggaaaucaacgcagccaaaauucaggcaaggcauuuaguagaacagaggaggggauccccaauggagccggugcacuauguucuggugccauuucaugaccccggauuuggucccguuuuuaccacuucugaccccgacagcuucuggcagcaacugaacgaaauacaugcgcuuggcgguggagacgaaccagagaugugucugucagcacugcaacuggcccuccuccacacaccuccacuauccgauauuuuugucuucacagacgccucacccaaagaugccuuucugacaaaccaggucgagagcuuaacccaggagagaaggugucgcgucacauuccugguuaccgaggacaccuccagagugcagggccgugcccgccgggagauccucucaccacugcgauuugaacccuacaaagccguggcacuggcaucaggcggagaaguaauuuuuacuaaagaucaacacauccgggaugucgcagcaauugugggugaaagcauggcagcacuagugaccuugccgcuugacccaccagugguggugcccgggcagccccucgucuucucuguggauggacuccugcaaaagauuaccguucgaauacauggcgauauaucuuccuuuuggaucaagaauccggcaggcguaucucagggacaggaggaaggugguggcccucuuggccacacaagacgcuuuggccaguucuggauggucaccauggaugacccaccccagaccgggacaugggagauacaaguuacagccgaagacacuccaggggugcgggugcaggcccagaccucccucgacuuccuauuccauuuuggcaucccuauggaggauggaccccaucccggacuguacccacucacucagcccguagcuggccugcagacgcagcuucucgucgaaguaaccggcuuagggucccgcgcuaacccaggcgauccacagccacauuucucacaugucauucugcgaggcgugcccgagggugccgaguuaggccaaguuccacuugagccagucgggcccccugaaagaggacugcuggccgccucacugagcccuacacuucugagcaccccucgcccuuuuucucuugaacuaaucggccaagacgcugcggguagaaggcugcaccgagcggcuccacagccuucaacaguggugccagucuuguuggagcuaucaggaccaucaggcuuucuggcccccggcaguaagguuccucucucucuuaggauugccuccuucagcggaccgcaggaccucgaccugcggaccuucgugaacccuucuuuuucucuuacaucuaaucugucccgugcccacuuggaacugaaugagucagcguggggucgcuuguggcuggaggugccagacucugcugcuccugauagugucgucauggugacagugacugcaggggggagagaggcaaacccugucccacccacacacgccuuucugcggcugcugguuucugcccccgccccucaggaccgacauaccacucccacugguucuagcgauccuauacuaacaaccgcaacaccagccuucucucccuuuacauuaguaacacaaggccgggccggcgccggucuggccgccggaaguccaugguggggaacagucgggggcguucuccugcugcuuggacuagcaucuugguag

SEQ ID NO: 218779 - RNA, 2676 nt, Artificial Sequence
  derived and/or modified sequence
auguugccgacggagguaccucagagccacccuggcccauccgcuuuacuguuguugcaguuacuacugcccccuacuagugcauucuucccuaacauuuggucccugcuggccgcccccggaagcaucacccaucaggaucuaaccgaagaggcagcccugaacgugacacuucagcuguuccucgaacaaccccccccaggaagaccgccucuacgccucgaagauuuucuuggacgaacacugcucgcagaugaucuguuugcugccuacuuuggcccugguucuucucgccgauuuagggccgcccugggugaggugaguagagcgaacgcagcgcaggauuuccugcccacuucuaggaacgaccccgaccuucauuuugacgccgaacgacugggucagggucgggcacgucugguuggugcgcugcgggagacugugguggcugcacgagcauuagaucacacacucgcuaggcagcggcugggcgccgccuugcaugcccuccaggauuucuauucgcacucaaauuggguggagcuuggcgagcagcaaccacacccccaucuuuuauggccaaggcaagaauuacaaaaccucgcucagguggccgauccgaccuguagugauugcgaagaauugagcuguccacggaacuggcuggguuucacauuguuaacgucgggguacuucggaacccacccaccuaagccgcccggcaagugcucccaugggggucacuuugaucguagcucaagucagccaccuagaggagguauuaauaaagacucuacuagucccggcuucucaccacaucauaugcugcaccuacaagcagcgaagcuggcauuacucgcgagcauccaggcuuucagccugcugagaucccgacugggugaccgcgauuuuucccggcugcuggauaucaccccagcaucuucacuaagcuucgugcucgauaccacaggcuccaugggcgaagaaaucaaugcggcaaagauccaggcccgccaucuuguugaacagcggcgagguaguccuauggaacccguucauuacguacuggucccuuuccaugacccuggcuuuggccccguguuuacuacaagcgauccggauuccuuuuggcagcagcugaacgagauucacgcucuggguggcggagaugaacccgaaaugugccuaagugccuuacaguuagcccugcuccacacucccccucuaagugauauuuucguguucaccgaugccaguccuaaagacgcuuuuuugaccaaccaggucgagucacugacccaggagcgccggugcagagugaccuuuuuagucacagaagauaccucgcgcguccaggggagagcucgucgcgagauucuguccccucugagauucgaaccuuauaaagcaguugcgcuggccagugguggggaggugaucuuuaccaaagaccagcacauuagggacguagcugccauugucggggaaucaauggccgcucuagucacucugccuuuggauccuccaguaguaguccccggacaaccccugguguuuaguguugaugggcuccuucaaaaaauuacugugcggauucacggggauauuucuucuuuuuggaucaagaaccccgcaggagugagucagggucaagaggaaggcggcggaccgcuuggccacacgcgccgguucgggcaguuuuggaugguaacuauggacgaucccccccagacuggaacaugggagauacaggucacagcugaggauacaccugguguccgcgugcaggcucagacgucucuagauuuucuguuucacuucggcauucccauggaggacgguccgcaucccggguuguauccacuuacccagccuguagccggacugcagacucaguugcucgucgagguaaccggcuugggcagcagagcuaaccccggagauccacaaccccauuucagucauguuauccuucgcggcgugcccgaaggcgcugaguuggggcagguaccgcuggagccagucgggcccccugagaggggacuccuggcggccucacucucucccaccuuacugucaacuccacgccccuucagccuggaacuuaucggucaggacgcugcaggcagacggcuacaccgggcugcgccucagccuuccacugugguccccguguuacuggaacugagcggacccucuggauuucucgccccaggcaguaagguacccuugagccuuaggaucgccuccuuuuccgggccccaggaucucgaucuacguacauucguuaacccaucuuucucucugacaagcaaccuuucgcgcgcccaccuggaacuuaaugaaucagccuggggucgccuuugguuagagguuccagauucggcugcacccgacuccgugguuaugguuacagucacagcuggaggccgcgaagccaaccccguuccccccacucaugcauuucugagacuccucgucagcgcccccgccccgcaagaucggcauaccacaccuacaggcucaucagacccuauucuuaccaccgcuacacccgcauuuucacccuucacccuggugacucagggccgcgcgggcgcaggacuggcugcuggaucaccuugguggggaaccgucggcggcguucuguuguugcugggucucgccagcugguag

SEQ ID NO: 218780 - RNA, 2559 nt, Artificial Sequence
  derived and/or modified sequence
augcucccaaccgaggucccccaaucgcacccaggaccuuccgcucuucugcucuugcaauuguuacugccgccaacuagugccuuuuuuccaaauaucuggucccugcucgccgcuccaggaucgaucacucaccaggacuugaccgaggaggcugcccuuaacgugacacuccagcuguuccucgagcagccgccaccugguagaccaccucuacgucuggaagauuuucuaggccgcacccugcuggcugacgaccuguucgccgccuacuucgguccagguucaucccggagauuucgggcagcucugggagagguuucccgggccaacgcggcacaagacuuccugccuacgucucguaacgacccagaucugcauuuugaugcggaaagacucggacaagggcgagcccgucuugucggugcucugcgggagaccguuguugccgccagagcccuagaucauacucuugccagacaacgcuuaggagcagcucugcaugcccuccaagauuucuacagccacucuaacuggguugagcuaggggaacaacagccccacccccaucuccuguggccacgacaagagcugcagaaccucgcccaaguggccgaccccacguguagugacugcgaagaacuauccugcccucggaauuggcuuggcuucacucugcucacuuccggauacuucggcacccauccccccaagccaccagggaaaugcucccacggcggacacuuugaccgauccuccagccagccaccacggggcggcauaaauaaggauagcaccuccccgggcuucaguccacaucacaugcuucaucugcaggcugccaaacuugcucucuuggccucgauccaggccuuuucccuucugcggagcagacugggggauagggauuucucuagauugcuggauaucacuccugcaagcucacugucguucgugcuggauaccacaggcucuaugggugaggagaucaaugcggcaaaaauucaggcuagacacuuggucgagcaacgacgcgguucuccuauggaaccgguccacuaugugcugguuccuuuccacgacccgggcuucggaccaguguucacaacuucugacccugacuccuucuggcagcaacucaacgagauucaugccuugggagguggcgacgagccugagaugugccugucugcucuacaauuagcccuuuugcauacgccaccacugagcgacaucuuugucuuuacagaugcgaguccaaaagacgccuuccucacuaaucaagucgaaucccuaacucaggaacgccggugccgcguuaccuuccuggucaccgaagacaccaguagaguccaagggagggcccgacgggagauucugucgccacuuagguucgagcccuauaaagccguggcuuuggcauccggaggagaaguuaucuucaccaaagaccaacacauccgcgacguggcggcaauugugggagaaagcauggcugcccucguuacucucccguuggauccuccaguagucguaccaggucagccucucguuuucaguguggacgggcugcugcaaaaaaucacggugcgaauccauggagauaucagcagcuuuuggaucaaaaauccugcaggcgugucacaagggcaggaagaaggggguggaccucucggacauacacgccgguucgggcaauuuuggauggugacaauggacgaccccccccagacugggacaugggaaauucaggucacugcagaagauacacccggcguucgcguacaagcccaaacaucuuuggacuuccuguuccacuuuggcauaccaauggaggacggcccucaucccggccuguauccacugacccagccaguugccggucuucaaacacaguuguuaguggaggucacaggccuagguuccagggcaaaccccggcgauccacaaccucacuucucccacguuauucugaggggcguacccgagggggcugagcucgggcaagucccacuggaaccagucgguccucccgagcgcgggcuacuggcagcuuccuuaucgccuacucuuuugucaaccccacggccauucucucuggagcugauuggucaggacgccgccggucgcaggcugcaucgugccgccccccagccaucuacgguggucccugugcuccuugagcucuccggaccuucagguuuucuggcucccggaucaaaggucccucugucgcugagaauagcuucuuuuagcggcccacaggacuuggaucugcguaccuuugugaacccuagcuucucccuaacuucgaaucugucucgcgcccauuuggagcugaaugagagugccuggggaagacuguggcucgagguacccgauucagcugcccccgauucagucguuauggugacugucaccgcgggaggaagggaggcgaacccuguuccacccacucacgcuuuccuuaggcuccugguuucagccccggcuccccaggugagaaaucauuauuucccaagucaaggcccugcgcaucacccuuaucgauugaucuag

SEQ ID NO: 218781 - RNA, 2559 nt, Artificial Sequence
  derived and/or modified sequence
augcugccuacagaagucccacagucacacccaggaccuucugcucuacuuuugcuucaguuacuccucccacccacauccgccuuuuuccccaauauuuggucccugcuagcagcccccggaucaaucacacaccaggaccucacugaggaggcagcccuuaauguuacacugcaauuguucuuagagcaaccaccgcccgggagaccgccuuuacggcucgaagacuuccugggccgcacgcuacuagcugaugaccuuuucgcugcauacuucggaccaggcaguucaagacgguuccgggcugccuuaggagaggucagccgagcuaacgccgcccaggacuucuuaccaaccuccagaaacgaccccgaccugcacuuugaugcagagagacuugggcaagggagggcgcggcuggugggcgcccuaagagagacaguggucgcggcccgggccuuggaucacacccucgcccgucaacgccugggagcagcauuacacgccuugcaggacuuuuacucccauuccaauuggguggaacugggggagcaacagccccauccgcauuuauuauggccacggcaagaguugcagaacuuggcacaggucgcagauccaaccugcagugauugugaggaacugagcuguccuagaaauuggcucgguuucacucuauugacaaguggcuacuucggcacccacccccccaaacccccuggcaagugcagccacgggggacacuuugauaggaguucuucccagcccccucguggcggcauaaacaaggacagcacaagcccaggcuucucgccccaucacauguugcaccuccaggccgcuaagcucgcacuucucgcuagcauccaggcguucagccuguuaaggucaagauuaggggacagggacuucucacgacuucuggauauuacucccgccaguucuuugaguuuuguguuggacacaacaggcucaaugggugaggaaauuaaugcugccaagauucaagcgcgacaucucguugagcagcgacgaggaucgccuauggagccaguccauuauguauuggucccguuccacgacccugguuuuggcccaguuuucacaaccuccgaucccgacucuuuuuggcagcagcuaaaugaaauccaugcccugggugggggcgaugagcccgagaugugccucucagcacugcaacuggcucuucugcauacucccccgcugagcgacaucuuugucuuuaccgaugcgagucccaaagacgccuuccucacuaaucagguggaaagccuaacccaggagcguaggugucgugugacauuucuggugacagaggacacaagccgugugcaaggccgcgccagacgcgaaauucucucuccacugcguuucgaaccuuauaaggccguggcccuggcaucagggggugaagugaucuuuacaaaagaccaacauauaagagauguagcagccauugucggugagucuauggcagcucugguuacacugccccucgaccccccaguuguggugcccggacaaccucuaguuuuuucagucgauggccugcuucagaagauuaccguacgcauccauggugauaucagcuccuucuggauaaaaaaccccgccgggguuagccagggccaggaagagggaggaggcccucucggacauacuagaagauuuggccaguucuggauggucacuauggaugaccccccacagaccggaaccugggagauccagguuacagcagaagacacacccggcguccgagugcaggcccaaaccucacuggauuuucuguuccacuucggcauaccaauggaggaugggccacauccaggccucuacccccuuacgcaacccgucgcgggccugcaaacacaacuguuaguggagguuacaggccugggaucucgggccaacccuggggacccccagccccauuuuucccacgucauucugcgcggggugccugagggggccgagcuaggccaagucccauuagaacccgugggacccccagaaagaggacuguuggcagccagucucuccccuacucuuuugucuaccccucggccguucucacuggagcucauuggacaagaugccgccggaagaagacugcaucgcgcggcuccucaacccuccacaguagugccaguucuguuagaacucucaggcccaucaggcuuucuagcccccgguuccaaagugccuuuaucauuacgcauugcauccuuuucaggaccucaggacuuagaccugagaaccuuugucaauccgucuuucucccucaccagcaacuugagccgugcacacuuggagcugaaugaaucagcauggggacggcuguggcuagaggugcccgauucugccgcccccgacuccguggucauggugacaguuacugcggguggacgagaagcaaauccgguacccccaacccacgccuuccuccggcugcuagucuccgccccagccccacagguucguaaccauuauuucccuagucagggcccagcccaccaucccuaucggcuuaucuag

SEQ ID NO: 218782 - RNA, 2559 nt, Artificial Sequence
  derived and/or modified sequence
augcucccaacggaagugccacagucacacccuggcccaagugcuuuauugcuucuccagcuacuuuuaccucccaccucagcauuuuucccgaauauauggagucuauuagccgcaccaggauccauuacccaccaagaccucacugaggaagccgcccuaaacguuacacugcagcucuuucuagagcagccuccaccgggacguccaccgcuacgacuggaggacuuucuuggacgcacucuccucgcggacgaucuguucgcagcguauuucggccccgggagcaguagaagauucagagccgcccugggcgaagugagcagagccaaugccgcccaggacuuccugccaacuucuagaaacgauccagaccuccacuuugaugcagaaagauuaggccaagguagagcccggcugguaggagccuuaagagagaccguggucgcagccagggccuuggaccacacccuugcacgccagaggcuuggagcugcccuacaugcucugcaggauuuuuacucacauucaaacuggguugaacuuggggagcagcagccucacccccaucuuuuauggcccagacaagaacuccaaaaccuggcccaggucgcagauccaacauguagcgacugcgaagagcucucuugccccaggaauuggcugggcuucacccucuuaacaucugguuauuucggaacucacccuccuaagccuccagguaaaugcagccauggcggacacuucgacagauccagcucccaaccuccgaggggcggcauuaacaaagacuccacguccccaggcuucaguccccaucacaugcugcacuuacaggcugcaaaauuagcccuucuggccagcauccaggccuucucccuacugagaucaaggcuaggagaccgcgacuuuagcagguuacuugauauuaccccagccagcucucuuagcuucguccuggacaccaccggaagcaugggcgaggaaaucaacgccgcuaagauucaggccaggcaccucguagagcagagaagagguagcccuauggaacccguccacuauguccuugucccguuucaugaccccggauuugggccuguauucaccacaagcgacccagacucuuucuggcaacaauuaaaugaaauucacgccuugggcgguggagaugaaccugagaugugucuuuccgcucugcagcucgcccuucugcauacaccaccgcugucagauauuuuuguguuuacagaugccagucccaaggacgcguuucucacgaaucagguggagagccugacccaggaacgacggugucgcgugacauucuuaguaaccgaagacacgucccggguacagggcagggcuaggagagaaauuuuguccccauugagauucgagccuuauaaagccguggcgcuagccaguggaggagaaguaaucuuuaccaaagaucagcauauacgggauguugcugccaucgugggugagaguauggcugcacuggugacauugccauuagauccccccguggugguucccgggcagccuuugguuuucagcgucgacggacuccugcagaaaaucacagugcggauucacggcgauaucagcagcuucuggaucaaaaacccagcaggagugucccaaggucaagaagaagggggagggccccuaggacacaccaggcguuucggucaauucuggauggugaccauggacgaccccccccaaacaggaacgugggagauccaggucaccgcagaggacacccccggagugcgugugcaagcgcagacaucucuggacuuucuauuccacuucgguauccccauggaggacggcccucacccugggcuuuacccacuuacucagccaguggccggccugcagacgcagcuccucguagaggugacagggcucggaucaagagcaaacccaggggacccacaaccacacuuuucccaugugauccuacggggggugccagaaggagccgagcuagggcaggugccucucgaaccagugggaccucccgagaggggguuacuugccgcaucccucucucccacacuguuaagcacgccccgaccuuucucauuagagcuuauuggucaggacgcggccggacgccgacuacaucgggcggcuccacagccgaguacagugguaccagucuugcuggagcugagugggccuucgggauuucuggcucccggcaguaaagucccccuuagucucaggaucgccucuuucucaggaccacaggacuuagaucuucgaacguucguuaaccccaguuucagccuuacaagcaaucugagccgagcacaccuggagcugaacgaauccgccuggggucggcuguggcuggagguucccgauucggccgcuccugauuccguaguuauggugaccguaacagcaggcggacgcgaggcgaacccuguaccuccuacccaugcuuuuuuaagacuccucguguccgcuccugcgccccaagugagaaaucacuacuuuccaagccagggcccugcccaucacccauaccgauugauuuag

SEQ ID NO: 218783 - RNA, 2559 nt, Artificial Sequence
  derived and/or modified sequence
augcugccaaccgagguuccccagucccacccgggacccagcgcucuuuuacuucugcaguugcuccucccuccuacuucagccuucuuccccaauauauggucgcuccuugccgcuccgggcuccauuacccaccaggaccucacagaggaggccgcgcucaacguaacgcugcagcuuuuccuggaacagcccccuccagggcgcccaccccuacgucuggaggacuuccucggacggacccuccuggccgaugaccuguucgcugcguacuuuggcccggggagcucgcggagguuucgagcugcccuuggcgaagugucuagggccaaugccgcacaggauuuccugccgaccucucgcaaugauccugaucuucacuucgaugcugaacgcuuaggccaaggaagagcacgccuggugggcgccuugcgggaaacggugguagccgcucgugcucucgaccacaccuuggcuaggcagagauugggagcagcccuucaugcacugcaagauuucuauucacacucuaacuggguggagcucggagagcagcagccacacccacaccuauuguggccacgccaggagcuccaaaaccucgcccagguggcggacccuaccugcuccgacugcgaagagcucuccuguccacgcaauuggcuuggcuucacgcugcucacaucuggguacuuugggacucacccgccaaagccaccaggcaaauguagccacggaggucauuucgaucggucuaguagucaacccccucgcgggggaauuaauaaagauucuacuaguccuggauucucaccccaccauauguuacaccuccaagcggcaaaacucgcccuacuggcaagcauccaagcauuuucucuccuucguucccgucugggggauagggacuuuucccgccuccucgacaucacuccugcguccucacuuucguuuguucucgauacaacggguucaaugggggaggagauaaaugccgcgaagauccaggcccgacaccuuguugagcagagaagagggucgccuauggagccaguccauuaugugcuggugccauuccacgaucccggauucggacccguguuuacuacuagugacccagauucuuuuuggcagcagcugaacgagauucacgcccuggggggaggcgacgagccugaaaugugucugucugcucuccaguuagccuuacugcacaccccuccgcucuccgacauauucgucuuuacugaugcaagcccgaaggacgcauuucucacaaaccagguagaaucuuugacucaggaaaggaggugccgagucacauuucuggugacugaagauacgucuagaguacagggucgggccaggagggaaauccuguccccucuuagauucgaaccauauaaagcugucgcccucgcuucuggaggugaaguaaucuuuacaaaggaucagcacaucagagacguggcggcuaucguuggcgagaguauggcugcccucguaacuuugccguuggauccaccagucgucguuccaggacaaccacucguuuucagcguugauggacuucugcagaaaaucaccgugcgcauccauggcgauauauccuccuuuuggaucaagaauccugcgggggugucccaagggcaagaggaaggaggugggccuuuggggcauacccgccgguucggucaguuuuggaugguaaccauggaugacccuccucagaccggcaccugggagauucaggucaccgcagaagauaccccaggugugaggguucaggcccaaacaucccuggacuuccuauuccauuuuggcauuccuauggaagauggaccucaccccggguuguauccacuuacacagccaguugccggccuccaaacacaauuacuaguagaagucacuggucucgguucacgcgcuaacccuggcgauccucagccucacuucucccauguuauccuccgaggggucccagaaggggccgaacuggggcaggucccacuggagccuguuggaccacccgaacggggucugcuggccgcgucgcugagccccacacugcuuucaacaccuagaccuuucucccucgaacuaauaggacaggacgcggcuggcaggcggcugcauagagccgcaccccaaccuaguaccguggugccgguacugcuagagcugucaggaccaucgggauucuuggcacccggaaguaaaguuccccuaucccugcgcauugccuccuuuagugggccucaagaccucgauuugcgcacauuugugaauccuagcuuuucuuuaacaucaaaucuaucccgcgcccaccuggagcugaaugaaucggcuuggggaagacuguggcucgaagucccagauagugcugcuccagacucugucguaauggugacugugacagccggaggccgggaagccaauccagugccaccuacacaugccuucuugagacuucucguaagcgcccccgccccacaaguacgcaaccacuacuuccccucacaggggcccgcucaccauccuuaccgguuaauuuag

SEQ ID NO: 218784 - RNA, 2559 nt, Artificial Sequence
  derived and/or modified sequence
augcucccuacggaaguuccccagucccaucccgggccaagcgcacuguuauuauuacagcuucuucucccuccuacuagcgccuuuuucccgaacauuuggucucuccuggcagccccagggucaauuacacaucaggaccucacugaggaagccgcacugaaugugacgcuacaacuguuccuggagcagccuccaccaggccgccccccacucagacucgaagauuuucuuggacggacucuacuggccgacgaccuguuugcugcauacuuuggucccggaucaucucgucgcuuccgggccgcccucggggaaguuucccgcgccaaugcugcacaggacuuucugccaaccagucguaacgaccccgaucugcauuuugacgccgaaagacugggucaaggccgagcccgucuggucggagcucuccgcgagacuguugucgccgcgcgugcacuggaucauacacuagcucgccagcgccugggcgccgcccuacaugcccugcaagacuuuuauucccacucuaauuggguugaguugggugaacagcagccacacccucaccuuuuguggccucgccaagaacuucagaauuuagcccagguggcugacccuacuugcucagauugcgaagaacuuaguugcccacgaaauugguuaggcuucacuuuguuaacaucuggguacuuuggaacacaucccccaaaacccccuggaaagugcagccauggcggccauuuugacaggaguucgucucagcccccuagggguggcauuaauaaagauucuacaucacccggcuucuccccccaucacaugcugcaccuucaagcugcuaaauuggcuuuauuggcauccauccaggcuuucagcuugcuacgaucucgucucggggaccgagacuucucacgguuacuagacauuacucccgcuucgaguuuaagcuucgugcuggauacaaccggaucuaugggagaagaaaucaacgccgccaaaauccaggcuaggcaccucgucgagcagcgccggggcucgccaauggaaccuguccauuauguucucgucccauuucacgauccugguuucggacccguguuuacgacuucugacccugacucauucuggcagcagcugaacgagauccaugccuuagguggaggagaugagccagaaaugugccugucugcgcugcaauuagccuugcuucauacaccaccccuguccgauauuuuugucuucacugacgcuagcccaaaagaugccuucuuaaccaaccaaguggaaucuuugacacaggaacggcgaugucgggugacauuucugguuacugaggauacgucaagaguucaaggacgcgcaaggagggaaaucuuauccccauuaagguucgaaccuuacaaagcagucgcacuggcgagcggaggcgaggugauauuuacgaaggaccagcacauuagagacgucgcugcuaucgucggugagucaauggccgcucucguaacacuaccacucgauccuccgguggucguucccgggcagccccuaguguuuucaguagacggucuucuucaaaagaucacuguacgcauucauggggauauaaguucguucuggauaaaaaacccggcuggagugagucaaggacaggaggaaggaggcgggccacuggggcacacacgacgcuucggacaguuuuggauggugaccauggaugaccccccucaaacagguacaugggagauucagguaacggccgaagauacacccggcguuagagugcaagcccagacaagcuuagacuucuuauuccacuucggcauacccauggaggacgggccucaccccggcuuguauccacucacccagccaguugccggucuacaaacccaacuccuggucgaggucaccgggcuuggaucgcgcgcgaauccuggggacccccagccucacuucagccacguaauacuuaggggcgucccugaaggagcugaacuaggccaggucccgcucgagccaguuggacccccugaaagaggccuccuagccgcuuccuugucuccaacucuccuuaguacuccuaggccauucucucuugagcugaucggucaagaugccgccgggagaagacugcaucgcgccgcaccucagcccaguaccguugugccugugcugcuugagcucuccgguccuaguggcuuuuuagcuccuggaaguaaagucccucucucccuuagaauugccaguuuuuccgggccccaggauuuggacuugcgaacguuugucaacccuuccuucuccuugaccucuaauuugaguagggcccauuuagagcuaaaugagagcgccuggggacgccuuuggcucgaagugcccgauucugccgcgcccgacuccguggucauggugaccgucacugcagguggccgcgaagccaauccaguuccaccuacccaugcuuuccuuagacugcucgucagugcuccagcuccacaaguacguaaucauuauuucccuucccagggcccugcucaccaucccuacagguugauauag

SEQ ID NO: 218785 - RNA, 2676 nt, Artificial Sequence
  derived and/or modified sequence
auguugccaaccgagguuccccaaagucauccaggaccuucugccuugcugcuucuccagcugcuguugcccccaaccuccgcguucuuuccaaacauuuggucgcuccuugcugcacccggaaguaucacgcaccaagaccuuacggaagaagcugcccugaacguuacacuucaacucuuucuagagcagccuccuccuggacguccuccgcucagacucgaggauuuucucggcaggacacuucucgccgacgauuuauuugcagccuacuucggccccggaucaagccgccgguucagagcugccuugggugaagucuccagggcuaacgccgcccaggauuuccuaccuaccucaagaaaugaccccgaucuccacuuugacgccgagaggcucggccaaggucgugcaagacucguuggggccuugagggagacggucguagcagcgcgggcauuagaucauacacucgcacgucaaagacugggcgcagcauuacacgcucugcaggauuucuacucucauucaaauuggguugaacuuggagagcagcagccacacccacaccugcuuuggccaagacaggaguuacagaacuuagcacaaguggcugauccuacuugcagugauugcgaggaauuguccugcccacgaaacuggcucggcuuuacucuccuaacauccggauauuuuggaacucaccccccaaaaccaccuggcaaauguagccauggcggacauuuugauagaaguucaucccagccuccaaggggagggaucaauaaagacuccaccucccccggcuuuagcccacaccacaugcuucaccuccaggccgcuaagcucgcucuguuagccuccauucaggccuucucccugcuccgcagcagacucggagaccgggauuucucuaggcuucuugauauaaccccagcauccuccuuaagcuucguccuggacacaaccgguaguaugggagaagaaauuaaugccgcaaaaauccaggcgagacaucugguugaacagagacgcgguagucccauggaaccaguccauuacgugcuagugccuuuucaugacccuggcuucgggccuguguucacuaccuccgaucccgacagcuucuggcagcaacucaaugaaauacaugcacugggagggggcgacgagcccgaaaugugucugucugcucugcagcuggcucugcuucauacuccaccucuuuccgauauuuucguuuucacugacgcuagccccaaagaugcuuuucucacaaaucaagucgagagccugacccaggaacgccgcugcagagugaccuuccuugucaccgaagauacuucaagaguucagggacgcgcgaggcgcgaaauucugucuccccuaagauuugagccuuacaaagccgucgcccuggccucaggcggagagguaauauucaccaaagaucaacauauacgggacguggcagccaucguuggcgaaucuauggccgcccucgucacucuuccguuagauccuccaguugucgugcccggacagccucugguguucuccguggauggacuccuucaaaaaauaacagugagaauacauggggauauuucgagcuuuuggauuaagaaucccgccggcguuucucaaggccaagaagaaggugggggaccacucggccacacucguagauuuggccaguucuggaugguaacaauggacgauccuccccaaacugggaccugggaaauccagguaaccgcagaggacacaccaggaguucgcgugcaggcucagacuagccuagauuucuuauuccauuuuggcaucccgauggaggaugggccucauccuggacuuuacccucucacucagcccgucgcuggacugcagacucaacuccugguggaggucaccggucuggggucgcgggcuaacccaggcgauccucagccccauuuuucccacguuauacuccgcggaguacccgaaggagccgaacugggccagguaccucucgaaccagucgguccccccgagagaggauugcuagcagcuagccuaagucccacccuacucucuaccccacgaccguucucucuggaguugaucggucaggaugcggcaggcagaagguuacaucgggcagcaccgcaaccuucaaccgucgucccuguguuguuagaguuauccggccccuccgguuuccuggccccgggcagcaaaguucccuuaucccuaagaauagcuaguuucuccgggccccaagacuuagaccucagaacuuucgugaaccccucauuuagucugacauccaaucucucucgcgcccauuuggaauugaaugaaucagcauggggucggcugugguuagaaguucccgauagcgcggccccggacucaguugugauggucacggucaccgcaggugggcgagaagcuaaucccguaccacccacucacgcauuucugcgguuacugguuucagcucccgcuccccaagaccgacauacgacccccacuggcucaucugauccaauacugaccacugcuacaccugccuuuucuccuuuuacccuggucacacaggguagagccggagccggauuagccgccggaucacccugguggggaacaguaggagguguucuacucuugcuugggcuggccucuugguag

SEQ ID NO: 218786 - RNA, 2676 nt, Artificial Sequence
  derived and/or modified sequence
auguugccaaccgagguuccacaaagccacccuggucccagcgcccugcuccuucugcagcuccuccuaccccccaccucagcguuuuuuccaaacaucuggucccugcuggccgccccuggaagcauuacacaccaagaucucaccgaggaagccgccuugaaugucacccugcaguuguuucuggaacaacccccucccggcagacccccacugcgccuugaggauuuucucgggaggacacugcuggccgacgaccucuucgccgcuuacuucggccccggcucuaguagacguuuucgggccgcucuaggagaagucagccgcgccaaugcagcccaagauuuccugccuacuaguagaaacgacccagaccugcacuuugaugcagaacggcugggccaggggagagcccgguuagugggagcauuacgugagacuguaguugccgcccgcgcauuagaccacacccuggcaagacaacgccucggugccgcccugcacgcccuccaggacuucuacucccacaguaauuggguugaacucggagagcaacagccucauccucaccuuuuguggccccgccaagaguuacagaaucucgcacagguagcugaucccacauguucagacugugaagaacuaucuuguccgcguaauuggcucggcuucacuuugcuaaccucuggguacuuugggacacauccccccaaaccacccgggaaaugcucgcacgggggacacuuugaucgcagcagcagccagcccccaagaggcggcaucaauaaggacagcacaucuccuggauucaguccucaucacaugcugcauuuacaggccgccaaauuagcccuucuggcgucuauacaagccuuuucccuacugcgcucacgacuaggcgacagagauuuuucaagauugcuagacauuacacccgccucuagucuuuccuuuguccuggauacaacuggaagcaugggagaagaaaucaaugcugccaagauccaagcacgccaccucgucgagcagcgcaggggcagccccauggaaccuguucacuacguguuagugcccuuucacgaucccggauucgggccuguuuucaccacuuccgaucccgacagcuuuuggcaacagcugaaugaaauccacgcccucggaggaggcgacgaacccgagaugugccucagcgcacugcagcuggcucuacugcacacaccgccucuguccgacauauuuguuuucaccgacgccagccccaaggaugcauuccugacuaaccaaguagaaagccugacacaggagcgucguugccgcgugaccuuucuuguuaccgaagacacgagcagaguccaggggagagcacggcgggagauucugucaccauuaagauuugaaccauacaaggccguggcccuggcuucagggggggaagugauuuucacaaaggaucagcacauuagagauguggccgcaauaguaggagagucuauggccgcccucgugacacuaccccuagauccuccaguagucguccccggccagccacucguguucucugucgauggacuucuccagaaaauuacaguccggauucauggagauauuaguuccuuuuggaucaaaaacccagcaggaguuagccaaggacaggaggaaggaggagguccccuuggacauacccgcagauucggacaguuuuggaugguaacaauggaugaccccccucagaccgguacuugggagauacaggucacugcagaagacacucccggugugcgcgugcaggcacagaccucacuggauuuucuguuccauuucggaauaccuauggaagacggcccucaccccggcuuauauccucugacacaacccgucgccggacuccaaacccagcugcuggucgaagucacuggccuaggcucacgcgccaaucccggggacccucagccgcacuuuucucacgugauccuacggggugucccugaaggcgcggagcucggucaaguaccccuggaaccuguaggaccccccgaacgaggucuccuggccgcaucgcugucaccuacgcugcuguccacaccccggcccuucagucuggagcuuauaggccaggacgcagcuggcagacgucuucaccgugccgcuccucagccaucaaccguugugccuguucugcucgaacugucuggccccucuggauuccucgcgccagggucuaagguuccccugucauuaaggaucgcgucuuuuucugggccucaagaucucgaucugcggacguuugucaaccccucauucagccucaccucuaaccugucaagggcccaccucgaacugaacgagagcgccuggggcaggcuguggcuggaagugcccgauagugccgcucccgauuccgugguaaugguaacggucacugccggcggaagagaagccaauccuguaccaccaacacaugcuuuucugcgucuucucguuucagcccccgccccucaggaucgccauacaacuccaacaggcucaucagacccaauacucacuaccgccacacccgcauuuucuccuuucacacuggucacucaaggacgagcgggggcagggcucgccgcugguucaccuugguggggcacuguuggcggggugcugcugcuucugggucuugcaagcugguag

SEQ ID NO: 218787 - RNA, 2676 nt, Artificial Sequence
  derived and/or modified sequence
augcugccaaccgagguuccacagagccaucccggcccuucugcgcugcuccuuuugcaauugcugcugccucccacauccgcauuuuucccuaacaucuggucccugcuagcagcacccggcuccauuacacaccaggauuugacugaggaggcugcccugaacgugacucuacagcuguuccucgaacagcccccaccuggacgccccccacuacgacuagaagauuuccugggacgcacccuguuggccgacgauuuguuugcugcguauuuuggcccuggcucaucucgcagauuucgcgcagcguuaggagaggugucucgggcuaacgcugcacaagauuuuuugccaacuucuaggaacgacccagauuuacacuucgacgcagaaagguuagggcaaggaagagcuagacuugugggagcuuugcgugaaaccguggucgccgcccgggcacuggaucauaccuuagcccgacagagauugggcgcugccuugcacgcacugcaggacuucuacucacacaguaauuggguggagcuuggggaacagcaaccucauccacaccuacuauggccacggcaggagcuucaaaaucuggcucagguggccgaccccaccugcuccgauugugaagaacugucuugcccuaggaacuggcucggcuucacacuucugaccucaggcuauuuugguacacauccuccuaagccuccaggaaagugcucucacggcgggcacuuugaccgaucaagcucucagccuccuagaggagggauuaacaaggacucgaccucgcccgguuuuuccccacaccauaugcuucaccugcaggccgcuaaauuagcauuacucgcguccauccaggcuuucuccuuguugcguagcagacucggcgauagagauuuuagucgccuacuugacaucacucccgcuagcagccugagcuuugugcuggauacaacaggaaguaugggugaagagauuaacgccgccaaaauucaggcccgucaucuagucgagcagaggcgcggcagucccauggaaccaguucacuacguacuuguuccguuccacgauccuggauucggacccgucuucacuacauccgaccccgacucauuuuggcagcaguuaaaugaaauucaugcucucggcggaggcgacgagccugagaugugcuugagcgcuuuacagcuggcccuacuucacacaccuccacugucggacaucuuuguguuuacugacgcuagccccaaggacgcuuuucuuacuaaucaaguggaaucuuuaacccaggaacgucgguguagagugacauuucucgugaccgaggauaccagucgcgugcaaggccgggcaaggcgagaaauccuauccccccugcgcuucgagccauacaaagcggucgcccuagccuccggcggugaggucaucuuuacaaaagaccaacacaucagagauguggccgcaauugucggugaguccauggcagcucugguuacccugccccucgacccgcccguggucguuccuggccagccucucguguucucaguggauggacugcuucagaagauuaccgugaggauucacggagauauauccucuuucuggauuaaaaacccugcaggcgugucucagggacaggaagaaggagguggcccacucggccauacucggcgauuuggacaauuuuggauggucacgauggacgaccccccucaaacaggcacuugggaaauacaagucaccgccgaagacacuccugguguacgaguucaggcccaaacuucccucgauuuccuuuuccacuuugguauucccauggaagacggcccacacccaggacuuuaucccuuaacucaaccuguugcuggccugcagacccaguuguugguggaaguaacuggccuuggcucuagggccaauccaggagauccacagccacacuuuucacaugugauucuuagaggugucccugaaggcgcagaacucggccagguaccucuggagccaguugggccgccagagaggggccugcucgcggcaucacugaguccuacucuucuuucuaccccccgaccauucagucucgaacugaucggccaggacgccgcuggacgccgccugcauagagccgcaccucagccuagcacugugguucccguguuauuggaacugucugggccuucaggguuuuuggcccccggauccaaagucccgcucucauuaaggaucgccucuuucucuggaccccaggacuuagaccucagaacguucgugaauccaagcuucaguuuaacaaguaaucucucccgugcgcacuuggaauugaaugagucugcauggggccggcuguggcuugaaguaccugauucagcugcccccgacagcgucgucauggugacaguuacugccggcggucgcgaagcuaauccggugccgccaacucaugcuuuuuugaggcugcuugucuccgcuccagcuccccaggauagacauaccacaccaaccggcuccucugauccuauuuugaccacagcuacuccagcuuucucaccuuuuacccuggugacucagggcagggcaggcgcaggccucgcugcuggaagucccugguggggaaccgucggcggaguguuacuccuccucggccuugcuuccugguag

SEQ ID NO: 218788 - RNA, 2676 nt, Artificial Sequence
  derived and/or modified sequence
augcuacccaccgaggucccacagagucauccugggccgucugcgcugcuacugcugcaacuccugcuaccccccaccagugccuucuucccuaacauauggucauuacuggcugcaccgggauccauaacacaccaggaccucacagaggaagccgcauugaacguuacauuacaacuauuccucgaacaaccccccccagggcgcccuccucuccgacuugaagacuuucugggcaggacucuucuggccgacgaucucuuugccgcuuacuuuggccccggaaguucccgcagguuccgggcagcucucggggaaguaucaagagcgaacgccgcccaggauuuccuccccacaucccgaaacgacccggaccugcacuuugacgcugagcgacugggacagggccgugcccgacuggucggcgcuuugagggagaccguuguagccgcacgggcccucgaucacacacuggcacggcagagguuaggugccgccuugcacgcccuccaggauuuuuauucucauuccaacuggguggaacucggugaacaacagccucacccacaccugcuuuggccccggcaagaacuccaaaaucuggcccaggucgccgaucccacuuguucugacugugaagaauuaagcuguccucgcaauuggcucggcuuuacccuccugaccucuggcuacuuuggcacccaccccccaaaacccccaggcaaauguucacacggaggacacuuugaucgaucuucaucccagccgccacguggaggcauuaauaaagacuccacuucacccggcuucuccccucaccacaugcuacacuugcaagccgcuaaguuggcacuccucgcuuccauccaggcauucucccugcugcggucucguuuaggggauagagacuuuucucggcugcuagauauuacaccugcauccagcuuguccuucguccucgauaccacaggcucaaugggggaggaaaucaaugccgcuaaaauacaagcccgccaccuugucgagcaacgccgcgguagcccaauggaacccguccauuacguucucguucccuuucaugaccccgguuuuggacccguuuucaccaccucagacccagauaguuucuggcagcaauuaaacgaaauccacgcacugggugggggagaugaaccugagaugugccugucagcucuacagcuggcccuccuccacacaccuccacuauccgauauuuuugucuucacagacgccucacccaaagaugccuuucugacaaaccaggucgagagcuuaacccaggagagaaggugucgcgucacauuccugguuaccgaggacaccuccagagugcagggccgugcccgccgggagauccucucaccacugcgauuugaacccuacaaagccguggcacuggcaucaggcggagaaguaauuuuuacuaaagaucaacacauccgggaugucgcagcaauugugggugaaagcauggcagcacuggucacuuuaccucucgauccucccguugucgugcccggccagccucuaguuuucaguguugacgggcuccugcagaagauuacugugagaauccauggggacaucaguucuuucuggauaaaaaacccagcuggaguuagccagggccaggaagaaggaggaggcccacuuggacacacacggagauuugggcaauucuggauggugaccauggacgacccuccgcaaaccggcacuugggagauucaaguuacugcagaggauacaccaggcguacgcguccaagcccagacuucccucgacuuccuguuucauuuuggaauuccaauggaagacggcccucauccaggacucuaucccuugacacaacccguggccggauuacagacacaacuucugguugaggugacaggcuugggcagcagagcgaaccccggagacccacaaccccauuuuucucaugucauccuuaggggaguucccgaaggggcggagcugggacaggugccgcuggaaccggugggcccuccugaaaggggacuguuggcagcaucccugagucccacacuucuaagcacuccaagaccauucucacuggagcuaauagggcaagacgcagcaggacgacgauugcauagagcugcgccucaaccaucuacaguuguucccgugcuucucgaacugagugggccuucuggauuccucgcccccgguucaaaagugccucugagccugcguauagcuucauucuccgggccucaagaccuugaccucaggacauucgucaaucccagcuuuagcuuaacuuccaaccucucucgcgcccaccuggaguuaaacgagagcgccuggggcagacuguggcuggaaguuccggacagcgcugcuccggacucuguggucauggucaccgucacugcugggggacgagaagccaauccagugccccccacucaugccuuucugcgguuacugguuucggccccugcaccucaggaccgccacacaacaccuaccggcagcuccgaccccauccucacuaccgcuacccccgcuuucaguccauuuacucucguaacccagggccgagcaggugccggucuagcggcaggaucuccuugguggggcaccguagggggcguucuauuacugcugggcuuagcuagcugguag
